(19) United States
(12) Patent Application Publication
(10) Pub. No.: US 2009/0215711 A1
(43) Pub. Date: Aug. 27, 2009

(54) Novel compositions and methods in cancer

(75) Inventors: David W. Morris, Davis, CA (US); Marc S. Malandro, Gibsonia, PA (US); Albert Lai, Davis, CA (US); Christin Tse, Libertyville, IL (US); Ali Fattaey, Oakland, CA (US)

Correspondence Address: NOVARTIS VACCINES AND DIAGNOSTICS, INC.;CORPORATE INTELLECTUAL PROPERTY-R338, P.O. BOX 8097, EMERYVILLE, CA, 94662-8097, US

(73) Assignee: Sagres Discovery, Inc., Emeryville, CA (US)

(21) Appl. No.: 10/836,956

(22) Filed: Apr. 30, 2004

(51) Int. Cl. A61K 31/7088; C12Q 1/68; G01N 33/574; C12N 5/00; C12N 5/02; C12N 15/63; C40B 30/00; C40B 40/06; C40B 40/10; C07K 2/00; C07K 16/00; C07K 17/00; C07H 21/04

(52) U.S. Cl. 514/44; 435/6; 435/7.23; 435/325; 435/346; 435/375; 435/320.1; 506/7; 506/16; 506/18; 530/300; 530/387.9; 530/391.1; 536/23.1

(57) ABSTRACT

The present invention relates to novel sequences for use in detection, diagnosis and treatment of cancers, especially lymphomas. The invention provides cancer-associated (CA) polynucleotide sequences whose expression is associated with cancer. The present invention provides CA polypeptides associated with cancer that present novel therapeutic targets against cancer. The present invention further provides diagnostic compositions and methods for the detection of cancer. The present invention provides monoclonal and polyclonal antibodies specific for the CA polypeptides. The present invention also provides diagnostic tools and therapeutic compositions and methods for screening, prevention and treatment of cancer.

### CROSS-REFERENCE TO RELATED APPLICATIONS

[0001] This application is related to the following U.S. Applications: U.S. Ser. No. 10/034,650, filed Dec. 20, 2001; U.S. Ser. No. 10/035,832, filed Dec. 26, 2001; U.S. Ser. No. 10/004,113, filed Oct. 23, 2001; U.S. Ser. No. 09/997,722, filed Nov. 30, 2001; U.S. Ser. No. 10/085,117, filed Feb. 27, 2002; U.S. Ser. No. 10/087,192, filed Mar. 1, 2002; U.S. Ser. No. 10/322,281, filed Dec. 17, 2002; U.S. Ser. No. 10/322,696, filed Dec. 17, 2002, U.S. Ser. No. 10/331,053, filed Dec. 26, 2002; U.S. Ser. No. 10/330,773, filed Dec. 27, 2002; U.S. Ser. No. 10/367,094, filed Feb. 14, 2003; U.S. Ser. No. 10/388,838, filed Mar. 14, 2003, U.S. Ser. No. 10/417,375 filed Apr. 15, 2003, U.S. Ser. No. 10/461,862, filed Jun. 13, 2003, U.S. Ser. No. 10/663,431 filed Sep. 15, 2003, U.S. Ser. No. 10/669,920 filed Sep. 23, 2003, U.S. Ser. No. 10/670,914 filed Sep. 24, 2003, U.S. Ser. No. 10/674,575, filed Sep. 29, 2003, U.S. Ser. No. 10/676,684 filed Sep. 30, 2003, U.S. Ser. No. 10/692,382 filed Oct. 22, 2003, and U.S. Ser. No. ______, (Attorney Docket No. 529452002900), filed Apr. 27, 2004, all of which are expressly incorporated herein by reference in their entirety.

### DESCRIPTION OF ACCOMPANYING CD-ROMS

[0002] Tables 1-64 are filed herewith in CD-ROM in accordance with 37 C.F.R. §§ 1.52 and 1.58. Two identical copies (marked “Copy 1” and “Copy 2”) of this CD-ROM are submitted.

[0003] Contents of the CD-ROM disks submitted herewith are hereby incorporated by reference into the Specification.

LENGTHY TABLES
The patent application contains a lengthy table section. A copy of the table is available in electronic form from the USPTO web site (http://seqdata.uspto.gov/?pageRequest=docDetail&DocID=US20090215711A1). An electronic copy of the table will also be available from the USPTO upon request and payment of the fee set forth in 37 CFR 1.19(b)(3).

### TECHNICAL FIELD OF THE INVENTION

[0004] This invention relates generally to the field of cancer-associated genes. Specifically, it relates to novel sequences for use in diagnosis and treatment of cancer and tumors, as well as the use of the novel compositions in screening methods. The present invention provides methods of using cancer associated polynucleotides, their corresponding gene products and antibodies specific for the gene products in the detection, diagnosis, prevention and/or treatment of associated cancers.

### BACKGROUND OF THE INVENTION

[0005] Oncogenes are genes that can cause cancer. Carcinogenesis can occur by a wide variety of mechanisms, including infection of cells by viruses containing oncogenes, activation of protooncogenes in the host genome, and mutations of protooncogenes and tumor suppressor genes. Carcinogenesis is fundamentally driven by somatic cell evolution (i.e. mutation and natural selection of variants with progressive loss of growth control). The genes that serve as targets for these somatic mutations are classified as either protooncogenes or tumor suppressor genes, depending on whether their mutant phenotypes are dominant or recessive, respectively.

[0006] There are a number of viruses known to be involved in human cancer as well as in animal cancer. Of particular interest here are viruses that do not contain oncogenes themselves; these are slow-transforming retroviruses. They induce tumors by integrating into the host genome and affecting neighboring protooncogenes in a variety of ways. Provirus insertion mutation is a normal consequence of the retroviral life cycle. In infected cells, a DNA copy of the retrovirus genome (called a provirus) is integrated into the host genome. A newly integrated provirus can affect gene expression in cis at or near the integration site by one of two mechanisms. Type I insertion mutations up-regulate transcription of proximal genes as a consequence of regulatory sequences (enhancers and/or promoters) within the proviral long terminal repeats (LTRs). Type II insertion mutations cause truncation of coding regions due to either integration directly within an open reading frame or integration within an intron flanked on both sides by coding sequences. The analysis of sequences at or near the insertion sites has led to the identification of a number of new protooncogenes.

[0007] With respect to lymphoma and leukemia, retroviruses such as AKV murine leukemia virus (MLV) or SL3-3 MLV, are potent inducers of tumors when inoculated into susceptible newborn mice, or when carried in the germline. A number of sequences have been identified as relevant in the induction of lymphoma and leukemia by analyzing the insertion sites; see Sorensen et al., J. of Virology 74:2161 (2000); Hansen et al., Genome Res. 10(2):237-43 (2000); Sorensen et al., J. Virology 70:4063 (1996); Sorensen et al., J. Virology 67:7118 (1993); Joosten et al., Virology 268:308 (2000); and Li et al., Nature Genetics 23:348 (1999); all of which are expressly incorporated by reference herein. With respect to cancers, especially breast cancer, prostate cancer and cancers with epithelial origin, the mammalian retrovirus, mouse mammary tumor virus (MMTV) is a potent inducer of tumors when inoculated into susceptible newborn mice, or when carried in the germ line. Mammary Tumors in the Mouse, edited by J. Hilgers and M. Sluyser; Elsevier/North-Holland Biomedical Press; New York, N.Y.

[0008] The pattern of gene expression in a particular living cell is characteristic of its current state. Nearly all differences in the state or type of a cell are reflected in the differences in RNA levels of one or more genes. Comparing expression patterns of uncharacterized genes may provide clues to their function. High throughput analysis of expression of hundreds or thousands of genes can help in (a) identification of complex genetic diseases, (b) analysis of differential gene expression over time, between tissues and disease states, and (c) drug discovery and toxicology studies. Increase or decrease in the levels of expression of certain genes correlate with cancer biology. For example, oncogenes are positive regulators of tumorigenesis, while tumor suppressor genes are negative regulators of tumorigenesis. (Marshall, Cell, 64: 313-326 (1991); Weinberg, Science, 254: 1138-1146 (1991)).

[0009] Accordingly, it is an object of the invention to provide polynucleotide and polypeptide sequences involved in cancer and, in particular, in oncogenesis.

[0010] Immunotherapy, or the use of antibodies for therapeutic purposes has been used in recent years to treat cancer. Passive immunotherapy involves the use of monoclonal antibodies in cancer treatments. See for example, Cancer: Principles and Practice of Oncology, 6^{th} Edition (2001) Chapt. 20 pp. 495-508. Inherent therapeutic biological activity of these antibodies include direct inhibition of tumor cell growth or survival, and the ability to recruit the natural cell killing activity of the body's immune system. These agents are administered alone or in conjunction with radiation or chemotherapeutic agents. Rituxan® and Herceptin®, approved for treatment of lymphoma and breast cancer, respectively, are two examples of such therapeutics. Alternatively, antibodies are used to make antibody conjugates where the antibody is linked to a toxic agent and directs that agent to the tumor by specifically binding to the tumor. Mylotarg® is an example of an approved antibody conjugate used for the treatment of leukemia.

[0011] Accordingly, it is another object of this invention to provide antigens (cancer-associated polypeptides) associated with a variety of cancers as targets for diagnostic and/or therapeutic antibodies. These antigens are also useful for drug discovery (e.g., small molecules) and for further characterization of cellular regulation, growth, and differentiation.

### SUMMARY OF THE INVENTION

[0012] In accordance with the objects outlined above, the present invention provides methods for screening for compositions that modulate cancer, especially lymphoma and leukemia. The present invention also provides methods for screening for compositions which modulate carcinomas, especially mammary adenocarcinomas. Also provided herein are methods of inhibiting proliferation of a cell, preferably a lymphoma cell or a breast cancer cell. Methods of treatment of cancer, including diagnosis, are also provided herein.

[0013] In one aspect, a method of screening drug candidates comprises providing a cell that expresses a cancer-associated (CA) gene or fragments thereof. Preferred embodiments of CA genes are genes that are differentially expressed in cancer cells, preferably lymphatic, breast, prostate or epithelial cells, compared to other cells. Preferred embodiments of CA genes used in the methods herein include, but are not limited to the nucleic acids selected from Tables 1-64 (human genomic sequences of SEQ ID NOS: 6, 11, 17, 25, 37, 45, 53, 61, 71, 79, 89, 99, 120, 126, 134, 144, 153, 172, 183, 189, 197, 203, 211, 217, 227, 244, 264, 276, 294, 304, 314, 326, 340, 346, 364, 376, 390, 459, 475, 485, 499, and 507, and sequences of SEQ ID NOS: 7, 9, 12, 18, 26, 28, 30, 32, 38, 40, 46, 48, 54, 62, 64, 66, 72, 74, 80, 90, 92, 100, 102, 104, 106, 108, 121, 127, 129, 135, 137, 139, 145, 154, 156, 158, 173, 175, 184, 190, 192, 198, 204, 206, 212, 218, 220, 228, 230, 232, 234, 236, 245, 247, 249, 251, 253, 255, 265, 267, 269, 271, 277, 279, 281, 283, 285, 287, 295, 297, 299, 305, 307, 309, 315, 317, 327, 329, 331, 333, 335, 341, 347, 349, 351, 353, 355, 357, 365, 367, 369, 371, 377, 379, 381, 383, 385, 391, 460, 462, 464, 466, 468, 470, 476, 478, 480, 486, 488, 500, 502, and 508 corresponding to the human mRNAs generated therefrom). The methods further include adding a drug candidate to the cell and determining the effect of the drug candidate on the expression of the CA gene.

[0014] In one embodiment, the method of screening drug candidates includes comparing the level of expression in the absence of the drug candidate to the level of expression in the presence of the drug candidate.

[0015] Also provided herein is a method of screening for a bioactive agent capable of binding to a CA protein (CAP), the method comprising combining the CAP and a candidate bioactive agent, and determining the binding of the candidate agent to the CAP.

[0016] Further provided herein is a method for screening for a bioactive agent capable of modulating the activity of a CAP. In one embodiment, the method comprises combining the CAP and a candidate bioactive agent, and determining the effect of the candidate agent on the bioactivity of the CAP.

[0017] Also provided is a method of evaluating the effect of a candidate cancer drug comprising administering the drug to a patient and removing a cell sample from the patient. The expression profile of the cell is then determined. This method may further comprise comparing the expression profile of the patient to an expression profile of a healthy individual.

[0018] In a further aspect, a method for inhibiting the activity of a CA protein is provided. In one embodiment, the method comprises administering to a patient an inhibitor of a CA protein preferably selected from the group consisting of the sequences outlined in Tables 1-64 (SEQ ID NOS: 8, 10, 13, 19, 27, 29, 31, 33, 39, 41, 47, 49, 55, 63, 65, 67, 73, 75, 81, 91, 93, 101, 103, 105, 107, 109, 122, 128, 130, 136, 138, 140, 146, 155, 157, 159, 174, 176, 185, 191, 193, 199, 205, 207, 213, 219, 221, 229, 231, 233, 235, 237, 246, 248, 250, 252, 254, 256, 266, 268, 270, 272, 278, 280, 282, 284, 286, 288, 296, 298, 300, 306, 308, 310, 316, 318, 328, 330, 332, 334, 336, 342, 348, 350, 352, 354, 356, 358, 366, 368, 370, 372, 378, 380, 382, 384, 386, 392, 461, 463, 465, 467, 469, 471, 477, 479, 481, 487, 489, 501, 503, and 509).

[0019] A method of neutralizing the effect of a CA protein, preferably a protein encoded by a nucleic acid selected from the group of sequences outlined in Tables 1-64 (human genomic sequences of SEQ ID NOS: 6, 11, 17, 25, 37, 45, 53, 61, 71, 79, 89, 99, 120, 126, 134, 144, 153, 172, 183, 189, 197, 203, 211, 217, 227, 244, 264, 276, 294, 304, 314, 326, 340, 346, 364, 376, 390, 459, 475, 485, 499, and 507, and sequences of SEQ ID NOS: 7, 9, 12, 18, 26, 28, 30, 32, 38, 40, 46, 48, 54, 62, 64, 66, 72, 74, 80, 90, 92, 100, 102, 104, 106, 108, 121, 127, 129, 135, 137, 139, 145,-154, 156, 158, 173, 175, 184, 190, 192, 198, 204, 206, 212, 218, 220, 228, 230, 232, 234, 236, 245, 247, 249, 251, 253, 255, 265, 267, 269, 271, 277, 279, 281, 283, 285, 287, 295, 297, 299, 305, 307, 309, 315, 317, 327, 329, 331, 333, 335, 341, 347, 349, 351, 353, 355, 357, 365, 367, 369, 371, 377, 379, 381, 383, 385, 391, 460, 462, 464, 466, 468, 470, 476, 478, 480, 486, 488, 500, 502, and 508 corresponding to the human mRNAs generated therefrom), is also provided. Preferably, the method comprises contacting an agent specific for said protein with said protein in an amount sufficient to effect neutralization.

[0020] Moreover, provided herein is a biochip comprising a nucleic acid segment which encodes a CA protein, preferably selected from the sequences outlined in Tables 1-64 (SEQ ID NOS: 7, 9, 12, 18, 26, 28, 30, 32, 38, 40, 46, 48, 54, 62, 64, 66, 72, 74, 80, 90, 92, 100, 102, 104, 106, 108, 121, 127, 129, 135, 137, 139, 145, 154, 156, 158, 173, 175, 184, 190, 192, 198, 204, 206, 212, 218, 220, 228, 230, 232, 234, 236, 245, 247, 249, 251, 253, 255, 265, 267, 269, 271, 277, 279, 281, 283, 285, 287, 295, 297, 299, 305, 307, 309, 315, 317, 327, 329, 331, 333, 335, 341, 347, 349, 351, 353, 355, 357, 365, 367, 369, 371, 377, 379, 381, 383, 385, 391, 460, 462, 464, 466, 468, 470, 476, 478, 480, 486, 488, 500, 502, and 508).

[0021] Also provided herein is a method for diagnosing or determining the propensity to cancers, especially lymphoma or leukemia or carcinoma by sequencing at least one carcinoma or lymphoma gene of an individual. In yet another aspect of the invention, a method is provided for determining cancer including lymphoma and leukemia gene copy numbers in an individual.

[0022] The invention provides an isolated nucleic acid comprising at least 10, 12, 15, 20 or 30 contiguous nucleotides of a sequence selected from the group consisting of the polynucleotide sequences SEQ ID NOS: 7, 9, 12, 18, 26, 28, 30, 32, 38, 40, 46, 48, 54, 62, 64, 66, 72, 74, 80, 90, 92, 100, 102, 104, 106, 108, 121, 127, 129, 135, 137, 139, 145, 154, 156, 158, 173, 175, 184, 190, 192, 198, 204, 206, 212, 218, 220, 228, 230, 232, 234, 236, 245, 247, 249, 251, 253, 255, 265, 267, 269, 271, 277, 279, 281, 283, 285, 287, 295, 297, 299, 305, 307, 309, 315, 317, 327, 329, 331, 333, 335, 341, 347, 349, 351, 353, 355, 357, 365, 367, 369, 371, 377, 379, 381, 383, 385, 391, 460, 462, 464, 466, 468, 470, 476, 478, 480, 486, 488, 500, 502, and 508 shown in Tables 1-64, or its complement, or an expression vector comprising the isolated nucleic acids and host cells comprising them.

[0023] In some embodiments, the polynucleotide, or its complement or a fragment thereof, further comprises a detectable label, is attached to a solid support, is prepared at least in part by chemical synthesis, is an antisense fragment, is single stranded, is double stranded or comprises a microarray.

[0024] The invention provides an isolated polypeptide, encoded within an open reading frame of a CA sequence selected from the group consisting of the polynucleotide sequences of SEQ ID NOS: 6, 11, 17, 25, 37, 45, 53, 61, 71, 79, 89, 99, 120, 126, 134, 144, 153, 172, 183, 189, 197, 203, 211, 217, 227, 244, 264, 276, 294, 304, 314, 326, 340, 346, 364, 376, 390, 459, 475, 485, 499, and 507 shown in Tables 1-64, or its complement. The invention provides an isolated polypeptide, wherein said polypeptide comprises the amino acid sequence encoded by a polynucleotide selected from the group consisting of SEQ ID NOS: 7, 9, 12, 18, 26, 28, 30, 32, 38, 40, 46, 48, 54, 62, 64, 66, 72, 74, 80, 90, 92, 100, 102, 104, 106, 108, 121, 127, 129, 135, 137, 139, 145, 154, 156, 158, 173, 175, 184, 190, 192, 198, 204, 206, 212, 218, 220, 228, 230, 232, 234, 236, 245, 247, 249, 251, 253, 255, 265, 267, 269, 271, 277, 279, 281, 283, 285, 287, 295, 297, 299, 305, 307, 309, 315, 317, 327, 329, 331, 333, 335, 341, 347, 349, 351, 353, 355, 357, 365, 367, 369, 371, 377, 379, 381, 383, 385, 391, 460, 462, 464, 466, 468, 470, 476, 478, 480, 486, 488, 500, 502, and 508 shown in Tables 1-64. The invention provides an isolated polypeptide, wherein said polypeptide comprises the amino acid sequence encoded by a polypeptide selected from the group consisting of SEQ ID NOS: 8, 10, 13, 19, 27, 29, 31, 33, 39, 41, 47, 49, 55, 63, 65, 67, 73, 75, 81, 91, 93, 101, 103, 105, 107, 109, 122, 128, 130, 136, 138, 140, 146, 155, 157, 159, 174, 176, 185, 191, 193, 199, 205, 207, 213, 219, 221, 229, 231, 233, 235, 237, 246, 248, 250, 252, 254, 256, 266, 268, 270, 272, 278, 280, 282, 284, 286, 288, 296, 298, 300, 306, 308, 310, 316, 318, 328, 330, 332, 334, 336, 342, 348, 350, 352, 354, 356, 358, 366, 368, 370, 372, 378, 380, 382, 384, 386, 392, 461, 463, 465, 467, 469, 471, 477, 479, 481, 487, 489, 501, 503, and 509 shown in Tables 1-64.

[0025] The invention further provides an isolated polypeptide, comprising the amino acid sequence of an epitope of the amino acid sequence of a CA polypeptide selected from the group consisting of SEQ ID NOS: 8, 10, 13, 19, 27, 29, 31, 33, 39, 41, 47, 49, 55, 63, 65, 67, 73, 75, 81, 91, 93, 101, 103, 105, 107, 109, 122, 128, 130, 136, 138, 140, 146, 155, 157, 159, 174, 176, 185, 191, 193, 199, 205, 207, 213, 219, 221, 229, 231, 233, 235, 237, 246, 248, 250, 252, 254, 256, 266, 268, 270, 272, 278, 280, 282, 284, 286, 288, 296, 298, 300, 306, 308, 310, 316, 318, 328, 330, 332, 334, 336, 342, 348, 350, 352, 354, 356, 358, 366, 368, 370, 372, 378, 380, 382, 384, 386, 392, 461, 463, 465, 467, 469, 471, 477, 479, 481, 487, 489, 501, 503, and 509 shown in Tables 1-64, wherein the polypeptide or fragment thereof may be attached to a solid support. In one embodiment the invention provides an isolated antibody (monoclonal or polyclonal) or antigen binding fragment thereof, that binds to such a polypeptide. The isolated antibody or antigen binding fragment thereof may be attached to a solid support, or further comprises a detectable label.

[0026] In one embodiment, the invention provides a kit for diagnosing the presence of cancer in a test sample, said kit comprising at least one polynucleotide that selectively hybridizes to a CA polynucleotide sequence shown in Tables 1-64, or its complement. In another embodiment. the invention provides an electronic library comprising a CA polynucleotide, a CA polypeptide, or fragment thereof, shown in Tables 1-64.

[0027] In one embodiment, the invention provides a method of screening for anticancer activity comprising: (a) providing a cell that expresses a cancer associated (CA) gene encoded by a nucleic acid sequence selected from the group consisting of the CA sequences shown in Tables 1-64, or fragment thereof; (b) contacting a tissue sample derived from a cancer cell with an anticancer drug candidate; (c) monitoring an effect of the anticancer drug candidate on an expression of the CA polynucleotide in the tissue sample, and optionally (d) comparing the level of expression in the absence of said drug candidate to the level of expression in the presence of the drug candidate.

[0028] In one embodiment, the invention provides a method for detecting cancer associated with expression of a polypeptide in a test cell sample, comprising the steps of: (i) detecting a level of expression of at least one polypeptide selected from the group consisting of SEQ ID NOS: 8, 10, 13, 19, 27, 29, 31, 33, 39, 41, 47, 49, 55, 63, 65, 67, 73, 75, 81, 91, 93, 101, 103, 105, 107, 109, 122, 128, 130, 136, 138, 140, 146, 155, 157, 159, 174, 176, 185, 191, 193, 199, 205, 207, 213, 219, 221, 229, 231, 233, 235, 237, 246, 248, 250, 252, 254, 256, 266, 268, 270, 272, 278, 280, 282, 284, 286, 288, 296, 298, 300, 306, 308, 310, 316, 318, 328, 330, 332, 334, 336, 342, 348, 350, 352, 354, 356, 358, 366, 368, 370, 372, 378, 380, 382, 384, 386, 392, 461, 463, 465, 467, 469, 471, 477, 479, 481, 487, 489, 501, 503, and 509 shown in Tables 1-64, or a fragment thereof, and (ii) comparing the level of expression of the polypeptide in the test sample with a level of expression of polypeptide in a normal cell sample, wherein an altered level of expression of the polypeptide in the test cell sample relative to the level of polypeptide expression in the normal cell sample is indicative of the presence of cancer in the test cell sample.

[0029] In another embodiment, the invention provides a method for detecting cancer associated with expression of a polypeptide in a test cell sample, comprising the steps of: (i) detecting a level of activity of at least one polypeptide selected from the group consisting of SEQ ID NOS: 8, 10, 13, 19, 27, 29, 31, 33, 39, 41, 47, 49, 55, 63, 65, 67, 73, 75, 81, 91, 93, 101, 103, 105, 107, 109, 122, 128, 130, 136, 138, 140, 146, 155, 157, 159, 174, 176, 185, 191, 193, 199, 205, 207, 213, 219, 221, 229, 231, 233, 235, 237, 246, 248, 250, 252, 254, 256, 266, 268, 270, 272, 278, 280, 282, 284, 286, 288, 296, 298, 300, 306, 308, 310, 316, 318, 328, 330, 332, 334, 336, 342, 348, 350, 352, 354, 356, 358, 366, 368, 370, 372, 378, 380, 382, 384, 386, 392, 461, 463, 465, 467, 469, 471, 477, 479, 481, 487, 489, 501, 503, and 509 shown in Tables 1-64, or a fragment thereof, wherein said activity corresponds to at least one activity for the polypeptide listed in Tables 1-64; and (ii) comparing the level of activity of the polypeptide in the test sample with a level of activity of polypeptide in a normal cell sample, wherein an altered level of activity of the polypeptide in the test cell sample relative to the level of polypeptide activity in the normal cell sample is indicative of the presence of cancer in the test cell sample.

[0030] In another embodiment, the invention provides a method for detecting cancer associated with the presence of an antibody in a test serum sample, comprising the steps of: (i) detecting a level of an antibody against an antigenic polypeptide selected from the group consisting of SEQ ID NOS: 8, 10, 13, 19, 27, 29, 31, 33, 39, 41, 47, 49, 55, 63, 65, 67, 73, 75, 81, 91, 93, 101, 103, 105, 107, 109, 122, 128, 130, 136, 138, 140, 146, 155, 157, 159, 174, 176, 185, 191, 193, 199, 205, 207, 213, 219, 221, 229, 231, 233, 235, 237, 246, 248, 250, 252, 254, 256, 266, 268, 270, 272, 278, 280, 282, 284, 286, 288, 296, 298, 300, 306, 308, 310, 316, 318, 328, 330, 332, 334, 336, 342, 348, 350, 352, 354, 356, 358, 366, 368, 370, 372, 378, 380, 382, 384, 386, 392, 461, 463, 465, 467, 469, 471, 477, 479, 481, 487, 489, 501, 503, and 509 shown in Tables 1-64, or antigenic fragment thereof, and (ii) comparing said level of said antibody in the test sample with a level of said antibody in the control sample, wherein an altered level of antibody in said test sample relative to the level of antibody in the control sample is indicative of the presence of cancer in the test serum sample.

[0031] The invention provides a method for screening for a bioactive agent capable of modulating the activity of a CA protein (CAP), wherein said CAP is encoded by a nucleic acid comprising a nucleic acid sequence selected from the group consisting of the polynucleotide sequences SEQ ID NOS: 7, 9, 12, 18, 26, 28, 30, 32, 38, 40, 46, 48, 54, 62, 64, 66, 72, 74, 80, 90, 92, 100, 102, 104, 106, 108, 121, 127, 129, 135, 137, 139, 145, 154, 156, 158, 173, 175, 184, 190, 192, 198, 204, 206, 212, 218, 220, 228, 230, 232, 234, 236, 245, 247, 249, 251, 253, 255, 265, 267, 269, 271, 277, 279, 281, 283, 285, 287, 295, 297, 299, 305, 307, 309, 315, 317, 327, 329, 331, 333, 335, 341, 347, 349, 351, 353, 355, 357, 365, 367, 369, 371, 377, 379, 381, 383, 385, 391, 460, 462, 464, 466, 468, 470, 476, 478, 480, 486, 488, 500, 502, and 508 shown in Tables 1-64, said method comprising: a) combining said CAP and a candidate bioactive agent; and b) determining the effect of the candidate agent on the bioactivity of said CAP. According to the method the bioactive agent: affects the expression of the CA protein (CAP); affects the activity of the CA protein (CAP), wherein such activity is selected from the activities listed in Tables 1-64.

[0032] In one embodiment, the invention provides a method for diagnosing cancer comprising: a) determining the expression of one or more genes comprising a nucleic acid sequence selected from the group consisting of the human genomic and mRNA sequences outlined in Tables 1-64, in a first tissue type of a first individual; and b) comparing said expression of said gene(s) from a second normal tissue type from said first individual or a second unaffected individual; wherein a difference in said expression indicates that the first individual has cancer.

[0033] In another embodiment the invention provides a method for treating cancers comprising administering to a patient a bioactive agent modulating the activity of a CA protein (CAP), wherein said CAP is encoded by a nucleic acid comprising a nucleic acid sequence selected from the group consisting of the human nucleic acid sequences in Tables 1-64 and further wherein the bioactive agent binds to the CA protein; wherein the CA protein comprises SEQ ID NOS: 8, 10, 13, 19, 27, 29, 31, 33, 39, 41, 47, 49, 55, 63, 65, 67, 73, 75, 81, 91, 93, 101, 103, 105, 107, 109, 122, 128, 130, 136, 138, 140, 146, 155, 157, 159, 174, 176, 185, 191, 193, 199, 205, 207, 213, 219, 221, 229, 231, 233, 235, 237, 246, 248, 250, 252, 254, 256, 266, 268, 270, 272, 278, 280, 282, 284, 286, 288, 296, 298, 300, 306, 308, 310, 316, 318, 328, 330, 332, 334, 336, 342, 348, 350, 352, 354, 356, 358, 366, 368, 370, 372, 378, 380, 382, 384, 386, 392, 461, 463, 465, 467, 469, 471, 477, 479, 481, 487, 489, 501, 503, and 509 shown in Tables 1-64 and has an activity selected from the group consisting of: G-protein coupled receptor, nucleotide binding, nucleic acid binding, calcium binding protein, apoptosis, cell cycle regulator, chromatin protein. transcription factor, transport protein, signal transduction, nuclear receptor, growth factor, protein kinase, protein phosphorylase, peptidase, electron transport, thioredoxin, semaphorin, signaling, and motility as shown in Tables 1-64.

[0034] The invention also provides a method for detecting a presence or an absence of cancer cells in an individual, the method comprising: contacting cells from the individual with the antibody according to the invention; and detecting a complex of a CAP from the cancer cells and the antibody, wherein detection of the complex correlates with the presence of cancer cells in the individual. In one embodiment the invention provides a method for inhibiting growth of cancer cells in an individual, the method comprising: administering to the individual an effective amount of a pharmaceutical composition according to the invention. In another embodiment the invention provides a method for delivering a therapeutic agent to cancer cells in an individual, the method comprising: administering to the individual an effective amount of a pharmaceutical composition according to according to the invention.

[0035] Novel sequences associated with cancer are also provided herein. Other aspects of the invention will become apparent to the skilled artisan by the following description of the invention.

### BRIEF DESCRIPTION OF THE FIGURES

[0036] FIG. 1 depicts PCR amplification of host-provirus junction fragments.

[0037] FIG. 2 shows an example of average threshold cycle (C_{T}) values for a housekeeper gene and target gene.

[0038] FIG. 3 shows an example of the calculated difference (ΔΔC_{T}) between the C_{T} values of target and housekeeper genes (ΔC_{T}) for various samples.

[0039] FIG. 4 shows the ΔΔC_{T} and comparative expression level for each sample from FIG. 3.

### DETAILED DESCRIPTION OF PREFERRED EMBODIMENTS

[0040] The present invention is directed to a number of sequences associated with cancers, especially lymphoma, breast cancer or prostate cancer. The relatively tight linkage between clonally-integrated proviruses and protooncogenes forms “provirus tagging”, in which slow-transforming retroviruses that act by an insertion mutation mechanism are used to isolate protooncogenes. In some models, uninfected animals have low cancer rates, and infected animals have high cancer rates. It is known that many of the retroviruses involved do not carry transduced host protooncogenes or pathogenic trans-acting viral genes, and thus the cancer incidence must therefore be a direct consequence of proviral integration effects into host protooncogenes. Since proviral integration is random, rare integrants will “activate” host protooncogenes that provide a selective growth advantage, and these rare events result in new proviruses at clonal stoichiometries in tumors. In contrast to mutations caused by chemicals, radiation, or spontaneous errors, protooncogene insertion mutations can be easily located by virtue of the fact that a convenient-sized genetic marker of known sequence (the provirus) is present at the site of mutation. Host sequences that flank clonally integrated proviruses can be cloned using a variety of strategies. Once these sequences are in hand, the tagged protooncogenes can be subsequently identified. The presence of provirus at the same locus in two or more independent tumors is prima facie evidence that a protooncogene is present at or very near the provirus integration sites. This is because the genome is too large for random integrations to result in observable clustering. Any clustering that is detected is unequivocal evidence for biological selection (i.e. the tumor phenotype). Moreover, the pattern of proviral integrants (including orientations) provides compelling positional information that makes localization of the target gene at each cluster relatively simple. The three mammalian retroviruses that are known to cause cancer by an insertion mutation mechanism are FeLV (leukemia/lymphoma in cats), MLV (leukemia/lymphoma in mice and rats), and MMTV (mammary cancer in mice).

[0041] Thus, the use of oncogenic retroviruses, whose sequences insert into the genome of the host organism resulting in cancer, allows the identification of host sequences involved in cancer. These sequences may then be used in a number of different ways, including diagnosis, prognosis, screening for modulators (including both agonists and antagonists), antibody generation (for immunotherapy and imaging), etc. However, as will be appreciated by those in the art, oncogenes that are identified in one type of cancer such as lymphoma or leukemia have a strong likelihood of being involved in other types of cancers as well. Thus, while the sequences outlined herein are initially identified as correlated with lymphoma, they can also be found in other types of cancers as well, outlined below.

### DEFINITIONS

[0042] Accordingly, the present invention provides nucleic acid and protein sequences that are associated with cancer, herein termed “cancer associated” or “CA” sequences. In one embodiment, the present invention provides nucleic acid and protein sequences that are associated with cancers that originate in lymphatic tissue, herein termed “lymphoma associated,” “leukemia associated” or “LA” sequences. In another embodiment, the present invention provides nucleic acid and protein sequences that are associated with carcinomas which originate in breast tissue, herein termed “breast cancer associated” or “BC” sequences.

[0043] Suitable cancers that can be diagnosed or screened for using the methods of the present invention include cancers classified by site or by histological type. Cancers classified by site include cancer of the oral cavity and pharynx (lip, tongue, salivary gland, floor of mouth, gum and other mouth, nasopharynx, tonsil, oropharynx, hypopharynx, other oral/pharynx); cancers of the digestive system (esophagus; stomach; small intestine; colon and rectum; anus, anal canal, and anorectum; liver; intrahepatic bile duct; gallbladder; other biliary; pancreas; retroperitoneum; peritoneum, omentum, and mesentery; other digestive); cancers of the respiratory system (nasal cavity, middle ear, and sinuses; larynx; lung and bronchus; pleura; trachea, mediastinum, and other respiratory); cancers of the mesothelioma; bones and joints; and soft tissue, including heart; skin cancers, including melanomas and other non-epithelial skin cancers; Kaposi's sarcoma and breast cancer; cancer of the female genital system (cervix uteri; corpus uteri; uterus, nos; ovary; vagina; vulva; and other female genital); cancers of the male genital system (prostate gland; testis; penis; and other male genital); cancers of the urinary system (urinary bladder; kidney and renal pelvis; ureter; and other urinary); cancers of the eye and orbit; cancers of the brain and nervous system (brain; and other nervous system); cancers of the endocrine system (thyroid gland and other endocrine, including thymus); lymphomas (Hodgkin's disease and non-Hodgkin's lymphoma), multiple myeloma, and leukemias (lymphocytic leukemia; myeloid leukemia; monocytic leukemia; and other leukemias).

[0044] Other cancers, classified by histological type, that may be associated with the sequences of the invention include, but are not limited to, Neoplasm, malignant; Carcinoma, NOS; Carcinoma, undifferentiated, NOS; Giant and spindle cell carcinoma; Small cell carcinoma, NOS; Papillary carcinoma, NOS; Squamous cell carcinoma, NOS; Lymphoepithelial carcinoma; Basal cell carcinoma, NOS; Pilomatrix carcinoma; Transitional cell carcinoma, NOS; Papillary transitional cell carcinoma; Adenocarcinoma, NOS; Gastrinoma, malignant; Cholangiocarcinoma; Hepatocellular carcinoma, NOS; Combined hepatocellular carcinoma and cholangiocarcinoma; Trabecular adenocarcinoma; Adenoid cystic carcinoma; Adenocarcinoma in adenomatous polyp; Adenocarcinoma, familial polyposis coli; Solid carcinoma, NOS; Carcinoid tumor, malignant; Bronchiolo-alveolar adenocarcinoma; Papillary adenocarcinoma, NOS; Chromophobe carcinoma; Acidophil carcinoma; Oxyphilic adenocarcinoma; Basophil carcinoma; Clear cell adenocarcinoma, NOS; Granular cell carcinoma; Follicular adenocarcinoma, NOS; Papillary and follicular adenocarcinoma; Nonencapsulating sclerosing carcinoma; Adrenal cortical carcinoma; Endometroid carcinoma; Skin appendage carcinoma; Apocrine adenocarcinoma; Sebaceous adenocarcinoma; Ceruminous adenocarcinoma; Mucoepidermoid carcinoma; Cystadenocarcinoma, NOS; Papillary cystadenocarcinoma, NOS; Papillary serous cystadenocarcinoma; Mucinous cystadenocarcinoma, NOS; Mucinous adenocarcinoma; Signet ring cell carcinoma; Infiltrating duct carcinoma; Medullary carcinoma, NOS; Lobular carcinoma; Inflammatory carcinoma; Paget's disease, mammary; Acinar cell carcinoma; Adenosquamous carcinoma; Adenocarcinoma w/ squamous metaplasia; Thymoma, malignant; Ovarian stromal tumor, malignant; Thecoma, malignant; Granulosa cell tumor, malignant; Androblastoma, malignant; Sertoli cell carcinoma; Leydig cell tumor, malignant; Lipid cell tumor, malignant; Paraganglioma, malignant; Extra-mammary paraganglioma, malignant; Pheochromocytoma; Glomangiosarcoma; Malignant melanoma, NOS; Amelanotic melanoma; Superficial spreading melanoma; Malig melanoma in giant pigmented nevus; Epithelioid cell melanoma; Blue nevus, malignant; Sarcoma, NOS; Fibrosarcoma, NOS; Fibrous histiocytoma, malignant; Myxosarcoma; Liposarcoma, NOS; Leiomyosarcoma, NOS; Rhabdomyosarcoma, NOS; Embryonal rhabdomyosarcoma; Alveolar rhabdomyosarcoma; Stromal sarcoma, NOS; Mixed tumor, malignant, NOS; Mullerian mixed tumor; Nephroblastoma; Hepatoblastoma; Carcinosarcoma, NOS; Mesenchymoma, malignant; Brenner tumor, malignant; Phyllodes tumor, malignant; Synovial sarcoma, NOS; Mesothelioma, malignant; Dysgerminoma; Embryonal carcinoma, NOS; Teratoma, malignant, NOS; Struma ovarii, malignant; Choriocarcinoma; Mesonephroma, malignant; Hemangiosarcoma; Hemangioendothelioma, malignant; Kaposi's sarcoma; Hemangiopericytoma, malignant; Lymphangiosarcoma; Osteosarcoma, NOS; Juxtacortical osteosarcoma; Chondrosarcoma, NOS; Chondroblastoma, malignant; Mesenchymal chondrosarcoma; Giant cell tumor of bone; Ewing's sarcoma; Odontogenic tumor, malignant; Ameloblastic odontosarcoma; Ameloblastoma, malignant; Ameloblastic fibrosarcoma; Pinealoma, malignant; Chordoma; Glioma, malignant; Ependymoma, NOS; Astrocytoma, NOS; Protoplasmic astrocytoma; Fibrillary astrocytoma; Astroblastoma; Glioblastoma, NOS; Oligodendroglioma, NOS; Oligodendroblastoma; Primitive neuroectodermal; Cerebellar sarcoma, NOS; Ganglioneuroblastoma; Neuroblastoma, NOS; Retinoblastoma, NOS; Olfactory neurogenic tumor; Meningioma, malignant; Neurofibrosarcoma; Neurilemmoma, malignant; Granular cell tumor, malignant; Malignant lymphoma, NOS; Hodgkin's disease, NOS; Hodgkin's; paragranuloma, NOS; Malignant lymphoma, small lymphocytic; Malignant lymphoma, large cell, diffuse; Malignant lymphoma, follicular, NOS; Mycosis fungoides; Other specified non-Hodgkin's lymphomas; Malignant histiocytosis; Multiple myeloma; Mast cell sarcoma; Immunoproliferative small intestinal disease; Leukemia, NOS; Lymphoid leukemia, NOS; Plasma cell leukemia; Erythroleukemia; Lymphosarcoma cell leukemia; Myeloid leukemia, NOS; Basophilic leukemia; Eosinophilic leukemia; Monocytic leukemia, NOS; Mast cell leukemia; Megakaryoblastic leukemia; Myeloid sarcoma; and Hairy cell leukemia.

[0045] In addition, the CA genes may be involved in other diseases such as, but not limited to, diseases associated with aging or neurodegeneration.

[0046] “Association” in this context means that the nucleotide or protein sequences are either differentially expressed, activated, inactivated or altered in cancers as compared to normal tissue. As outlined below, CA sequences include those that are up-regulated (i.e. expressed at a higher level), as well as those that are down-regulated (i.e. expressed at a lower level), in cancers. CA sequences also include sequences that have been altered (i.e., truncated sequences or sequences with substitutions, deletions or insertions, including point mutations) and show either the same expression profile or an altered profile. In a preferred embodiment, the CA sequences are from humans; however, as will be appreciated by those in the art, CA sequences from other organisms may be useful in animal models of disease and drug evaluation; thus, other CA sequences are provided, from vertebrates, including mammals, including rodents (rats, mice, hamsters, guinea pigs, etc.), primates, and farm animals (including sheep, goats, pigs, cows, horses, etc). In some cases, prokaryotic CA sequences may be useful. CA sequences from other organisms may be obtained using the techniques outlined below.

[0047] CA sequences include both nucleic acid and amino acid sequences. In a preferred embodiment, the CA sequences are recombinant nucleic acids. By the term “recombinant nucleic acid” herein is meant nucleic acid, originally formed in vitro, in general, by the manipulation of nucleic acid by polymerases and endonucleases, in a form not normally found in nature. Thus a recombinant nucleic acid is also an isolated nucleic acid, in a linear form, or cloned in a vector formed in vitro by ligating DNA molecules that are not normally joined, are both considered recombinant for the purposes of this invention. It is understood that once a recombinant nucleic acid is made and reintroduced into a host cell or organism, it will replicate using the in vivo cellular machinery of the host cell rather than in vitro manipulations; however, such nucleic acids, once produced recombinantly, although subsequently replicated in vivo, are still considered recombinant or isolated for the purposes of the invention. As used herein a “polynucleotide” or “nucleic acid” is a polymeric form of nucleotides of any length, either ribonucleotides or deoxyribonucleotides. This term refers only to the primary structure of the molecule. Thus, this term includes double- and single-stranded DNA and RNA. It also includes known types of modifications, for example, labels which are known in the art, methylation, “caps”, substitution of one or more of the naturally occurring nucleotides with an analog, internucleotide modifications such as, for example, those with uncharged linkages (e.g., phosphorothioates, phosphorodithioates, etc.), those containing pendant moieties, such as, for example proteins (including e.g., nucleases, toxins, antibodies, signal peptides, poly-L-lysine, etc.), those with intercalators (e.g., acridine, psoralen, etc.), those containing chelators (e.g., metals, radioactive metals, etc.), those containing alkylators, those with modified linkages (e.g., alpha anomeric nucleic acids, etc.), as well as unmodified forms of the polynucleotide.

[0048] As used herein, a polynucleotide “derived from” a designated sequence refers to a polynucleotide sequence which is comprised of a sequence of approximately at least about 6 nucleotides, preferably at least about 8 nucleotides, more preferably at least about 10-12 nucleotides, and even more preferably at least about 15-20 nucleotides corresponding to a region of the designated nucleotide sequence. “Corresponding” means homologous to or complementary to the designated sequence. Preferably, the sequence of the region from which the polynucleotide is derived is homologous to or complementary to a sequence that is unique to a CA gene.

[0049] Similarly, a “recombinant protein” is a protein made using recombinant techniques, i.e. through the expression of a recombinant nucleic acid as depicted above. A recombinant protein is distinguished from naturally occurring protein by at least one or more characteristics. For example, the protein may be isolated or purified away from some or all of the proteins and compounds with which it is normally associated in its wild type host, and thus may be substantially pure. For example, an isolated protein is unaccompanied by at least some of the material with which it is normally associated in its natural state, preferably constituting at least about 0.5%, more preferably at least about 5% by weight of the total protein in a given sample. A substantially pure protein comprises about 50-75% by weight of the total protein, with about 80% being preferred, and about 90% being particularly preferred. The definition includes the production of a CA protein from one organism in a different organism or host cell. Alternatively, the protein may be made at a significantly higher concentration than is normally seen, through the use of an inducible promoter or high expression promoter, such that the protein is made at increased concentration levels. Alternatively, the protein may be in a form not normally found in nature, as in the addition of an epitope tag or amino acid substitutions, insertions and deletions, as discussed below.

[0050] In a preferred embodiment, the CA sequences are nucleic acids. As will be appreciated by those in the art and is more fully outlined below, CA sequences are useful in a variety of applications, including diagnostic applications, which will detect naturally occurring nucleic acids, as well as screening applications; for example, biochips comprising nucleic acid probes to the CA sequences can be generated. In the broadest sense, use of “nucleic acid,” “polynucleotide” or “oligonucleotide” or equivalents herein means at least two nucleotides covalently linked together. In some embodiments, an oligonucleotide is an oligomer of 6, 8, 10, 12, 20, 30 or up to 100 nucleotides. A “polynucleotide” or “oligonucleotide” may comprise DNA, RNA, PNA or a polymer of nucleotides linked by phosphodiester and/or any alternate bonds.

[0051] A nucleic acid of the present invention generally contains phosphodiester bonds, although in some cases, as outlined below (for example, in antisense applications or when a nucleic acid is a candidate drug agent), nucleic acid analogs may have alternate backbones, comprising, for example, phosphoramidate (Beaucage et al., Tetrahedron 49(10):1925 (1993) and references therein; Letsinger, J. Org. Chem. 35:3800 (1970); Sprinzl et al., Eur. J. Biochem. 81:579 (1977); Letsinger et al., Nucl. Acids Res. 14:3487 (1986); Sawai et al, Chem. Lett. 805 (1984), Letsinger et al., J. Am. Chem. Soc. 110:4470 (1988); and Pauwels et al., Chemica Scripta 26:141 91986)), phosphorothioate (Mag et al., Nucleic Acids Res. 19:1437 (1991); and U.S. Pat. No. 5,644,048), phosphorodithioate (Briu et al., J. Am. Chem. Soc. 111:2321 (1989), O-methylphosphoroamidite linkages (see Eckstein, Oligonucleotides and Analogues: A Practical Approach, Oxford University Press), and peptide nucleic acid backbones and linkages (see Egholm, J. Am. Chem. Soc. 114:1895 (1992); Meier et al., Chem. Int. Ed. Engl. 31:1008 (1992); Nielsen, Nature, 365:566 (1993); Carlsson et al., Nature 380:207 (1996), all of which are incorporated by reference). Other analog nucleic acids include those with positive backbones (Denpcy et al., Proc. Natl. Acad. Sci. USA 92:6097 (1995); non-ionic backbones (U.S. Pat. Nos. 5,386,023, 5,637,684, 5,602,240, 5,216,141 and 4,469,863; Kiedrowshi et al., Angew. Chem. Intl. Ed. English 30:423 (1991); Letsinger et al., J. Am. Chem. Soc. 110:4470 (1988); Letsinger et al., Nucleoside & Nucleotide 13:1597 (1994); Chapters 2 and 3, ASC Symposium Series 580, “Carbohydrate Modifications in Antisense Research”, Ed. Y. S. Sanghui and P. Dan Cook; Mesmaeker et al., Bioorganic & Medicinal Chem. Lett. 4:395 (1994); Jeffs et al., J. Biomolecular NMR 34:17 (1994); Tetrahedron Lett. 37:743 (1996)) and non-ribose backbones, including those described in U.S. Pat. Nos. 5,235,033 and 5,034,506, and Chapters 6 and 7, ASC Symposium Series 580, “Carbohydrate Modifications in Antisense Research”, Ed. Y. S. Sanghui and P. Dan Cook. Nucleic acids containing one or more carbocyclic sugars are also included within one definition of nucleic acids (see Jenkins et al., Chem. Soc. Rev. (1995) pp 169-176). Several nucleic acid analogs are described in Rawls, C & E News Jun. 2, 1997 page 35. All of these references are hereby expressly incorporated by reference. These modifications of the ribose-phosphate backbone may be done for a variety of reasons, for example to increase the stability and half-life of such molecules in physiological environments for use in anti-sense applications or as probes on a biochip.

[0052] As will be appreciated by those in the art, all of these nucleic acid analogs may find use in the present invention. In addition, mixtures of naturally occurring nucleic acids and analogs can be made; alternatively, mixtures of different nucleic acid analogs, and mixtures of naturally occurring nucleic acids and analogs may be made.

[0053] The nucleic acids may be single stranded or double stranded, as specified, or contain portions of both double stranded or single stranded sequence. As will be appreciated by those in the art, the depiction of a single strand “Watson” also defines the sequence of the other strand “Crick”; thus the sequences described herein also includes the complement of the sequence. The nucleic acid may be DNA, both genomic and cDNA, RNA, or a hybrid, where the nucleic acid contains any combination of deoxyribo- and ribo-nucleotides, and any combination of bases, including uracil, adenine, thymine, cytosine, guanine, inosine, xanthine, hypoxanthine, isocytosine, isoguanine, etc. As used herein, the term “nucleoside” includes nucleotides and nucleoside and nucleotide analogs, and modified nucleosides such as amino modified nucleosides. In addition, “nucleoside” includes non-naturally occurring analog structures. Thus for example the individual units of a peptide nucleic acid, each containing a base, are referred to herein as a nucleoside.

[0054] As used herein, the term “tag,” “sequence tag” or “primer tag sequence” refers to an oligonucleotide with specific nucleic acid sequence that serves to identify a batch of polynucleotides bearing such tags therein. Polynucleotides from the same biological source are covalently tagged with a specific sequence tag so that in subsequent analysis the polynucleotide can be identified according to its source of origin. The sequence tags also serve as primers for nucleic acid amplification reactions.

[0055] A “microarray” is a linear or two-dimensional array of preferably discrete regions, each having a defined area, formed on the surface of a solid support. The density of the discrete regions on a microarray is determined by the total numbers of target polynucleotides to be detected on the surface of a single solid phase support, preferably at least about 50/cm², more preferably at least about 100/cm², even more preferably at least about 500/cm², and still more preferably at least about 1,000/cm². As used herein, a DNA microarray is an array of oligonucleotide primers placed on a chip or other surfaces used to amplify or clone target polynucleotides. Since the position of each particular group of primers in the array is known, the identities of the target polynucleotides can be determined based on their binding to a particular position in the microarray.

[0056] A “linker” is a synthetic oligodeoxyribonucleotide that contains a restriction site. A linker may be blunt end-ligated onto the ends of DNA fragments to create restriction sites that can be used in the subsequent cloning of the fragment into a vector molecule.

[0057] The term “label” refers to a composition capable of producing a detectable signal indicative of the presence of the target polynucleotide in an assay sample. Suitable labels include radioisotopes, nucleotide chromophores, enzymes, substrates, fluorescent molecules, chemiluminescent moieties, magnetic particles, bioluminescent moieties, and the like. As such, a label is any composition detectable by spectroscopic, photochemical, biochemical, immunochemical, electrical, optical, chemical, or any other appropriate means. The term “label” is used to refer to any chemical group or moiety having a detectable physical property or any compound capable of causing a chemical group or moiety to exhibit a detectable physical property, such as an enzyme that catalyzes conversion of a substrate into a detectable product. The term “label” also encompasses compounds that inhibit the expression of a particular physical property. The label may also be a compound that is a member of a binding pair, the other member of which bears a detectable physical property.

[0058] The term “support” refers to conventional supports such as beads, particles, dipsticks, fibers, filters, membranes, and silane or silicate supports such as glass slides.

[0059] The term “amplify” is used in the broad sense to mean creating an amplification product which may include, for example, additional target molecules, or target-like molecules or molecules complementary to the target molecule, which molecules are created by virtue of the presence of the target molecule in the sample. In the situation where the target is a nucleic acid, an amplification product can be made enzymatically with DNA or RNA polymerases or reverse transcriptases.

[0060] As used herein, a “biological sample” refers to a sample of tissue or fluid isolated from an individual, including but not limited to, for example, blood, plasma, serum, spinal fluid, lymph fluid, skin, respiratory, intestinal and genitourinary tracts, tears, saliva, milk, cells (including but not limited to blood cells), tumors, organs, and also samples of in vitro cell culture constituents.

[0061] The term “biological sources” as used herein refers to the sources from which the target polynucleotides are derived. The source can be of any form of “sample” as described above, including but not limited to, cell, tissue or fluid. “Different biological sources” can refer to different cells/tissues/organs of the same individual, or cells/tissues/organs from different individuals of the same species, or cells/tissues/organs from different species.

### Cancer-Associated Sequences

[0062] The CA sequences of the invention were initially identified by infection of mice with a retrovirus such as murine leukemia virus (MLV) resulting in lymphoma. Retroviruses have a genome that is made out of RNA. After a retrovirus infects a host cell, a double stranded DNA copy of the retrovirus genome (a “provirus”) is inserted into the genomic DNA of the host cell. The integrated provirus may affect the expression of host genes at or near the site of integration—a phenomenon known as retroviral insertional mutagenesis. Possible changes in the expression of host cell genes include: (i) increased expression of genes near the site of integration resulting from the proximity of elements in the provirus that act as transcriptional promoters and enhancers, (ii) functional inactivation of a gene caused by the integration of a provirus into the gene itself thus preventing the synthesis of a functional gene product, or (iii) expression of a mutated protein that has a different activity to the normal protein. Typically such a protein would be prematurely truncated and lack a regulatory domain near the C terminus. Such a protein might be constitutively active, or act as a dominant negative inhibitor of the normal protein. For example, retrovirus enhancers, including that of SL3-3, are known to act on genes up to approximately 200 kilobases from the insertion site. Moreover, many of these sequences are also involved in other cancers and disease states. Sequences of mouse genes according to this invention, that are identified in this manner are shown as mDxx-yyy in Tables 1-64.

[0063] A CA sequence can be initially identified by substantial nucleic acid and/or amino acid sequence homology to the CA sequences outlined herein. Such homology can be based upon the overall nucleic acid or amino acid sequence, and is generally determined as outlined below, using either homology programs or hybridization conditions.

[0064] In one embodiment, CA sequences are those that are up-regulated in cancers; that is, the expression of these genes is higher in cancer tissue as compared to normal tissue of the same differentiation stage. “Up-regulation” as used herein means increased expression by about 50%, preferably about 100%, more preferably about 150% to about 200%, with up-regulation from 300% to 1000% being preferred.

[0065] In another embodiment, CA sequences are those that are down-regulated in cancers; that is, the expression of these genes is lower in cancer tissue as compared to normal tissue of the same differentiation stage. “Down-regulation” as used herein means decreased expression by about 50%, preferably about 100%, more preferably about 150% to about 200%, with down-regulation from 300% to 1000% to no expression being preferred.

[0066] In yet another embodiment, CA sequences are those that have altered sequences but show either the same or an altered expression profile as compared to normal lymphoid tissue of the same differentiation stage. “Altered CA sequences” as used herein also refers to sequences that are truncated, contain insertions or contain point mutations.

[0067] CA proteins of the present invention may be classified as secreted proteins, transmembrane proteins or intracellular proteins. In a preferred embodiment the CA protein is an intracellular protein. Intracellular proteins may be found in the cytoplasm and/or in the nucleus. Intracellular proteins are involved in all aspects of cellular function and replication (including, for example, signaling pathways); aberrant expression of such proteins results in unregulated or disregulated cellular processes. For example, many intracellular proteins have enzymatic activity such as protein kinase activity, protein phosphatase activity, protease activity, nucleotide cyclase activity, polymerase activity and the like. Intracellular proteins also serve as docking proteins that are involved in organizing complexes of proteins, or targeting proteins to various subcellular localizations, and are involved in maintaining the structural integrity of organelles.

[0068] An increasingly appreciated concept in characterizing intracellular proteins is the presence in the proteins of one or more motifs for which defined functions have been attributed. In addition to the highly conserved sequences found in the enzymatic domain of proteins, highly conserved sequences have been identified in proteins that are involved in protein-protein interaction. For example, Src-homology-2 (SH2) domains bind tyrosine-phosphorylated targets in a sequence dependent manner. PTB domains, which are distinct from SH2 domains, also bind tyrosine phosphorylated targets. SH3 domains bind to proline-rich targets. In addition, PH domains, tetratricopeptide repeats and WD domains to name only a few, have been shown to mediate protein-protein interactions. Some of these may also be involved in binding to phospholipids or other second messengers. As will be appreciated by one of ordinary skill in the art, these motifs can be identified on the basis of primary sequence; thus, an analysis of the sequence of proteins may provide insight into both the enzymatic potential of the molecule and/or molecules with which the protein may associate.

[0069] In a preferred embodiment, the CA sequences are transmembrane proteins. Transmembrane proteins are molecules that span the phospholipid bilayer of a cell. They may have an intracellular domain, an extracellular domain, or both. The intracellular domains of such proteins may have a number of functions including those already described for intracellular proteins. For example, the intracellular domain may have enzymatic activity and/or may serve as a binding site for additional proteins. Frequently the intracellular domain of transmembrane proteins serves both roles. For example certain receptor tyrosine kinases have both protein kinase activity and SH2 domains. In addition, autophosphorylation of tyrosines on the receptor molecule itself creates binding sites for additional SH2 domain containing proteins.

[0070] Transmembrane proteins may contain from one to many transmembrane domains. For example, receptor tyrosine kinases, certain cytokine receptors, receptor guanylyl cyclases and receptor serine/threonine protein kinases contain a single transmembrane domain. However, various other proteins including channels and adenylyl cyclases contain numerous transmembrane domains. Many important cell surface receptors are classified as “seven transmembrane domain” proteins, as they contain 7 membrane spanning regions. Important transmembrane protein receptors include, but are not limited to insulin receptor, insulin-like growth factor receptor, human growth hormone receptor, glucose transporters, transferrin receptor, epidermal growth factor receptor, low density lipoprotein receptor, leptin receptor, interleukin receptors, e.g. IL-1 receptor, IL-2 receptor, etc. CA proteins may be derived from genes that regulate apoptosis (IL-3, GM-CSF and Bcl-x) or are shown to have a role in the regulation of apoptosis.

[0071] Characteristics of transmembrane domains include approximately 20 consecutive hydrophobic amino acids that may be followed by charged amino acids. Therefore, upon analysis of the amino acid sequence of a particular protein, the localization and number of transmembrane domains within the protein may be predicted.

[0072] The extracellular domains of transmembrane proteins are diverse; however, conserved motifs are found repeatedly among various extracellular domains. Conserved structure and/or functions have been ascribed to different extracellular motifs. For example, cytokine receptors are characterized by a cluster of cysteines and a WSXWS (W=tryptophan, S=serine, X=any amino acid) motif. Immunoglobulin-like domains are highly conserved. Mucin-like domains may be involved in cell adhesion and leucine-rich repeats participate in protein-protein interactions.

[0073] Many extracellular domains are involved in binding to other molecules. In one aspect, extracellular domains are receptors. Factors that bind the receptor domain include circulating ligands, which may be peptides, proteins, or small molecules such as adenosine and the like. For example, growth factors such as EGF, FGF and PDGF are circulating growth factors that bind to their cognate receptors to initiate a variety of cellular responses. Other factors include cytokines, mitogenic factors, neurotrophic factors and the like. Extracellular domains also bind to cell-associated molecules. In this respect, they mediate cell-cell interactions. Cell-associated ligands can be tethered to the cell for example via a glycosylphosphatidylinositol (GPI) anchor, or may themselves be transmembrane proteins. Extracellular domains also associate with the extracellular matrix and contribute to the maintenance of the cell structure.

[0074] CA proteins that are transmembrane are particularly preferred in the present invention as they are good targets for immunotherapeutics, as are described herein. In addition, as outlined below, transmembrane proteins can be also useful in imaging modalities.

[0075] It will also be appreciated by those in the art that a transmembrane protein can be made soluble by removing transmembrane sequences, for example through recombinant methods. Furthermore, transmembrane proteins that have been made soluble can be made to be secreted through recombinant means by adding an appropriate signal sequence.

[0076] In a preferred embodiment, the CA proteins are secreted proteins; the secretion of which can be either constitutive or regulated. These proteins have a signal peptide or signal sequence that targets the molecule to the secretory pathway. Secreted proteins are involved in numerous physiological events; by virtue of their circulating nature, they serve to transmit signals to various other cell types. The secreted protein may function in an autocrine manner (acting on the cell that secreted the factor), a paracrine manner (acting on cells in close proximity to the cell that secreted the factor) or an endocrine manner (acting on cells at a distance). Thus secreted molecules find use in modulating or altering numerous aspects of physiology. CA proteins that are secreted proteins are particularly preferred in the present invention as they serve as good targets for diagnostic markers, for example for blood tests.

### CA Sequences and Homologs

[0077] A CA sequence is initially identified by substantial nucleic acid and/or amino acid sequence homology to the CA sequences outlined herein. Such homology can be based upon the overall nucleic acid or amino acid sequence, and is generally determined as outlined below, using either homology programs or hybridization conditions.

[0078] As used herein, a nucleic acid is a “CA nucleic acid” if the overall homology of the nucleic acid sequence to one of the nucleic acids of Tables 1-64 is preferably greater than about 75%, more preferably greater than about 80%, even more preferably greater than about 85% and most preferably greater than 90%. In some embodiments the homology will be as high as about 93 to 95 or 98%. In a preferred embodiment, the sequences that are used to determine sequence identity or similarity are selected from those of the nucleic acids of Tables 1-64. In another embodiment, the sequences are naturally occurring allelic variants of the sequences of the nucleic acids of Tables 1-64. In another embodiment, the sequences are sequence variants as further described herein.

[0079] Homology in this context means sequence similarity or identity, with identity being preferred. A preferred comparison for homology purposes is to compare the sequence containing sequencing errors to the correct sequence. This homology will be determined using standard techniques known in the art, including, but not limited to, the local homology algorithm of Smith & Waterman, Adv. Appl. Math. 2:482 (1981), by the homology alignment algorithm of Needleman & Wunsch, J. Mol. Biol. 48:443 (1970), by the search for similarity method of Pearson & Lipman, PNAS USA 85:2444 (1988), by computerized implementations of these algorithms (GAP, BESTFIT, FASTA, and TFASTA in the Wisconsin Genetics Software Package, Genetics Computer Group, 575 Science Drive, Madison, Wis.), the Best Fit sequence program described by Devereux et al., Nucl. Acid Res. 12:387-395 (1984), preferably using the default settings, or by inspection.

[0080] One example of a useful algorithm is PILEUP. PILEUP creates a multiple sequence alignment from a group of related sequences using progressive, pairwise alignments. It can also plot a tree showing the clustering relationships used to create the alignment. PILEUP uses a simplification of the progressive alignment method of Feng & Doolittle, J. Mol. Evol. 35:351-360 (1987); the method is similar to that described by Higgins & Sharp CABIOS 5:151-153 (1989). Useful PILEUP parameters include a default gap weight of 3.00, a default gap length weight of 0.10, and weighted end gaps.

[0081] Another example of a useful algorithm is the BLAST (Basic Local Alignment Search Tool) algorithm, described in Altschul et al., J. Mol. Biol. 215, 403-410, (1990) and Karlin et al., PNAS USA 90:5873-5787 (1993). A particularly useful BLAST program is the WU-BLAST-2 program which was obtained from Altschul et al., Methods in Enzymology, 266: 460-480 (1996); http://blast.wustl.edu/]. WU-BLAST-2 uses several search parameters, most of which are set to the default values. The adjustable parameters are set with the following values: overlap span=1, overlap fraction=0.125, word threshold (T)=11. The HSP S and HSP S2 parameters are dynamic values and are established by the program itself depending upon the composition of the particular sequence and composition of the particular database against which the sequence of interest is being searched; however, the values may be adjusted to increase sensitivity. A percent amino acid sequence identity value is determined by the number of matching identical residues divided by the total number of residues of the “longer” sequence in the aligned region. The “longer” sequence is the one having the most actual residues in the aligned region (gaps introduced by WU-Blast-2 to maximize the alignment score are ignored).

[0082] Thus, “percent (%) nucleic acid sequence identity” is defined as the percentage of nucleotide residues in a candidate sequence that are identical with the nucleotide residues of the nucleic acids of Tables 1-64. A preferred method utilizes the BLASTN module of WU-BLAST-2 set to the default parameters, with overlap span and overlap fraction set to 1 and 0.125, respectively.

[0083] The alignment may include the introduction of gaps in the sequences to be aligned. In addition, for sequences which contain either more or fewer nucleotides than those of the nucleic acids of Tables 1-64, it is understood that the percentage of homology will be determined based on the number of homologous nucleosides in relation to the total number of nucleosides. Thus homology of sequences shorter than those of the sequences identified herein will be determined using the number of nucleosides in the shorter sequence.

[0084] In another embodiment of the invention, polynucleotide compositions are provided that are capable of hybridizing under moderate to high stringency conditions to a polynucleotide sequence provided herein, or a fragment thereof, or a complementary sequence thereof. Hybridization techniques are well known in the art of molecular biology. For purposes of illustration, suitable moderately stringent conditions for testing the hybridization of a polynucleotide of this invention with other polynucleotides include prewashing in a solution of 5×SSC (“saline sodium citrate”; 9 mM NaCl, 0.9 mM sodium citrate), 0.5% SDS, 1.0 mM EDTA (pH 8.0); hybridizing at 50-60° C., 5×SSC, overnight; followed by washing twice at 65° C. for 20 minutes with each of 2×, 0.5× and 0.2×SSC containing 0.1% SDS. One skilled in the art will understand that the stringency of hybridization can be readily manipulated, such as by altering the salt content of the hybridization solution and/or the temperature at which the hybridization is performed. For example, in another embodiment, suitable highly stringent hybridization conditions include those described above, with the exception that the temperature of hybridization is increased, e.g., to 60-65° C., or 65-70° C. Stringent conditions may also be achieved with the addition of destabilizing agents such as formamide.

[0085] Thus nucleic acids that hybridize under high stringency to the nucleic acids identified in the figures, or their complements, are considered CA sequences. High stringency conditions are known in the art; see for example Maniatis et al., Molecular Cloning: A Laboratory Manual, 2d Edition, 1989, and Short Protocols in Molecular Biology, ed. Ausubel, et al., both of which are hereby incorporated by reference. Stringent conditions are sequence-dependent and will be different in different circumstances. Longer sequences hybridize specifically at higher temperatures. An extensive guide to the hybridization of nucleic acids is found in Tijssen, Techniques in Biochemistry and Molecular Biology—Hybridization with Nucleic Acid Probes, “Overview of principles of hybridization and the strategy of nucleic acid assays” (1993). Generally, stringent conditions are selected to be about 5-10° C. lower than the thermal melting point (Tₘ) for the specific sequence at a defined ionic strength pH. The Tₘ is the temperature (under defined ionic strength, pH and nucleic acid concentration) at which 50% of the probes complementary to the target hybridize to the target sequence at equilibrium (as the target sequences are present in excess, at Tₘ, 50% of the probes are occupied at equilibrium). Stringent conditions will be those in which the salt concentration is less than about 1.0 M sodium ion, typically about 0.01 to 1.0 M sodium ion concentration (or other salts) at pH 7.0 to 8.3 and the temperature is at least about 30° C. for short probes (e.g. 10 to 50 nucleotides) and at least about 60° C. for longer probes (e.g. greater than 50 nucleotides). In another embodiment, less stringent hybridization conditions are used; for example, moderate or low stringency conditions may be used, as are known in the art; see Maniatis and Ausubel, supra, and Tijssen, supra.

[0086] In addition, the CA nucleic acid sequences of the invention are fragments of larger genes, i.e. they are nucleic acid segments. Alternatively, the CA nucleic acid sequences can serve as indicators of oncogene position, for example, the CA sequence may be an enhancer that activates a protooncogene. “Genes” in this context includes coding regions, non-coding regions, and mixtures of coding and non-coding regions. Accordingly, as will be appreciated by those in the art, using the sequences provided herein, additional sequences of the CA genes can be obtained, using techniques well known in the art for cloning either longer sequences or the full-length sequences; see Maniatis et al., and Ausubel, et al., supra, hereby expressly incorporated by reference. In general, this is done using PCR, for example, kinetic PCR.

### Detection of CA Expression

[0087] Once the CA nucleic acid is identified, it can be cloned and, if necessary, its constituent parts recombined to form the entire CA nucleic acid. Once isolated from its natural source, e.g., contained within a plasmid or other vector or excised therefrom as a linear nucleic acid segment, the recombinant CA nucleic acid can be further used as a probe to identify and isolate other CA nucleic acids, for example additional coding regions. It can also be used as a “precursor” nucleic acid to make modified or variant CA nucleic acids and proteins. In a preferred embodiment, once a CA gene is identified its nucleotide sequence is used to design probes specific for the CA gene.

[0088] The CA nucleic acids of the present invention are used in several ways. In a first embodiment, nucleic acid probes hybridizable to CA nucleic acids are made and attached to biochips to be used in screening and diagnostic methods, or for gene therapy and/or antisense applications. Alternatively, the CA nucleic acids that include coding regions of CA proteins can be put into expression vectors for the expression of CA proteins, again either for screening purposes or for administration to a patient.

[0089] Recent developments in DNA microarray technology make it possible to conduct a large scale assay of a plurality of target CA nucleic acid molecules on a single solid phase support. U.S. Pat. No. 5,837,832 (Chee et al.) and related patent applications describe immobilizing an array of oligonucleotide probes for hybridization and detection of specific nucleic acid sequences in a sample. Target polynucleotides of interest isolated from a tissue of interest are hybridized to the DNA chip and the specific sequences detected based on the target polynucleotides' preference and degree of hybridization at discrete probe locations. One important use of arrays is in the analysis of differential gene expression, where the profile of expression of genes in different cells, often a cell of interest and a control cell, is compared and any differences in gene expression among the respective cells are identified. Such information is useful for the identification of the types of genes expressed in a particular cell or tissue type and diagnosis of cancer conditions based on the expression profile.

[0090] Typically, RNA from the sample of interest is subjected to reverse transcription to obtain labeled cDNA. See U.S. Pat. No. 6,410,229 (Lockhart et al.) The cDNA is then hybridized to oligonucleotides or cDNAs of known sequence arrayed on a chip or other surface in a known order. The location of the oligonucleotide to which the labeled cDNA hybridizes provides sequence information on the cDNA, while the amount of labeled hybridized RNA or cDNA provides an estimate of the relative representation of the RNA or cDNA of interest. See Schena, et al. Science 270:467-470 (1995). For example, use of a cDNA microarray to analyze gene expression patterns in human cancer is described by DeRisi, et al. (Nature Genetics 14:457-460 (1996)).

[0091] In a preferred embodiment, nucleic acid probes corresponding to CA nucleic acids (both the nucleic acid sequences outlined in the figures and/or the complements thereof) are made. Typically, these probes are synthesized based on the disclosed sequences of this invention. The nucleic acid probes attached to the biochip are designed to be substantially complementary to the CA nucleic acids, i.e. the target sequence (either the target sequence of the sample or to other probe sequences, for example in sandwich assays), such that specific hybridization of the target sequence and the probes of the present invention occurs. As outlined below, this complementarity need not be perfect, in that there may be any number of base pair mismatches that will interfere with hybridization between the target sequence and the single stranded nucleic acids of the present invention. It is expected that the overall homology of the genes at the nucleotide level probably will be about 40% or greater, probably about 60% or greater, and even more probably about 80% or greater; and in addition that there will be corresponding contiguous sequences of about 8-12 nucleotides or longer. However, if the number of mutations is so great that no hybridization can occur under even the least stringent of hybridization conditions, the sequence is not a complementary target sequence. Thus, by “substantially complementary” herein is meant that the probes are sufficiently complementary to the target sequences to hybridize under normal reaction conditions, particularly high stringency conditions, as outlined herein. Whether or not a sequence is unique to a CA gene according to this invention can be determined by techniques known to those of skill in the art. For example, the sequence can be compared to sequences in databanks, e.g., GeneBank, to determine whether it is present in the uninfected host or other organisms. The sequence can also be compared to the known sequences of other viral agents, including those that are known to induce cancer.

[0092] A nucleic acid probe is generally single stranded but can be partly single and partly double stranded. The strandedness of the probe is dictated by the structure, composition, and properties of the target sequence. In general, the oligonucleotide probes range from about 6, 8, 10, 12, 15, 20, 30 to about 100 bases long, with from about 10 to about 80 bases being preferred, and from about 30 to about 50 bases being particularly preferred. That is, generally entire genes are rarely used as probes. In some embodiments, much longer nucleic acids can be used, up to hundreds of bases. The probes are sufficiently specific to hybridize to complementary template sequence under conditions known by those of skill in the art. The number of mismatches between the probes sequences and their complementary template (target) sequences to which they hybridize during hybridization generally do not exceed 15%, usually do not exceed 10% and preferably do not exceed 5%, as determined by FASTA (default settings).

[0093] Oligonucleotide probes can include the naturally-occurring heterocyclic bases normally found in nucleic acids (uracil, cytosine, thymine, adenine and guanine), as well as modified bases and base analogues. Any modified base or base analogue compatible with hybridization of the probe to a target sequence is useful in the practice of the invention. The sugar or glycoside portion of the probe can comprise deoxyribose, ribose, and/or modified forms of these sugars, such as, for example, 2′-O-alkyl ribose. In a preferred embodiment, the sugar moiety is 2′-deoxyribose; however, any sugar moiety that is compatible with the ability of the probe to hybridize to a target sequence can be used.

[0094] In one embodiment, the nucleoside units of the probe are linked by a phosphodiester backbone, as is well known in the art. In additional embodiments, internucleotide linkages can include any linkage known to one of skill in the art that is compatible with specific hybridization of the probe including, but not limited to phosphorothioate, methylphosphonate, sulfamate (e.g., U.S. Pat. No. 5,470,967) and polyamide (i.e., peptide nucleic acids). Peptide nucleic acids are described in Nielsen et al. (1991) Science 254: 1497-1500, U.S. Pat. No. 5,714,331, and Nielsen (1999) Curr. Opin. Biotechnol. 10:71-75.

[0095] In certain embodiments, the probe can be a chimeric molecule; i.e., can comprise more than one type of base or sugar subunit, and/or the linkages can be of more than one type within the same primer. The probe can comprise a moiety to facilitate hybridization to its target sequence, as are known in the art, for example, intercalators and/or minor groove binders. Variations of the bases, sugars, and internucleoside backbone, as well as the presence of any pendant group on the probe, will be compatible with the ability of the probe to bind, in a sequence-specific fashion, with its target sequence. A large number of structural modifications, both known and to be developed, are possible within these bounds. Advantageously, the probes according to the present invention may have structural characteristics such that they allow the signal amplification, such structural characteristics being, for example, branched DNA probes as those described by Urdea et al. (Nucleic Acids Symp. Ser., 24:197-200 (1991)) or in the European Patent No. EP-0225,807. Moreover, synthetic methods for preparing the various heterocyclic bases, sugars, nucleosides and nucleotides that form the probe, and preparation of oligonucleotides of specific predetermined sequence, are well-developed and known in the art. A preferred method for oligonucleotide synthesis incorporates the teaching of U.S. Pat. No. 5,419,966.

[0096] Multiple probes may be designed for a particular target nucleic acid to account for polymorphism and/or secondary structure in the target nucleic acid, redundancy of data and the like. In some embodiments, where more than one probe per sequence is used, either overlapping probes or probes to different sections of a single target CA gene are used. That is, two, three, four or more probes, with three being preferred, are used to build in a redundancy for a particular target. The probes can be overlapping (i.e. have some sequence in common), or specific for distinct sequences of a CA gene. When multiple target polynucleotides are to be detected according to the present invention, each probe or probe group corresponding to a particular target polynucleotide is situated in a discrete area of the microarray.

[0097] Probes may be in solution, such as in wells or on the surface of a micro-array, or attached to a solid support. Examples of solid support materials that can be used include a plastic, a ceramic, a metal, a resin, a gel and a membrane. Useful types of solid supports include plates, beads, magnetic material, microbeads, hybridization chips, membranes, crystals, ceramics and self-assembling monolayers. A preferred embodiment comprises a two-dimensional or three-dimensional matrix, such as a gel or hybridization chip with multiple probe binding sites (Pevzner et al., J. Biomol. Struc. & Dyn. 9:399-410, 1991; Maskos and Southern, Nuc. Acids Res. 20:1679-84, 1992). Hybridization chips can be used to construct very large probe arrays that are subsequently hybridized with a target nucleic acid. Analysis of the hybridization pattern of the chip can assist in the identification of the target nucleotide sequence. Patterns can be manually or computer analyzed, but it is clear that positional sequencing by hybridization lends itself to computer analysis and automation. Algorithms and software, which have been developed for sequence reconstruction, are applicable to the methods described herein (R. Drmanac et al., J. Biomol. Struc. & Dyn. 5:1085-1102, 1991; P. A. Pevzner, J. Biomol. Struc. & Dyn. 7:63-73, 1989).

[0098] As will be appreciated by those in the art, nucleic acids can be attached or immobilized to a solid support in a wide variety of ways. By “immobilized” herein is meant the association or binding between the nucleic acid probe and the solid support is sufficient to be stable under the conditions of binding, washing, analysis, and removal as outlined below. The binding can be covalent or non-covalent. By “non-covalent binding” and grammatical equivalents herein is meant one or more of either electrostatic, hydrophilic, and hydrophobic interactions. Included in non-covalent binding is the covalent attachment of a molecule, such as streptavidin, to the support and the non-covalent binding of the biotinylated probe to the streptavidin. By “covalent binding” and grammatical equivalents herein is meant that the two moieties, the solid support and the probe, are attached by at least one bond, including sigma bonds, pi bonds and coordination bonds. Covalent bonds can be formed directly between the probe and the solid support or can be formed by a cross linker or by inclusion of a specific reactive group on either the solid support or the probe or both molecules. Immobilization may also involve a combination of covalent and non-covalent interactions.

[0099] Nucleic acid probes may be attached to the solid support by covalent binding such as by conjugation with a coupling agent or by, covalent or non-covalent binding such as electrostatic interactions, hydrogen bonds or antibody-antigen coupling, or by combinations thereof. Typical coupling agents include biotin/avidin, biotin/streptavidin, Staphylococcus aureus protein A/IgG antibody Fc fragment, and streptavidin/protein A chimeras (T. Sano and C. R. Cantor, Bio/Technology 9:1378-81 (1991)), or derivatives or combinations of these agents. Nucleic acids may be attached to the solid support by a photocleavable bond, an electrostatic bond, a disulfide bond, a peptide bond, a diester bond or a combination of these sorts of bonds. The array may also be attached to the solid support by a selectively releasable bond such as 4,4′-dimethoxytrityl or its derivative. Derivatives which have been found to be useful include 3 or 4 [bis-(4-methoxyphenyl)]-methyl-benzoic acid, N-succinimidyl-3 or 4 [bis-(4-methoxyphenyl)]-methyl-benzoic acid, N-succinimidyl-3 or 4 [bis-(4-methoxyphenyl)]-hydroxymethyl-benzoic acid, N-succinimidyl-3 or 4 [bis-(4-methoxyphenyl)]-chloromethyl-benzoic acid, and salts of these acids.

[0100] In general, the probes are attached to the biochip in a wide variety of ways, as will be appreciated by those in the art. As described herein, the nucleic acids can either be synthesized first, with subsequent attachment to the biochip, or can be directly synthesized on the biochip.

[0101] The biochip comprises a suitable solid substrate. By “substrate” or “solid support” or other grammatical equivalents herein is meant any material that can be modified to contain discrete individual sites appropriate for the attachment or association of the nucleic acid probes and is amenable to at least one detection method. The solid phase support of the present invention can be of any solid materials and structures suitable for supporting nucleotide hybridization and synthesis. Preferably, the solid phase support comprises at least one substantially rigid surface on which the primers can be immobilized and the reverse transcriptase reaction performed. The substrates with which the polynucleotide microarray elements are stably associated may be fabricated from a variety of materials, including plastics, ceramics, metals, acrylamide, cellulose, nitrocellulose, glass, polystyrene, polyethylene vinyl acetate, polypropylene, polymethacrylate, polyethylene, polyethylene oxide, polysilicates, polycarbonates, Teflon®, fluorocarbons, nylon, silicon rubber, polyanhydrides, polyglycolic acid, polylactic acid, polyorthoesters, polypropylfumerate, collagen, glycosaminoglycans, and polyamino acids. Substrates may be two-dimensional or three-dimensional in form, such as gels, membranes, thin films, glasses, plates, cylinders, beads, magnetic beads, optical fibers, woven fibers, etc. A preferred form of array is a three-dimensional array. A preferred three-dimensional array is a collection of tagged beads. Each tagged bead has different primers attached to it. Tags are detectable by signaling means such as color (Luminex, Illumina) and electromagnetic field (Pharmaseq) and signals on tagged beads can even be remotely detected (e.g., using optical fibers). The size of the solid support can be any of the standard microarray sizes, useful for DNA microarray technology, and the size may be tailored to fit the particular machine being used to conduct a reaction of the invention. In general, the substrates allow optical detection and do not appreciably fluoresce.

[0102] In a preferred embodiment, the surface of the biochip and the probe may be derivatized with chemical functional groups for subsequent attachment of the two. Thus, for example, the biochip is derivatized with a chemical functional group including, but not limited to, amino groups, carboxy groups, oxo groups and thiol groups, with amino groups being particularly preferred. Using these functional groups, the probes can be attached using functional groups on the probes. For example, nucleic acids containing amino groups can be attached to surfaces comprising amino groups, for example using linkers as are known in the art; for example, homo- or hetero-bifunctional linkers as are well known (see 1994 Pierce Chemical Company catalog, technical section on cross-linkers, pages 155-200, incorporated herein by reference). In addition, in some cases, additional linkers, such as alkyl groups (including substituted and heteroalkyl groups) may be used.

[0103] In this embodiment, the oligonucleotides are synthesized as is known in the art, and then attached to the surface of the solid support. As will be appreciated by those skilled in the art, either the 5′ or 3′ terminus may be attached to the solid support, or attachment may be via an internal nucleoside. In an additional embodiment, the immobilization to the solid support may be very strong, yet non-covalent. For example, biotinylated oligonucleotides can be made, which bind to surfaces covalently coated with streptavidin, resulting in attachment.

[0104] The arrays may be produced according to any convenient methodology, such as preforming the polynucleotide microarray elements and then stably associating them with the surface. Alternatively, the oligonucleotides may be synthesized on the surface, as is known in the art. A number of different array configurations and methods for their production are known to those of skill in the art and disclosed in WO 95/25116 and WO 95/35505 (photolithographic techniques), U.S. Pat. No. 5,445,934 (in situ synthesis by photolithography), U.S. Pat. No. 5,384,261 (in situ synthesis by mechanically directed flow paths); and U.S. Pat. No. 5,700,637 (synthesis by spotting, printing or coupling); the disclosure of which are herein incorporated in their entirety by reference. Another method for coupling DNA to beads uses specific ligands attached to the end of the DNA to link to ligand-binding molecules attached to a bead. Possible ligand-binding partner pairs include biotin-avidin/streptavidin, or various antibody/antigen pairs such as digoxygenin-antidigoxygenin antibody (Smith et al., “Direct Mechanical Measurements of the Elasticity of Single DNA Molecules by Using Magnetic Beads,” Science 258:1122-1126 (1992)). Covalent chemical attachment of DNA to the support can be accomplished by using standard coupling agents to link the 5′-phosphate on the DNA to coated microspheres through a phosphoamidate bond. Methods for immobilization of oligonucleotides to solid-state substrates are well established. See Pease et al., Proc. Natl. Acad. Sci. USA 91(11):5022-5026 (1994). A preferred method of attaching oligonucleotides to solid-state substrates is described by Guo et al., Nucleic Acids Res. 22:5456-5465 (1994). Immobilization can be accomplished either by in situ DNA synthesis (Maskos and Southern, Nucleic Acids Research, 20:1679-1684 (1992) or by covalent attachment of chemically synthesized oligonucleotides (Guo et al., supra) in combination with robotic arraying technologies.

[0105] In addition to the solid-phase technology represented by biochip arrays, gene expression can also be quantified using liquid-phase arrays. One such system is kinetic polymerase chain reaction (PCR). Kinetic PCR allows for the simultaneous amplification and quantification of specific nucleic acid sequences. The specificity is derived from synthetic oligonucleotide primers designed to preferentially adhere to single-stranded nucleic acid sequences bracketing the target site. This pair of oligonucleotide primers form specific, non-covalently bound complexes on each strand of the target sequence. These complexes facilitate in vitro transcription of double-stranded DNA in opposite orientations. Temperature cycling of the reaction mixture creates a continuous cycle of primer binding, transcription, and re-melting of the nucleic acid to individual strands. The result is an exponential increase of the target dsDNA product. This product can be quantified in real time either through the use of an intercalating dye or a sequence specific probe. SYBR® Greene I, is an example of an intercalating dye, that preferentially binds to dsDNA resulting in a concomitant increase in the fluorescent signal. Sequence specific probes, such as used with TaqMan® technology, consist of a fluorochrome and a quenching molecule covalently bound to opposite ends of an oligonucleotide. The probe is designed to selectively bind the target DNA sequence between the two primers. When the DNA strands are synthesized during the PCR reaction, the fluorochrome is cleaved from the probe by the exonuclease activity of the polymerase resulting in signal dequenching. The probe signaling method can be more specific than the intercalating dye method, but in each case, signal strength is proportional to the dsDNA product produced. Each type of quantification method can be used in multi-well liquid phase arrays with each well representing primers and/or probes specific to nucleic acid sequences of interest. When used with messenger RNA preparations of tissues or cell lines, an array of probe/primer reactions can simultaneously quantify the expression of multiple gene products of interest. See Germer, S., et al., Genome Res. 10:258-266 (2000); Heid, C. A., et al., Genome Res. 6, 986-994 (1996).

### Expression of CA Proteins

[0106] In a preferred embodiment, CA nucleic acids encoding CA proteins are used to make a variety of expression vectors to express CA proteins which can then be used in screening assays, as described below. The expression vectors may be either self-replicating extrachromosomal vectors or vectors which integrate into a host genome. Generally, these expression vectors include transcriptional and translational regulatory nucleic acid operably linked to the nucleic acid encoding the CA protein. The term “control sequences” refers to DNA sequences necessary for the expression of an operably linked coding sequence in a particular host organism. The control sequences that are suitable for prokaryotes, for example, include a promoter, optionally an operator sequence, and a ribosome binding site. Eukaryotic cells are known to utilize promoters, polyadenylation signals, and enhancers.

[0107] Nucleic acid is “operably linked” when it is placed into a functional relationship with another nucleic acid sequence. For example, DNA for a presequence or secretory leader is operably linked to DNA for a polypeptide if it is expressed as a preprotein that participates in the secretion of the polypeptide; a promoter or enhancer is operably linked to a coding sequence if it affects the transcription of the sequence; or a ribosome binding site is operably linked to a coding sequence if it is positioned so as to facilitate translation. Generally, “operably linked” means that the DNA sequences being linked are contiguous, and, in the case of a secretory leader, contiguous and in reading phase. However, enhancers do not have to be contiguous. Linking is accomplished by ligation at convenient restriction sites. If such sites do not exist, synthetic oligonucleotide adaptors or linkers are used in accordance with conventional practice. The transcriptional and translational regulatory nucleic acid will generally be appropriate to the host cell used to express the CA protein; for example, transcriptional and translational regulatory nucleic acid sequences from Bacillus are preferably used to express the CA protein in Bacillus. Numerous types of appropriate expression vectors, and suitable regulatory sequences are known in the art for a variety of host cells.

[0108] In general, the transcriptional and translational regulatory sequences may include, but are not limited to, promoter sequences, ribosomal binding sites, transcriptional start and stop sequences, translational start and stop sequences, and enhancer or activator sequences. In a preferred embodiment, the regulatory sequences include a promoter and transcriptional start and stop sequences.

[0109] Promoter sequences encode either constitutive or inducible promoters. The promoters may be either naturally occurring promoters or hybrid promoters. Hybrid promoters, which combine elements of more than one promoter, are also known in the art, and are useful in the present invention.

[0110] In addition, the expression vector may comprise additional elements. For example, the expression vector may have two replication systems, thus allowing it to be maintained in two organisms, for example in mammalian or insect cells for expression and in a prokaryotic host for cloning and amplification. Furthermore, for integrating expression vectors, the expression vector contains at least one sequence homologous to the host cell genome, and preferably two homologous sequences that flank the expression construct. The integrating vector may be directed to a specific locus in the host cell by selecting the appropriate homologous sequence for inclusion in the vector. Constructs for integrating vectors are well known in the art.

[0111] In addition, in a preferred embodiment, the expression vector contains a selectable marker gene to allow the selection of transformed host cells. Selection genes are well known in the art and will vary with the host cell used.

[0112] The CA proteins of the present invention are produced by culturing a host cell transformed with an expression vector containing nucleic acid encoding a CA protein, under the appropriate conditions to induce or cause expression of the CA protein. The conditions appropriate for CA protein expression will vary with the choice of the expression vector and the host cell, and will be easily ascertained by one skilled in the art through routine experimentation. For example, the use of constitutive promoters in the expression vector will require optimizing the growth and proliferation of the host cell, while the use of an inducible promoter requires the appropriate growth conditions for induction. In addition, in some embodiments, the timing of the harvest is important. For example, the baculoviral systems used in insect cell expression are lytic viruses, and thus harvest time selection can be crucial for product yield.

[0113] Appropriate host cells include yeast, bacteria, archaebacteria, fungi, and insect, plant and animal cells, including mammalian cells. Of particular interest are Drosophila melanogaster cells, Saccharomyces cerevisiae and other yeasts, E. coli, Bacillus subtilis, Sf9 cells, C129 cells, 293 cells, Neurospora, BHK, CHO, COS, HeLa cells, THP1 cell line (a macrophage cell line) and human cells and cell lines.

[0114] In a preferred embodiment, the CA proteins are expressed in mammalian cells. Mammalian expression systems are also known in the art, and include retroviral systems. A preferred expression vector system is a retroviral vector system such as is generally described in PCT/US97/01019 and PCT/US97/01048, both of which are hereby expressly incorporated by reference. Of particular use as mammalian promoters are the promoters from mammalian viral genes, since the viral genes are often highly expressed and have a broad host range. Examples include the SV40 early promoter, mouse mammary tumor virus LTR promoter, adenovirus major late promoter, herpes simplex virus promoter, and the CMV promoter. Typically, transcription termination and polyadenylation sequences recognized by mammalian cells are regulatory regions located 3′ to the translation stop codon and thus, together with the promoter elements, flank the coding sequence. Examples of transcription terminator and polyadenylation signals include those derived form SV40.

[0115] The methods of introducing exogenous nucleic acid into mammalian hosts, as well as other hosts, are well known in the art, and will vary with the host cell used. Techniques include dextran-mediated transfection, calcium phosphate precipitation, polybrene mediated transfection, protoplast fusion, electroporation, viral infection, encapsulation of the polynucleotide(s) in liposomes, and direct microinjection of the DNA into nuclei.

[0116] In a preferred embodiment, CA proteins are expressed in bacterial systems. Bacterial expression systems are well known in the art. Promoters from bacteriophage may also be used and are known in the art. In addition, synthetic promoters and hybrid promoters are also useful; for example, the tac promoter is a hybrid of the trp and lac promoter sequences. Furthermore, a bacterial promoter can include naturally occurring promoters of non-bacterial origin that have the ability to bind bacterial RNA polymerase and initiate transcription. In addition to a functioning promoter sequence, an efficient ribosome binding site is desirable. The expression vector may also include a signal peptide sequence that provides for secretion of the CA protein in bacteria. The protein is either secreted into the growth media (gram-positive bacteria) or into the periplasmic space, located between the inner and outer membrane of the cell (gram-negative bacteria). The bacterial expression vector may also include a selectable marker gene to allow for the selection of bacterial strains that have been transformed. Suitable selection genes include genes that render the bacteria resistant to drugs such as ampicillin, chloramphenicol, erythromycin, kanamycin, neomycin and tetracycline. Selectable markers also include biosynthetic genes, such as those in the histidine, tryptophan and leucine biosynthetic pathways. These components are assembled into expression vectors. Expression vectors for bacteria are well known in the art, and include vectors for Bacillus subtilis, E. coli, Streptococcus cremoris, and Streptococcus lividans, among others. The bacterial expression vectors are transformed into bacterial host cells using techniques well known in the art, such as calcium chloride treatment, electroporation, and others.

[0117] In one embodiment, CA proteins are produced in insect cells. Expression vectors for the transformation of insect cells, and in particular, baculovirus-based expression vectors, are well known in the art.

[0118] In a preferred embodiment, CA protein is produced in yeast cells. Yeast expression systems are well known in the art, and include expression vectors for Saccharomyces cerevisiae, Candida albicans and C. maltosa, Hansenula polymorpha, Kluyveromyces fragilis and K. lactis, Pichia guillerimondii and P. pastoris, Schizosaccharomyces pombe, and Yarrowia lipolytica.

[0119] The CA protein may also be made as a fusion protein, using techniques well known in the art. Thus, for example, for the creation of monoclonal antibodies. If the desired epitope is small, the CA protein may be fused to a carrier protein to form an immunogen. Alternatively, the CA protein may be made as a fusion protein to increase expression, or for other reasons. For example, when the CA protein is a CA peptide, the nucleic acid encoding the peptide may be linked to other nucleic acid for expression purposes.

[0120] In one embodiment, the CA nucleic acids, proteins and antibodies of the invention are labeled. By “labeled” herein is meant that a compound has at least one element, isotope or chemical compound attached to enable the detection of the compound. In general, labels fall into three classes: a) isotopic labels, which may be radioactive or heavy isotopes; b) immune labels, which may be antibodies or antigens; and c) colored or fluorescent dyes. The labels may be incorporated into the CA nucleic acids, proteins and antibodies at any position. For example, the label should be capable of producing, either directly or indirectly, a detectable signal. The detectable moiety may be a radioisotope, such as ³H, ¹⁴C, ³²P, ³⁵S, or ¹²⁵I, a fluorescent or chemiluminescent compound, such as fluorescein isothiocyanate, rhodamine, or luciferin, or an enzyme, such as alkaline phosphatase, beta-galactosidase or horseradish peroxidase. Any method known in the art for conjugating the antibody to the label may be employed, including those methods described by Hunter et al., Nature, 144:945 (1962); David et al., Biochemistry, 13:1014 (1974); Pain et al., J. Immunol. Meth., 40:219 (1981); and Nygren, J. Histochem. and Cytochem., 30:407 (1982).

[0121] Accordingly, the present invention also provides CA protein sequences. A CA protein of the present invention may be identified in several ways. “Protein” in this sense includes proteins, polypeptides, and peptides. As will be appreciated by those in the art, the nucleic acid sequences of the invention can be used to generate protein sequences. There are a variety of ways to do this, including cloning the entire gene and verifying its frame and amino acid sequence, or by comparing it to known sequences to search for homology to provide a frame, assuming the CA protein has homology to some protein in the database being used. Generally, the nucleic acid sequences are input into a program that will search all three frames for homology. This is done in a preferred embodiment using the following NCBI Advanced BLAST parameters. The program is blastx or blastn. The database is nr. The input data is as “Sequence in FASTA format”. The organism list is “none”. The “expect” is 10; the filter is default. The “descriptions” is 500, the “alignments” is 500, and the “alignment view” is pairwise. The “query Genetic Codes” is standard (1). The matrix is BLOSUM 62; gap existence cost is 11, per residue gap cost is 1; and the lambda ratio is 0.85 default. This results in the generation of a putative protein sequence.

[0122] In general, the term “polypeptide” as used herein refers to both the full-length polypeptide encoded by the recited polynucleotide, the polypeptide encoded by the gene represented by the recited polynucleotide, as well as portions or fragments thereof. The present invention encompasses variants of the naturally occurring proteins, wherein such variants are homologous or substantially similar to the naturally occurring protein, and can be of an origin of the same or different species as the naturally occurring protein (e.g., human, murine, or some other species that naturally expresses the recited polypeptide, usually a mammalian species). In general, variant polypeptides have a sequence that has at least about 80%, at least about 81%, at least about 82%, at least about 83%, at least about 84%, at least about 85%, at least about 86%, at least about 87%, at least about 88%, at least about 89%, usually at least about 90%, at least 91%, at least 92%, at least 93%, at least 94%, at least 95%, at least 96%, at least 97%, at least 98% and more usually at least about 99% sequence identity with a differentially expressed polypeptide described herein, as determined by the Smith-Waterman homology search algorithm using an affine gap search with a gap open penalty of 12 and a gap extension penalty of 2, BLOSUM matrix of 62. The Smith-Waterman homology search algorithm is taught in Smith and Waterman, Adv. Appl. Math. (1981) 2: 482-489. The variant polypeptides can be naturally or non-naturally glycosylated, i.e., the polypeptide has a glycosylation pattern that differs from the glycosylation pattern found in the corresponding naturally occurring protein.

[0123] Also within the scope of the invention are variants. Variants of polypeptides include mutants, fragments, and fusions. Mutants can include amino acid substitutions, additions or deletions. The amino acid substitutions can be conservative amino acid substitutions or substitutions to eliminate non-essential amino acids, such as to alter a glycosylation site, a phosphorylation site or an acetylation site, or to minimize misfolding by substitution or deletion of one or more cysteine residues that are not necessary for function. Conservative amino acid substitutions are those that preserve the general charge, hydrophobicity/hydrophilicity, and/or steric bulk of the amino acid substituted. Variants can be designed so as to retain or have enhanced biological activity of a particular region of the protein (e.g., a functional domain and/or, where the polypeptide is a member of a protein family, a region associated with a consensus sequence). Selection of amino acid alterations for production of variants can be based upon the accessibility (interior vs. exterior) of the amino acid (see, e.g., Go et al, Int. J. Peptide Protein Res. (1980) 15:211), the thermostability of the variant polypeptide (see, e.g., Querol et al., Prot. Eng. (1996) 9:265), desired glycosylation sites (see, e.g., Olsen and Thomsen, J. Gen. Microbiol. (1991) 137:579), desired disulfide bridges (see, e.g., Clarke et al., Biochemistry (1993) 32:4322; and Wakarchuk et al., Protein Eng. (1994) 7:1379), desired metal binding sites (see, e.g., Toma et al., Biochemistry (1991) 30:97, and Haezerbrouck et al., Protein Eng. (1993) 6:643), and desired substitutions within proline loops (see, e.g., Masul et al., Appl. Env. Microbiol. (1994) 60:3579). Cysteine-depleted muteins can be produced as disclosed in U.S. Pat. No. 4,959,314.

[0124] Variants also include fragments of the polypeptides disclosed herein, particularly biologically active fragments and/or fragments corresponding to functional domains. Fragments of interest will typically be at least about 8 amino acids (aa) 10 aa, 15 aa, 20 aa, 25 aa, 30 aa, 35 aa, 40 aa, to at least about 45 aa in length, usually at least about 50 aa in length, at least about 75 aa, at least about 100 aa, at least about 125 aa, at least about 150 aa in length, at least about 200 aa, at least about 300 aa, at least about 400 aa and can be as long as 500 aa in length or longer, but will usually not exceed about 1000 aa in length, where the fragment will have a stretch of amino acids that is identical to a polypeptide encoded by a polynucleotide having a sequence of any one of the polynucleotide sequences provided herein, or a homolog thereof. The protein variants described herein are encoded by polynucleotides that are within the scope of the invention. The genetic code can be used to select the appropriate codons to construct the corresponding variants.

[0125] While altered expression of the polynucleotides associated with cancer is observed, altered levels of expression of the polypeptides encoded by these polynucleotides may likely play a role in cancers.

[0126] Also included within one embodiment of CA proteins are amino acid variants of the naturally occurring sequences, as determined herein. Preferably, the variants are preferably greater than about 75% homologous to the wild-type sequence, more preferably greater than about 80%, even more preferably greater than about 85% and most preferably greater than 90%. The present application is also directed to proteins containing polypeptides at least 80%, 85%, 90%, 95%, 96%, 97%, 98% or 99% identical to a CA polypeptide sequence set forth herein. As for nucleic acids, homology in this context means sequence similarity or identity, with identity being preferred. This homology will be determined using standard techniques known in the art as are outlined above for the nucleic acid homologies.

[0127] CA proteins of the present invention may be shorter or longer than the wild type amino acid sequences. Thus, in a preferred embodiment, included within the definition of CA proteins are portions or fragments of the wild type sequences herein. In addition, as outlined above, the CA nucleic acids of the invention may be used to obtain additional coding regions, and thus additional protein sequence, using techniques known in the art.

[0128] In a preferred embodiment, the CA proteins are derivative or variant CA proteins as compared to the wild-type sequence. That is, as outlined more fully below, the derivative CA peptide will contain at least one amino acid substitution, deletion or insertion, with amino acid substitutions being particularly preferred. The amino acid substitution, insertion or deletion may occur at any residue within the CA peptide.

[0129] Also included in an embodiment of CA proteins of the present invention are amino acid sequence variants. These variants fall into one or more of three classes: substitutional, insertional or deletional variants. These variants ordinarily are prepared by site-specific mutagenesis of nucleotides in the DNA encoding the CA protein, using cassette or PCR mutagenesis or other techniques well known in the art, to produce DNA encoding the variant, and thereafter expressing the DNA in recombinant cell culture as outlined above. However, variant CA protein fragments having up to about 100-150 residues may be prepared by in vitro synthesis using established techniques. Amino acid sequence variants are characterized by the predetermined nature of the variation, a feature that sets them apart from naturally occurring allelic or interspecies variation of the CA protein amino acid sequence. The variants typically exhibit the same qualitative biological activity as the naturally occurring analogue, although variants can also be selected which have modified characteristics as will be more fully outlined below.

[0130] While the site or region for introducing an amino acid sequence variation is predetermined, the mutation per se need not be predetermined. For example, in order to optimize the performance of a mutation at a given site, random mutagenesis may be conducted at the target codon or region and the expressed CA variants screened for the optimal combination of desired activity. Techniques for making substitution mutations at predetermined sites in DNA having a known sequence are well known, for example, M13 primer mutagenesis and LAR mutagenesis. Screening of the mutants is done using assays of CA protein activities.

[0131] Amino acid substitutions are typically of single residues; insertions usually will be on the order of from about 1 to 20 amino acids, although considerably larger insertions may be tolerated. Deletions range from about 1 to about 20 residues, although in some cases deletions may be much larger.

[0132] Substitutions, deletions, insertions or any combination thereof may be used to arrive at a final derivative. Generally these changes are done on a few amino acids to minimize the alteration of the molecule. However, larger changes may be tolerated in certain circumstances. When small alterations in the characteristics of the CA protein are desired, substitutions are generally made in accordance with the following chart:

CHART 1

| | |
|---|---|
| Original Residue | Exemplary Substitutions |

| | |
|---|---|
| Ala | Ser |
| Arg | Lys |
| Asn | Gln, His |
| Asp | Glu |
| Cys | Ser |
| Gln | Asn |
| Glu | Asp |
| Gly | Pro |
| His | Asn, Gln |
| Ile | Leu, Val |
| Leu | Ile, Val |
| Lys | Arg, Gln, Glu |
| Met | Leu, Ile |
| Phe | Met, Leu, Tyr |
| Ser | Thr |
| Thr | Ser |
| Trp | Tyr |
| Tyr | Trp, Phe |
| Val | Ile, Leu |

[0133] Substantial changes in function or immunological identity are made by selecting substitutions that are less conservative than those shown in Chart I. For example, substitutions may be made full length to more significantly affect one or more of the following: the structure of the polypeptide backbone in the area of the alteration (e.g., the alpha-helical or beta-sheet structure); the charge or hydrophobicity of the molecule at the target site; and the bulk of the side chain. The substitutions which in general are expected to produce the greatest changes in the polypeptide's properties are those in which (a) a hydrophilic residue, e.g. seryl or threonyl is substituted for (or by) a hydrophobic residue, e.g. leucyl, isoleucyl, phenylalanyl, valyl or alanyl; (b) a cysteine or proline is substituted for (or by) any other residue; (c) a residue having an electropositive side chain, e.g. lysyl, arginyl, or histidyl, is substituted for (or by) an electronegative residue, e.g. glutamyl or aspartyl; or (d) a residue having a bulky side chain, e.g. phenylalanine, is substituted for (or by) one not having a side chain, e.g. glycine.

[0134] The variants typically exhibit the same qualitative biological activity and will elicit the same immune response as the naturally-occurring analogue, although variants also are selected to modify the characteristics of the CA proteins as needed. Alternatively, the variant may be designed such that the biological activity of the CA protein is altered. For example, glycosylation sites may be altered or removed, dominant negative mutations created, etc.

[0135] Covalent modifications of CA polypeptides are included within the scope of this invention, for example for use in screening. One type of covalent modification includes reacting targeted amino acid residues of a CA polypeptide with an organic derivatizing agent that is capable of reacting with selected side chains or the N- or C-terminal residues of a CA polypeptide. Derivatization with bifunctional agents is useful, for instance, for crosslinking CA polypeptides to a water-insoluble support matrix or surface for use in the method for purifying anti-CA antibodies or screening assays, as is more fully described below. Commonly used crosslinking agents include, e.g., 1,1-bis(diazoacetyl)-2-phenylethane, glutaraldehyde, N-hydroxysuccinimide esters, for example, esters with 4-azidosalicylic acid, homobifunctional imidoesters, including disuccinimidyl esters such as 3,3′-dithiobis(succinimidylpropionate), bifunctional maleimides such as bis-N-maleimido-1,8-octane and agents such as methyl-3-[(p-azidophenyl)dithio]propioimidate.

[0136] Other modifications include deamidation of glutaminyl and asparaginyl residues to the corresponding glutamyl and aspartyl residues, respectively, hydroxylation of proline and lysine, phosphorylation of hydroxyl groups of seryl, threonyl or tyrosyl residues, methylation of the a-amino groups of lysine, arginine, and histidine side chains [T. E. Creighton, Proteins: Structure and Molecular Properties, W.H. Freeman & Co., San Francisco, pp. 79-86 (1983)], acetylation of the N-terminal amine, and amidation of any C-terminal carboxyl group.

[0137] Another type of covalent modification of the CA polypeptide included within the scope of this invention comprises altering the native glycosylation pattern of the polypeptide. “Altering the native glycosylation pattern” is intended for purposes herein to mean deleting one or more carbohydrate moieties found in native sequence CA polypeptide, and/or adding one or more glycosylation sites that are not present in the native sequence CA polypeptide.

[0138] Addition of glycosylation sites to CA polypeptides may be accomplished by altering the amino acid sequence thereof. The alteration may be made, for example, by the addition of, or substitution by, one or more serine or threonine residues to the native sequence CA polypeptide (for O-linked glycosylation sites). The CA amino acid sequence may optionally be altered through changes at the DNA level, particularly by mutating the DNA encoding the CA polypeptide at preselected bases such that codons are generated that will translate into the desired amino acids.

[0139] Another means of increasing the number of carbohydrate moieties on the CA polypeptide is by chemical or enzymatic coupling of glycosides to the polypeptide. Such methods are described in the art, e.g., in WO 87/05330 published 11 Sep. 1987, and in Aplin and Wriston, L A Crit. Rev. Biochem., pp. 259-306 (1981).

[0140] Removal of carbohydrate moieties present on the CA polypeptide may be accomplished chemically or enzymatically or by mutational substitution of codons encoding for amino acid residues that serve as targets for glycosylation. Chemical deglycosylation techniques are known in the art and described, for instance, by Hakimuddin, et al., Arch. Biochem. Biophys., 259:52 (1987) and by Edge et al., Anal. Biochem., 118:131 (1981). Enzymatic cleavage of carbohydrate moieties on polypeptides can be achieved by the use of a variety of endo- and exo-glycosidases as described by Thotakura et al., Meth. Enzymol., 138:350 (1987).

[0141] Another type of covalent modification of CA comprises linking the CA polypeptide to one of a variety of nonproteinaceous polymers, e.g., polyethylene glycol, polypropylene glycol, or polyoxyalkylenes, in the manner set forth in U.S. Pat. No. 4,640,835; 4,496,689; 4,301,144; 4,670,417; 4,791,192 or 4,179,337.

[0142] CA polypeptides of the present invention may also be modified in a way to form chimeric molecules comprising a CA polypeptide fused to another, heterologous polypeptide or amino acid sequence. In one embodiment, such a chimeric molecule comprises a fusion of a CA polypeptide with a tag polypeptide that provides an epitope to which an anti-tag antibody can selectively bind. The epitope tag is generally placed at the amino- or carboxyl-terminus of the CA polypeptide, although internal fusions may also be tolerated in some instances. The presence of such epitope-tagged forms of a CA polypeptide can be detected using an antibody against the tag polypeptide. Also, provision of the epitope tag enables the CA polypeptide to be readily purified by affinity purification using an anti-tag antibody or another type of affinity matrix that binds to the epitope tag. In an alternative embodiment, the chimeric molecule may comprise a fusion of a CA polypeptide with an immunoglobulin or a particular region of an immunoglobulin. For a bivalent form of the chimeric molecule, such a fusion could be to the Fc region of an IgG molecule.

[0143] Various tag polypeptides and their respective antibodies are well known in the art. Examples include poly-histidine (poly-his) or poly-histidine-glycine (poly-his-gly) tags; the flu HA tag polypeptide and its antibody 12CA5 [Field et al., Mol. Cell. Biol., 8:2159-2165 (1988)]; the c-myc tag and the 8F9, 3C7, 6E10, G4, B7 and 9E10 antibodies thereto [Evan et al., Molecular and Cellular Biology, 5:3610-3616 (1985)]; and the Herpes Simplex virus glycoprotein D (gD) tag and its antibody [Paborsky et al., Protein Engineering, 3(6):547-553 (1990)]. Other tag polypeptides include the Flag-peptide [Hopp et al., BioTechnology, 6:1204-1210 (1988)]; the KT3 epitope peptide [Martin et al., Science, 255:192-194 (1992)]; tubulin epitope peptide [Skinner et al., J. Biol. Chem., 266:15163-15166 (1991)]; and the T7 gene 10 protein peptide tag [Lutz-Freyernuth et al., Proc. Natl. Acad. Sci. USA, 87:6393-6397 (1990)].

[0144] Also included with the definition of CA protein in one embodiment are other CA proteins of the CA family, and CA proteins from other organisms, which are cloned and expressed as outlined below. Thus, probe or degenerate polymerase chain reaction (PCR) primer sequences may be used to find other related CA proteins from humans or other organisms. As will be appreciated by those in the art, particularly useful probe and/or PCR primer sequences include the unique areas of the CA nucleic acid sequence. As is generally known in the art, preferred PCR primers are from about 15 to about 35 nucleotides in length, with from about 20 to about 30 being preferred, and may contain inosine as needed. The conditions for the PCR reaction are well known in the art.

[0145] In addition, as is outlined herein, CA proteins can be made that are longer than those encoded by the nucleic acids of the figures, for example, by the elucidation of additional sequences, the addition of epitope or purification tags, the addition of other fusion sequences, etc.

[0146] CA proteins may also be identified as being encoded by CA nucleic acids. Thus, CA proteins are encoded by nucleic acids that will hybridize to the sequences of the sequence listings, or their complements, as outlined herein.

### CA Antigens and Antibodies Thereto

[0147] In one embodiment, the invention provides CA specific antibodies. In a preferred embodiment, when the CA protein is to be used to generate antibodies, for example for immunotherapy, the CA protein should share at least one epitope or determinant with the full-length protein. By “epitope” or “determinant” herein is meant a portion of a protein that will generate and/or bind an antibody or T-cell receptor in the context of MHC. Thus, in most instances, antibodies made to a smaller CA protein will be able to bind to the full-length protein. In a preferred embodiment, the epitope is unique; that is, antibodies generated to a unique epitope show little or no cross-reactivity.

[0148] Any polypeptide sequence encoded by the CA polynucleotide sequences may be analyzed to determine certain preferred regions of the polypeptide. Regions of high antigenicity are determined from data by DNASTAR analysis by choosing values that represent regions of the polypeptide that are likely to be exposed on the surface of the polypeptide in an environment in which antigen recognition may occur in the process of initiation of an immune response. For example, the amino acid sequence of a polypeptide encoded by a CA polynucleotide sequence may be analyzed using the default parameters of the DNASTAR computer algorithm (DNASTAR, Inc., Madison, Wis.; http://www.dnastar.com/).

[0149] Polypeptide features that may be routinely obtained using the DNASTAR computer algorithm include, but are not limited to, Garnier-Robson alpha-regions, beta-regions, turn-regions, and coil-regions (Garnier et al. J. Mol. Biol., 120: 97 (1978)); Chou-Fasman alpha-regions, beta-regions, and turn-regions (Adv. in Enzymol., 47:45-148 (1978)); Kyte-Doolittle hydrophilic regions and hydrophobic regions (J. Mol. Biol., 157:105-132 (1982)); Eisenberg alpha- and beta-amphipathic regions; Karplus-Schulz flexible regions; Emini surface-forming regions (J. Virol., 55(3):836-839 (1985)); and Jameson-Wolf regions of high antigenic index (CABIOS, 4(1):181-186 (1988)). Kyte-Doolittle hydrophilic regions and hydrophobic regions, Emini surface-forming regions, and Jameson-Wolf regions of high antigenic index (i.e., containing four or more contiguous amino acids having an antigenic index of greater than or equal to 1.5, as identified using the default parameters of the Jameson-Wolf program) can routinely be used to determine polypeptide regions that exhibit a high degree of potential for antigenicity. One approach for preparing antibodies to a protein is the selection and preparation of an amino acid sequence of all or part of the protein, chemically synthesizing the sequence and injecting it into an appropriate animal, typically a rabbit, hamster or a mouse. Oligopeptides can be selected as candidates for the production of an antibody to the CA protein based upon the oligopeptides lying in hydrophilic regions, which are thus likely to be exposed in the mature protein. Additional oligopeptides can be determined using, for example, the Antigenicity Index, Welling, G. W. et al., FEBS Lett. 188:215-218 (1985), incorporated herein by reference.

[0150] In one embodiment, the term “antibody” includes antibody fragments, as are known in the art, including Fab, Fab₂, single chain antibodies (Fv for example), chimeric antibodies, etc., either produced by the modification of whole antibodies or those synthesized de novo using recombinant DNA technologies.

[0151] Methods of preparing polyclonal antibodies are known to the skilled artisan. Polyclonal antibodies can be raised in a mammal, for example, by one or more injections of an immunizing agent and, if desired, an adjuvant. Typically, the immunizing agent and/or adjuvant will be injected in the mammal by multiple subcutaneous or intraperitoneal injections. The immunizing agent may include a protein encoded by a nucleic acid of the figures or fragment thereof or a fusion protein thereof. It may be useful to conjugate the immunizing agent to a protein known to be immunogenic in the mammal being immunized. Examples of such immunogenic proteins include but are not limited to keyhole limpet hemocyanin, serum albumin, bovine thyroglobulin, and soybean trypsin inhibitor. Examples of adjuvants that may be employed include Freund's complete adjuvant and MPL-TDM adjuvant (monophosphoryl Lipid A, synthetic trehalose dicorynomycolate). The immunization protocol may be selected by one skilled in the art without undue experimentation.

[0152] The antibodies may, alternatively, be monoclonal antibodies. Monoclonal antibodies may be prepared using hybridoma methods, such as those described by Kohler and Milstein, Nature, 256:495 (1975). In a hybridoma method, a mouse, hamster, or other appropriate host animal, is typically immunized with an immunizing agent to elicit lymphocytes that produce or are capable of producing antibodies that will specifically bind to the immunizing agent. Alternatively, the lymphocytes may be immunized in vitro. The immunizing agent will typically include a polypeptide encoded by a nucleic acid of Tables 1-21, or fragment thereof or a fusion protein thereof. Generally, either peripheral blood lymphocytes (“PBLs”) are used if cells of human origin are desired, or spleen cells or lymph node cells are used if non-human mammalian sources are desired. The lymphocytes are then fused with an immortalized cell line using a suitable fusing agent, such as polyethylene glycol, to form a hybridoma cell (Goding, Monoclonal Antibodies: Principles and Practice, Academic Press, (1986) pp. 59-103). Immortalized cell lines are usually transformed mammalian cells, particularly myeloma cells of rodent, bovine and human origin. Usually, rat or mouse myeloma cell lines are employed. The hybridoma cells may be cultured in a suitable culture medium that preferably contains one or more substances that inhibit the growth or survival of the unfused, immortalized cells. For example, if the parental cells lack the enzyme hypoxanthine guanine phosphoribosyl transferase (HGPRT or HPRT), the culture medium for the hybridomas typically will include hypoxanthine, aminopterin, and thymidine (“HAT medium”), which substances prevent the growth of HGPRT-deficient cells.

[0153] Monoclonal antibody technology is used in implementing research, diagnosis and therapy. Monoclonal antibodies are used in radioimmunoassays, enzyme-linked immunosorbent assays, immunocytopathology, and flow cytometry for in vitro diagnosis, and in vivo for diagnosis and immunotherapy of human disease. Waldmann, T. A. (1991) Science 252:1657-1662. In particular, monoclonal antibodies have been widely applied to the diagnosis and therapy of cancer, wherein it is desirable to target malignant lesions while avoiding normal tissue. See, e.g., U.S. Pat. Nos. 4,753,894 to Frankel, et al.; 4,938,948 to Ring et al.; and 4,956,453 to Bjorn et al.

[0154] In one embodiment, the antibodies are bispecific antibodies. Bispecific antibodies are monoclonal, preferably human or humanized, antibodies that have binding specificities for at least two different antigens. A number of “humanized” antibody molecules comprising an antigen-binding site derived from a non-human immunoglobulin have been described, including chimeric antibodies having rodent V regions and their associated CDRs fused to human constant domains (Winter et al. (1991) Nature 349:293-299; Lobuglio et al. (1989) Proc. Nat. Acad. Sci. USA 86:4220-4224; Shaw et al. (1987) J Immunol. 138:4534-4538; and Brown et al. (1987) Cancer Res. 47:3577-3583), rodent CDRs grafted into a human supporting FR prior to fusion with an appropriate human antibody constant domain (Riechmann et al. (1988) Nature 332:323-327; Verhoeyen et al. (1988) Science 239:1534-1536; and Jones et al. (1986) Nature 321:522-525), and rodent CDRs supported by recombinantly veneered rodent FRs (European Patent Publication No. 519,596, published Dec. 23, 1992). These “humanized” molecules are designed to minimize unwanted immunological response toward rodent antihuman antibody molecules which limits the duration and effectiveness of therapeutic applications of those moieties in human recipients. In the present case, one of the binding specificities is for a protein encoded by a nucleic acid of Tables 1-21, or a fragment thereof, the other one is for any other antigen, and preferably for a cell-surface protein or receptor or receptor subunit, preferably one that is tumor specific.

[0155] In a preferred embodiment, the antibodies to CA are capable of reducing or eliminating the biological function of CA, as is described below. That is, the addition of anti-CA antibodies (either polyclonal or preferably monoclonal) to CA (or cells containing CA) may reduce or eliminate the CA activity. Generally, at least a 25% decrease in activity is preferred, with at least about 50% being particularly preferred and about a 95-100% decrease being especially preferred.

[0156] In a preferred embodiment the antibodies to the CA proteins are humanized antibodies. “Humanized” antibodies refer to a molecule having an antigen binding site that is substantially derived from an immunoglobulin from a non-human species and the remaining immunoglobulin structure of the molecule based upon the structure and/or sequence of a human immunoglobulin. The antigen binding site may comprise either complete variable domains fused onto constant domains or only the complementarity determining regions (CDRs) grafted onto appropriate framework regions in the variable domains. Antigen binding sites may be wild type or modified by one or more amino acid substitutions, e.g., modified to resemble human immunoglobulin more closely. Alternatively, a humanized antibody may be derived from a chimeric antibody that retains or substantially retains the antigen-binding properties of the parental, non-human, antibody but which exhibits diminished immunogenicity as compared to the parental antibody when administered to humans. The phrase “chimeric antibody,” as used herein, refers to an antibody containing sequence derived from two different antibodies (see, e.g., U.S. Pat. No. 4,816,567) that typically originate from different species. Typically, in these chimeric antibodies, the variable region of both light and heavy chains mimics the variable regions of antibodies derived from one species of mammals, while the constant portions are homologous to the sequences in antibodies derived from another. Most typically, chimeric antibodies comprise human and murine antibody fragments, generally human constant and mouse variable regions. Humanized antibodies include human immunoglobulins (recipient antibody) in which residues form a complementary determining region (CDR) of the recipient are replaced by residues from a CDR of a non-human species (donor antibody) such as mouse, rat or rabbit having the desired specificity, affinity and capacity. In some instances, Fv framework residues of the human immunoglobulin are replaced by corresponding non-human residues. Humanized antibodies may also comprise residues that are found neither in the recipient antibody nor in the imported CDR or framework sequences. In general, the humanized antibody will comprise substantially all of at least one, and typically two, variable domains, in which all or substantially all of the CDR regions correspond to those of a non-human immunoglobulin and all or substantially all of the framework residues (FR) regions are those of a human immunoglobulin consensus sequence. The humanized antibody optimally also will comprise at least a portion of an immunoglobulin constant region (Fc), typically that of a human immunoglobulin (Jones et al., Nature, 321:522-525 (1986); Riechmann et al., Nature, 332:323-329 (1988); and Presta, Curr. Op. Struct. Biol., 2:593-596 (1992)). One clear advantage to such chimeric forms is that, for example, the variable regions can conveniently be derived from presently known sources using readily available hybridomas or B cells from non human host organisms in combination with constant regions derived from, for example, human cell preparations. While the variable region has the advantage of ease of preparation, and the specificity is not affected by its source, the constant region being human, is less likely to elicit an immune response from a human subject when the antibodies are injected than would the constant region from a non-human source. However, the definition is not limited to this particular example.

[0157] Because humanized antibodies are far less immunogenic in humans than the parental mouse monoclonal antibodies, they can be used for the treatment of humans with far less risk of anaphylaxis. Thus, these antibodies may be preferred in therapeutic applications that involve in vivo administration to a human such as, e.g., use as radiation sensitizers for the treatment of neoplastic disease or use in methods to reduce the side effects of, e.g., cancer therapy. Methods for humanizing non-human antibodies are well known in the art. Generally, a humanized antibody has one or more amino acid residues introduced into it from a source that is non-human. These non-human amino acid residues are often referred to as import residues, which are typically taken from an import variable domain. Humanization can be essentially performed following the method of Winter and co-workers (Jones et al., Nature 321:522-525 (1986); Riechmann et al., Nature 332:323-327 (1988); Verhoeyen et al., Science 239:1534-1536 (1988)), by substituting rodent CDRs or CDR sequences for the corresponding sequences of a human antibody. Accordingly, such humanized antibodies are chimeric antibodies (U.S. Pat. No. 4,816,567), wherein substantially less than an intact human variable domain has been substituted by the corresponding sequence from a non-human species. In practice, humanized antibodies are typically human antibodies in which some CDR residues and possibly some FR residues are substituted by residues from analogous sites in rodent antibodies.

[0158] Human antibodies can also be produced using various techniques known in the art, including phage display libraries [Hoogenboom and Winter, J. Mol. Biol., 227:381 (1991); Marks et al., J. Mol. Biol., 222:581 (1991)]. The techniques of Cole et al. and Boerner et al. are also available for the preparation of human monoclonal antibodies [Cole et al., Monoclonal Antibodies and Cancer Therapy, Alan R. Liss, p. 77 (1985) and Boerner et al., J. Immunol., 147(1):86-95 (1991)]. Humanized antibodies may be achieved by a variety of methods including, for example: (1) grafting the non-human complementarity determining regions (CDRs) onto a human framework and constant region (a process referred to in the art as “humanizing”), or, alternatively, (2) transplanting the entire non-human variable domains, but “cloaking” them with a human-like surface by replacement of surface residues (a process referred to in the art as “veneering”). In the present invention, humanized antibodies will include both “humanized” and “veneered” antibodies. Similarly, human antibodies can be made by introducing human immunoglobulin loci into transgenic animals, e.g., mice in which the endogenous immunoglobulin genes have been partially or completely inactivated. Upon challenge, human antibody production is observed, which closely resembles that seen in humans in all respects, including gene rearrangement, assembly, and antibody repertoire. This approach is described, for example, in U.S. Pat. Nos. 5,545,807; 5,545,806; 5,569,825; 5,625,126; 5,633,425; 5,661,016, and in the following scientific publications: Marks et al., Bio/Technology 10, 779-783 (1992); Lonberg et al., Nature 368 856-859 (1994); Morrison, Nature 368, 812-13 (1994); Fishwild et al., Nature Biotechnology 14, 845-51 (1996); Neuberger, Nature Biotechnology 14, 826 (1996); Lonberg and Huszar, Intern. Rev. Immunol. 13 65-93 (1995); Jones et al., Nature 321:522-525 (1986); Morrison et al., Proc. Natl. Acad. Sci, U.S.A., 81:6851-6855 (1984); Morrison and Oi, Adv. Immunol., 44:65-92 (1988); Verhoeyer et al., Science 239:1534-1536 (1988); Padlan, Molec. Immun. 28:489-498 (1991); Padlan, Molec. Immunol. 31(3):169-217 (1994); and Kettleborough, C. A. et al., Protein Eng. 4(7):773-83 (1991) each of which is incorporated herein by reference.

[0159] The phrase “complementarity determining region” refers to amino acid sequences which together define the binding affinity and specificity of the natural Fv region of a native immunoglobulin binding site. See, e.g., Chothia et al., J. Mol. Biol. 196:901-917 (1987); Kabat et al., U.S. Dept. of Health and Human Services NIH Publication No. 91-3242 (1991). The phrase “constant region” refers to the portion of the antibody molecule that confers effector functions. In the present invention, mouse constant regions are substituted by human constant regions. The constant regions of the subject humanized antibodies are derived from human immunoglobulins. The heavy chain constant region can be selected from any of the five isotypes: alpha, delta, epsilon, gamma or mu. One method of humanizing antibodies comprises aligning the non-human heavy and light chain sequences to human heavy and light chain sequences, selecting and replacing the non-human framework with a human framework based on such alignment, molecular modeling to predict the conformation of the humanized sequence and comparing to the conformation of the parent antibody. This process is followed by repeated back mutation of residues in the CDR region that disturb the structure of the CDRs until the predicted conformation of the humanized sequence model closely approximates the conformation of the non-human CDRs of the parent non-human antibody. Such humanized antibodies may be further derivatized to facilitate uptake and clearance, e.g, via Ashwell receptors. See, e.g., U.S. Pat. Nos. 5,530,101 and 5,585,089 which are incorporated herein by reference.

[0160] Humanized antibodies to CA polypeptides can also be produced using transgenic animals that are engineered to contain human immunoglobulin loci. For example, WO 98/24893 discloses transgenic animals having a human Ig locus wherein the animals do not produce functional endogenous immunoglobulins due to the inactivation of endogenous heavy and light chain loci. WO 91/10741 also discloses transgenic non-primate mammalian hosts capable of mounting an immune response to an immunogen, wherein the antibodies have primate constant and/or variable regions, and wherein the endogenous immunoglobulin-encoding loci are substituted or inactivated. WO 96/30498 discloses the use of the Cre/Lox system to modify the immunoglobulin locus in a mammal, such as to replace all or a portion of the constant or variable region to form a modified antibody molecule. WO 94/02602 discloses non-human mammalian hosts having inactivated endogenous Ig loci and functional human Ig loci. U.S. Pat. No. 5,939,598 discloses methods of making transgenic mice in which the mice lack endogenous heavy chains, and express an exogenous immunoglobulin locus comprising one or more xenogeneic constant regions.

[0161] Using a transgenic animal described above, an immune response can be produced to a selected antigenic molecule, and antibody-producing cells can be removed from the animal and used to produce hybridomas that secrete human monoclonal antibodies. Immunization protocols, adjuvants, and the like are known in the art, and are used in immunization of, for example, a transgenic mouse as described in WO 96/33735. The monoclonal antibodies can be tested for the ability to inhibit or neutralize the biological activity or physiological effect of the corresponding protein.

[0162] In the present invention, CA polypeptides of the invention and variants thereof are used to immunize a transgenic animal as described above. Monoclonal antibodies are made using methods known in the art, and the specificity of the antibodies is tested using isolated CA polypeptides. Methods for preparation of the human or primate CA or an epitope thereof include, but are not limited to chemical synthesis, recombinant DNA techniques or isolation from biological samples. Chemical synthesis of a peptide can be performed, for example, by the classical Merrifeld method of solid phase peptide synthesis (Merrifeld, J. Am. Chem. Soc. 85:2149, 1963 which is incorporated by reference) or the FMOC strategy on a Rapid Automated Multiple Peptide Synthesis system (E. I. du Pont de Nemours Company, Wilmington, Del.) (Caprino and Han, J. Org. Chem. 37:3404, 1972 which is incorporated by reference).

[0163] Polyclonal antibodies can be prepared by immunizing rabbits or other animals by injecting antigen followed by subsequent boosts at appropriate intervals. The animals are bled and sera assayed against purified CA proteins usually by ELISA or by bioassay based upon the ability to block the action of CA proteins. When using avian species, e.g., chicken, turkey and the like, the antibody can be isolated from the yolk of the egg. Monoclonal antibodies can be prepared after the method of Milstein and Kohler by fusing splenocytes from immunized mice with continuously replicating tumor cells such as myeloma or lymphoma cells. (Milstein and Kohler, Nature 256:495-497, 1975; Gulfre and Milstein, Methods in Enzymology: Immunochemical Techniques 73:1-46, Langone and Banatis eds., Academic Press, 1981 which are incorporated by reference). The hybridoma cells so formed are then cloned by limiting dilution methods and supernates assayed for antibody production by ELISA, RIA or bioassay.

[0164] The unique ability of antibodies to recognize and specifically bind to target proteins provides an approach for treating an overexpression of the protein. Thus, another aspect of the present invention provides for a method for preventing or treating diseases involving overexpression of a CA polypeptide by treatment of a patient with specific antibodies to the CA protein.

[0165] Specific antibodies, either polyclonal or monoclonal, to the CA proteins can be produced by any suitable method known in the art as discussed above. For example, murine or human monoclonal antibodies can be produced by hybridoma technology or, alternatively, the CA proteins, or an immunologically active fragment thereof, or an anti-idiotypic antibody, or fragment thereof can be administered to an animal to elicit the production of antibodies capable of recognizing and binding to the CA proteins. Such antibodies can be from any class of antibodies including, but not limited to IgG, IgA, IgM, IgD, and IgE or in the case of avian species, IgY and from any subclass of antibodies.

[0166] By immunotherapy is meant treatment of a cancer with an antibody raised against a CA protein. As used herein, immunotherapy can be passive or active. Passive immunotherapy as defined herein is the passive transfer of antibody to a recipient (patient). Active immunization is the induction of antibody and/or T-cell responses in a recipient (patient). Induction of an immune response is the result of providing the recipient with an antigen to which antibodies are raised. As appreciated by one of ordinary skill in the art, the antigen may be provided by injecting a polypeptide against which antibodies are desired to be raised into a recipient, or contacting the recipient with a nucleic acid capable of expressing the antigen and under conditions for expression of the antigen.

[0167] In a preferred embodiment, oncogenes which encode secreted growth factors may be inhibited by raising antibodies against CA proteins that are secreted proteins as described above. Without being bound by theory, antibodies used for treatment, bind and prevent the secreted protein from binding to its receptor, thereby inactivating the secreted CA protein.

[0168] In another preferred embodiment, the CA protein to which antibodies are raised is a transmembrane protein. Without being bound by theory, antibodies used for treatment, bind the extracellular domain of the CA protein and prevent it from binding to other proteins, such as circulating ligands or cell-associated molecules. The antibody may cause down-regulation of the transmembrane CA protein. As will be appreciated by one of ordinary skill in the art, the antibody may be a competitive, non-competitive or uncompetitive inhibitor of protein binding to the extracellular domain of the CA protein. The antibody is also an antagonist of the CA protein. Further, the antibody prevents activation of the transmembrane CA protein. In one aspect, when the antibody prevents the binding of other molecules to the CA protein, the antibody prevents growth of the cell. The antibody may also sensitize the cell to cytotoxic agents, including, but not limited to TNF-α, TNF-β, IL-1, INF-γ and IL-2, or chemotherapeutic agents including 5FU, vinblastine, actinomycin D, cisplatin, methotrexate, and the like. In some instances the antibody belongs to a sub-type that activates serum complement when complexed with the transmembrane protein thereby mediating cytotoxicity. Thus, cancers may be treated by administering to a patient antibodies directed against the transmembrane CA protein.

[0169] In another preferred embodiment, the antibody is conjugated to a therapeutic moiety. In one aspect the therapeutic moiety is a small molecule that modulates the activity of the CA protein. In another aspect the therapeutic moiety modulates the activity of molecules associated with or in close proximity to the CA protein. The therapeutic moiety may inhibit enzymatic activity such as protease or protein kinase activity associated with cancer.

[0170] In a preferred embodiment, the therapeutic moiety may also be a cytotoxic agent. In this method, radioisotopes, natural toxins, chemotherapy agents, or other substances (such as biological response modifiers) are chemically linked or conjugated to a monoclonal antibody to form “immunoconjugates” and “immunotoxins” which target the cytotoxic agent to tumor tissue or cells resulting in a reduction in the number of afflicted cells, thereby reducing symptoms associated with cancers, including lymphoma. Cytotoxic agents are numerous and varied and include, but are not limited to, cytotoxic drugs or toxins or active fragments of such toxins. Suitable toxins and their corresponding fragments include diphtheria A chain, exotoxin A chain, ricin A chain, abrin A chain, curcin, crotin, phenomycin, enomycin and the like. Cytotoxic agents also include radiochemicals made by conjugating radioisotopes to antibodies raised against CA proteins, or binding of a radionuclide to a chelating agent that has been covalently attached to the antibody. Targeting the therapeutic moiety to transmembrane CA proteins not only serves to increase the local concentration of therapeutic moiety in the cancer of interest, i.e., lymphoma, but also serves to reduce deleterious side effects that may be associated with the therapeutic moiety. A number of investigators have used monoclonal antibodies as carriers of cytotoxic substances in attempts to selectively direct those agents to malignant tissue. More particularly, a number of monoclonal antibodies have been conjugated to toxins such as ricin, abrin, diphtheria toxin and Pseudomonas exotoxin or to enzymatically active portions (A chains) thereof via heterobifunctional agents. See, e.g., U.S. Pat. No. 4,753,894 to Frankel et al.; Nevelle, et al. (1982) Immunol Rev 62:75-91; Ross et al. (1980) Eur. J. Biochem 104; Vitteta et al. (1982)Immunol Rev 62:158-183; Raso et al. (1982) Cancer Res 42:457-464, and Trowbridge et al. (1981) Nature 294:171-173.

[0171] In another preferred embodiment, the CA protein against which the antibodies are raised is an intracellular protein. In this case, the antibody may be conjugated to a protein that facilitates entry into the cell. In one case, the antibody enters the cell by endocytosis. In another embodiment, a nucleic acid encoding the antibody is administered to the individual or cell. Moreover, wherein the CA protein can be targeted within a cell, e.g., the nucleus, an antibody thereto contains a signal for that target localization, e.g., a nuclear localization signal.

[0172] The CA antibodies of the invention specifically bind to CA proteins. By “specifically bind” herein is meant that the antibodies bind to the protein with a binding constant in the range of 10⁻⁴-10⁻⁶ M⁻¹, with a preferred range being 10⁻⁷-10⁻⁹ M⁻¹.

[0173] In a preferred embodiment, the CA protein is purified or isolated after expression. CA proteins may be isolated or purified in a variety of ways known to those skilled in the art depending on what other components are present in the sample. Standard purification methods include electrophoretic, molecular, immunological and chromatographic techniques, including ion exchange, hydrophobic, affinity, and reverse-phase HPLC chromatography, and chromatofocusing. For example, the CA protein may be purified using a standard anti-CA antibody column. Ultrafiltration and diafiltration techniques, in conjunction with protein concentration, are also useful. For general guidance in suitable purification techniques, see Scopes, R., Protein Purification, Springer-Verlag, NY (1982). The degree of purification necessary will vary depending on the use of the CA protein. In some instances no purification will be necessary.

### Detection of Cancer Phenotype

[0174] Once expressed and purified if necessary, the CA proteins and nucleic acids are useful in a number of applications. In one aspect, the expression levels of genes are determined for different cellular states in the cancer phenotype; that is, the expression levels of genes in normal tissue and in cancer tissue (and in some cases, for varying severities of lymphoma that relate to prognosis, as outlined below) are evaluated to provide expression profiles. An expression profile of a particular cell state or point of development is essentially a “fingerprint” of the state; while two states may have any particular gene similarly expressed, the evaluation of a number of genes simultaneously allows the generation of a gene expression profile that is unique to the state of the cell. By comparing expression profiles of cells in different states, information regarding which genes are important (including both up- and down-regulation of genes) in each of these states is obtained. Then, diagnosis may be done or confirmed: does tissue from a particular patient have the gene expression profile of normal or cancer tissue.

[0175] “Differential expression,” or equivalents used herein, refers to both qualitative as well as quantitative differences in the temporal and/or cellular expression patterns of genes, within and among the cells. Thus, a differentially expressed gene can qualitatively have its expression altered, including an activation or inactivation, in, for example, normal versus cancer tissue. That is, genes may be turned on or turned off in a particular state, relative to another state. As is apparent to the skilled artisan, any comparison of two or more states can be made. Such a qualitatively regulated gene will exhibit an expression pattern within a state or cell type which is detectable by standard techniques in one such state or cell type, but is not detectable in both. Alternatively, the determination is quantitative in that expression is increased or decreased; that is, the expression of the gene is either up-regulated, resulting in an increased amount of transcript, or down-regulated, resulting in a decreased amount of transcript. The degree to which expression differs need only be large enough to quantify via standard characterization techniques as outlined below, such as by use of Affymetrix GeneChip® expression arrays, Lockhart, Nature Biotechnology, 14:1675-1680 (1996), hereby expressly incorporated by reference. Other techniques include, but are not limited to, quantitative reverse transcriptase PCR, Northern analysis and RNase protection. As outlined above, preferably the change in expression (i.e. upregulation or downregulation) is at least about 50%, more preferably at least about 100%, more preferably at least about 150%, more preferably, at least about 200%, with from 300 to at least 1000% being especially preferred.

[0176] As will be appreciated by those in the art, this may be done by evaluation at either the gene transcript, or the protein level; that is, the amount of gene expression may be monitored using nucleic acid probes to the DNA or RNA equivalent of the gene transcript, and the quantification of gene expression levels, or, alternatively, the final gene product itself (protein) can be monitored, for example through the use of antibodies to the CA protein and standard immunoassays (ELISAs, etc.) or other techniques, including mass spectroscopy assays, 2D gel electrophoresis assays, etc. Thus, the proteins corresponding to CA genes, i.e. those identified as being important in a particular cancer phenotype, i.e., lymphoma, can be evaluated in a diagnostic test specific for that cancer.

[0177] In a preferred embodiment, gene expression monitoring is done and a number of genes, i.e. an expression profile, is monitored simultaneously, although multiple protein expression monitoring can be done as well. Similarly, these assays may be done on an individual basis as well.

[0178] In this embodiment, the CA nucleic acid probes may be attached to biochips as outlined herein for the detection and quantification of CA sequences in a particular cell. The assays are done as is known in the art. As will be appreciated by those in the art, any number of different CA sequences may be used as probes, with single sequence assays being used in some cases, and a plurality of the sequences described herein being used in other embodiments. In addition, while solid-phase assays are described, any number of solution based assays may be done as well.

[0179] In a preferred embodiment, both solid and solution based assays may be used to detect CA sequences that are up-regulated or down-regulated in cancers as compared to normal tissue. In instances where the CA sequence has been altered but shows the same expression profile or an altered expression profile, the protein will be detected as outlined herein.

[0180] In a preferred embodiment nucleic acids encoding the CA protein are detected. Although DNA or RNA encoding the CA protein may be detected, of particular interest are methods wherein the mRNA encoding a CA protein is detected. The presence of mRNA in a sample is an indication that the CA gene has been transcribed to form the mRNA, and suggests that the protein is expressed. Probes to detect the mRNA can be any nucleotide/deoxynucleotide probe that is complementary to and base pairs with the mRNA and includes but is not limited to oligonucleotides, cDNA or RNA. Probes also should contain a detectable label, as defined herein. In one method the mRNA is detected after immobilizing the nucleic acid to be examined on a solid support such as nylon membranes and hybridizing the probe with the sample. Following washing to remove the non-specifically bound probe, the label is detected. In another method detection of the mRNA is performed in situ. In this method permeabilized cells or tissue samples are contacted with a detectably labeled nucleic acid probe for sufficient time to allow the probe to hybridize with the target mRNA. Following washing to remove the non-specifically bound probe, the label is detected. For example a digoxygenin labeled riboprobe (RNA probe) that is complementary to the mRNA encoding a CA protein is detected by binding the digoxygenin with an anti-digoxygenin secondary antibody and developed with nitro blue tetrazolium and 5-bromo-4-chloro-3-indoyl phosphate.

[0181] In a preferred embodiment, any of the three classes of proteins as described herein (secreted, transmembrane or intracellular proteins) are used in diagnostic assays. The CA proteins, antibodies, nucleic acids, modified proteins and cells containing CA sequences are used in diagnostic assays. This can be done on an individual gene or corresponding polypeptide level, or as sets of assays.

[0182] As described and defined herein, CA proteins find use as markers of cancers, including lymphomas such as, but not limited to, Hodgkin's and non-Hodgkin's lymphoma. Detection of these proteins in putative cancer tissue or patients allows for a determination or diagnosis of the type of cancer. Numerous methods known to those of ordinary skill in the art find use in detecting cancers. In one embodiment, antibodies are used to detect CA proteins. A preferred method separates proteins from a sample or patient by electrophoresis on a gel (typically a denaturing and reducing protein gel, but may be any other type of gel including isoelectric focusing gels and the like). Following separation of proteins, the CA protein is detected by immunoblotting with antibodies raised against the CA protein. Methods of immunoblotting are well known to those of ordinary skill in the art.

[0183] In another preferred method, antibodies to the CA protein find use in in situ imaging techniques. In this method cells are contacted with from one to many antibodies to the CA protein(s). Following washing to remove non-specific antibody binding, the presence of the antibody or antibodies is detected. In one embodiment the antibody is detected by incubating with a secondary antibody that contains a detectable label. In another method the primary antibody to the CA protein(s) contains a detectable label. In another preferred embodiment each one of multiple primary antibodies contains a distinct and detectable label. This method finds particular use in simultaneous screening for a plurality of CA proteins. As will be appreciated by one of ordinary skill in the art, numerous other histological imaging techniques are useful in the invention.

[0184] In a preferred embodiment the label is detected in a fluorometer that has the ability to detect and distinguish emissions of different wavelengths. In addition, a fluorescence activated cell sorter (FACS) can be used in the method.

[0185] In another preferred embodiment, antibodies find use in diagnosing cancers from blood samples. As previously described, certain CA proteins are secreted/circulating molecules. Blood samples, therefore, are useful as samples to be probed or tested for the presence of secreted CA proteins. Antibodies can be used to detect the CA proteins by any of the previously described immunoassay techniques including ELISA, immunoblotting (Western blotting), immunoprecipitation, BIACORE technology and the like, as will be appreciated by one of ordinary skill in the art.

[0186] In a preferred embodiment, in situ hybridization of labeled CA nucleic acid probes to tissue arrays is done. For example, arrays of tissue samples, including CA tissue and/or normal tissue, are made. In situ hybridization as is known in the art can then be done.

[0187] It is understood that when comparing the expression fingerprints between an individual and a standard, the skilled artisan can make a diagnosis as well as a prognosis. It is further understood that the genes that indicate diagnosis may differ from those that indicate prognosis.

[0188] In a preferred embodiment, the CA proteins, antibodies, nucleic acids, modified proteins and cells containing CA sequences are used in prognosis assays. As above, gene expression profiles can be generated that correlate to cancer, especially lymphoma, severity, in terms of long term prognosis. Again, this may be done on either a protein or gene level, with the use of genes being preferred. As above, the CA probes are attached to biochips for the detection and quantification of CA sequences in a tissue or patient. The assays proceed as outlined for diagnosis.

### Screening for CA-Targeted Drugs

[0189] In one embodiment, any of the CA sequences as described herein are used in drug screening assays. The CA proteins, antibodies, nucleic acids, modified proteins and cells containing CA sequences are used in drug screening assays or by evaluating the effect of drug candidates on a “gene expression profile” or expression profile of polypeptides. In one embodiment, the expression profiles are used, preferably in conjunction with high throughput screening techniques to allow monitoring for expression profile genes after treatment with a candidate agent, Zlokarnik, et al., Science 279, 84-8 (1998), Heid, et al., Genome Res., 6:986-994 (1996).

[0190] In another embodiment, the CA proteins, antibodies, nucleic acids, modified proteins and cells containing the native or modified CA proteins are used in screening assays. That is, the present invention provides novel methods for screening for compositions that modulate the cancer phenotype. As above, this can be done by screening for modulators of gene expression or for modulators of protein activity. Similarly, this may be done on an individual gene or protein level or by evaluating the effect of drug candidates on a “gene expression profile”. In a preferred embodiment, the expression profiles are used, preferably in conjunction with high throughput screening techniques to allow monitoring for expression profile genes after treatment with a candidate agent, see Zlokarnik, supra.

[0191] Having identified the CA genes herein, a variety of assays to evaluate the effects of agents on gene expression may be executed. In a preferred embodiment, assays may be run on an individual gene or protein level. That is, having identified a particular gene as aberrantly regulated in cancer, candidate bioactive agents may be screened to modulate the gene's regulation. “Modulation” thus includes both an increase and a decrease in gene expression or activity. The preferred amount of modulation will depend on the original change of the gene expression in normal versus tumor tissue, with changes of at least 10%, preferably 50%, more preferably 100-300%, and in some embodiments 300-1000% or greater. Thus, if a gene exhibits a 4 fold increase in tumor compared to normal tissue, a decrease of about four fold is desired; a 10 fold decrease in tumor compared to normal tissue gives a 10 fold increase in expression for a candidate agent is desired, etc. Alternatively, where the CA sequence has been altered but shows the same expression profile or an altered expression profile, the protein will be detected as outlined herein.

[0192] As will be appreciated by those in the art, this may be done by evaluation at either the gene or the protein level; that is, the amount of gene expression may be monitored using nucleic acid probes and the quantification of gene expression levels, or, alternatively, the level of the gene product itself can be monitored, for example through the use of antibodies to the CA protein and standard immunoassays. Alternatively, binding and bioactivity assays with the protein may be done as outlined below.

[0193] In a preferred embodiment, gene expression monitoring is done and a number of genes, i.e. an expression profile, is monitored simultaneously, although multiple protein expression monitoring can be done as well.

[0194] In this embodiment, the CA nucleic acid probes are attached to biochips as outlined herein for the detection and quantification of CA sequences in a particular cell. The assays are further described below.

[0195] Generally, in a preferred embodiment, a candidate bioactive agent is added to the cells prior to analysis. Moreover, screens are provided to identify a candidate bioactive agent that modulates a particular type of cancer, modulates CA proteins, binds to a CA protein, or interferes between the binding of a CA protein and an antibody.

[0196] The term “candidate bioactive agent” or “drug candidate” or grammatical equivalents as used herein describes any molecule, e.g., protein, oligopeptide, small organic or inorganic molecule, polysaccharide, polynucleotide, etc., to be tested for bioactive agents that are capable of directly or indirectly altering either the cancer phenotype, binding to and/or modulating the bioactivity of a CA protein, or the expression of a CA sequence, including both nucleic acid sequences and protein sequences. In a particularly preferred embodiment, the candidate agent suppresses a CA phenotype, for example to a normal tissue fingerprint. Similarly, the candidate agent preferably suppresses a severe CA phenotype. Generally a plurality of assay mixtures are run in parallel with different agent concentrations to obtain a differential response to the various concentrations. Typically, one of these concentrations serves as a negative control, i.e., at zero concentration or below the level of detection.

[0197] In one aspect, a candidate agent will neutralize the effect of a CA protein. By “neutralize” is meant that activity of a protein is either inhibited or counter acted against so as to have substantially no effect on a cell.

[0198] Candidate agents encompass numerous chemical classes, though typically they are organic or inorganic molecules, preferably small organic compounds having a molecular weight of more than 100 and less than about 2,500 Daltons. Preferred small molecules are less than 2000, or less than 1500 or less than 1000 or less than 500 D. Candidate agents comprise functional groups necessary for structural interaction with proteins, particularly hydrogen bonding, and typically include at least an amine, carbonyl, hydroxyl or carboxyl group, preferably at least two of the functional chemical groups. The candidate agents often comprise cyclical carbon or heterocyclic structures and/or aromatic or polyaromatic structures substituted with one or more of the above functional groups. Candidate agents are also found among biomolecules including peptides, saccharides, fatty acids, steroids, purines, pyrimidines, derivatives, structural analogs or combinations thereof. Particularly preferred are peptides.

[0199] Candidate agents are obtained from a wide variety of sources including libraries of synthetic or natural compounds. For example, numerous means are available for random and directed synthesis of a wide variety of organic compounds and biomolecules, including expression of randomized oligonucleotides. Alternatively, libraries of natural compounds in the form of bacterial, fungal, plant and animal extracts are available or readily produced. Additionally, natural or synthetically produced libraries and compounds are readily modified through conventional chemical, physical and biochemical means. Known pharmacological agents may be subjected to directed or random chemical modifications, such as acylation, alkylation, esterification, or amidification to produce structural analogs.

[0200] In one embodiment, the candidate bioactive agents are proteins. By “protein” herein is meant at least two covalently attached amino acids, which includes proteins, polypeptides, oligopeptides and peptides. The protein may be made up of naturally occurring amino acids and peptide bonds, or synthetic peptidomimetic structures. Thus “amino acid”, or “peptide residue”, as used herein means both naturally occurring and synthetic amino acids. For example, homo-phenylalanine, citrulline and norleucine are considered amino acids for the purposes of the invention. “Amino acid” also includes imino acid residues such as proline and hydroxyproline. The side chains may be in either the (R) or the (S) configuration. In the preferred embodiment, the amino acids are in the (S) or L-configuration. If non-naturally occurring side chains are used, non-amino acid substituents may be used, for example to prevent or retard in vivo degradations.

[0201] In a preferred embodiment, the candidate bioactive agents are naturally occurring proteins or fragments of naturally occurring proteins. Thus, for example, cellular extracts containing proteins, or random or directed digests of proteinaceous cellular extracts, may be used. In this way libraries of prokaryotic and eukaryotic proteins may be made for screening in the methods of the invention. Particularly preferred in this embodiment are libraries of bacterial, fungal, viral, and mammalian proteins, with the latter being preferred, and human proteins being especially preferred.

[0202] In another preferred embodiment, the candidate bioactive agents are peptides of from about 5 to about 30 amino acids, with from about 5 to about 20 amino acids being preferred, and from about 7 to about 15 being particularly preferred. The peptides may be digests of naturally occurring proteins as is outlined above, random peptides, or “biased” random peptides. By “randomized” or grammatical equivalents herein is meant that each nucleic acid and peptide consists of essentially random nucleotides and amino acids, respectively. Since generally these random peptides (or nucleic acids, discussed below) are chemically synthesized, they may incorporate any nucleotide or amino acid at any position. The synthetic process can be designed to generate randomized proteins or nucleic acids, to allow the formation of all or most of the possible combinations over the length of the sequence, thus forming a library of randomized candidate bioactive proteinaceous agents.

[0203] In one embodiment, the library is fully randomized, with no sequence preferences or constants at any position. In a preferred embodiment, the library is biased. That is, some positions within the sequence are either held constant, or are selected from a limited number of possibilities. For example, in a preferred embodiment, the nucleotides or amino acid residues are randomized within a defined class, for example, of hydrophobic amino acids, hydrophilic residues, sterically biased (either small or large) residues, towards the creation of nucleic acid binding domains, the creation of cysteines, for cross-linking, prolines for SH-3 domains, serines, threonines, tyrosines or histidines for phosphorylation sites, etc., or to purines, etc.

[0204] In one embodiment, the candidate bioactive agents are nucleic acids. As described generally for proteins, nucleic acid candidate bioactive agents may be naturally occurring nucleic acids, random nucleic acids, or “biased” random nucleic acids. In another embodiment, the candidate bioactive agents are organic chemical moieties, a wide variety of which are available in the literature.

[0205] In assays for testing alteration of the expression profile of one or more CA genes, after the candidate agent has been added and the cells allowed to incubate for some period of time, a nucleic acid sample containing the target sequences to be analyzed is prepared. The target sequence is prepared using known techniques (e.g., converted from RNA to labeled cDNA, as described above) and added to a suitable microarray. For example, an in vitro reverse transcription with labels covalently attached to the nucleosides is performed. Generally, the nucleic acids are labeled with a label as defined herein, especially with biotin-FITC or PE, Cy3 and Cy5.

[0206] As will be appreciated by those in the art, these assays can be direct hybridization assays or can comprise “sandwich assays”, which include the use of multiple probes, as is generally outlined in U.S. Pat. Nos. 5,681,702, 5,597,909, 5,545,730, 5,594,117, 5,591,584, 5,571,670, 5,580,731, 5,571,670, 5,591,584, 5,624,802, 5,635,352, 5,594,118, 5,359,100, 5,124,246 and 5,681,697, all of which are hereby incorporated by reference. In this embodiment, in general, the target nucleic acid is prepared as outlined above, and then added to the biochip comprising a plurality of nucleic acid probes, under conditions that allow the formation of a hybridization complex.

[0207] A variety of hybridization conditions may be used in the present invention, including high, moderate and low stringency conditions as outlined above. The assays are generally run under stringency conditions that allow formation of the label probe hybridization complex only in the presence of target. Stringency can be controlled by altering a step parameter that is a thermodynamic variable, including, but not limited to, temperature, formamide concentration, salt concentration, chaotropic salt concentration, pH, organic solvent concentration, etc. These parameters may also be used to control non-specific binding, as is generally outlined in U.S. Pat. No. 5,681,697. Thus it may be desirable to perform certain steps at higher stringency conditions to reduce non-specific binding.

[0208] The reactions outlined herein may be accomplished in a variety of ways, as will be appreciated by those in the art. Components of the reaction may be added simultaneously, or sequentially, in any order, with preferred embodiments outlined below. In addition, the reaction may include a variety of other reagents in the assays. These include reagents like salts, buffers, neutral proteins, e.g. albumin, detergents, etc which may be used to facilitate optimal hybridization and detection, and/or reduce non-specific or background interactions. Also reagents that otherwise improve the efficiency of the assay, such as protease inhibitors, nuclease inhibitors, anti-microbial agents, etc., may be used, depending on the sample preparation methods and purity of the target. In addition, either solid phase or solution based (i.e., kinetic PCR) assays may be used.

[0209] Once the assay is run, the data are analyzed to determine the expression levels, and changes in expression levels as between states, of individual genes, forming a gene expression profile.

[0210] In a preferred embodiment, as for the diagnosis and prognosis applications, having identified the differentially expressed gene(s) or mutated gene(s) important in any one state, screens can be run to test for alteration of the expression of the CA genes individually. That is, screening for modulation of regulation of expression of a single gene can be done. Thus, for example, in the case of target genes whose presence or absence is unique between two states, screening is done for modulators of the target gene expression.

[0211] In addition, screens can be done for novel genes that are induced in response to a candidate agent. After identifying a candidate agent based upon its ability to suppress a CA expression pattern leading to a normal expression pattern, or modulate a single CA gene expression profile so as to mimic the expression of the gene from normal tissue, a screen as described above can be performed to identify genes that are specifically modulated in response to the agent. Comparing expression profiles between normal tissue and agent treated CA tissue reveals genes that are not expressed in normal tissue or CA tissue, but are expressed in agent treated tissue. These agent specific sequences can be identified and used by any of the methods described herein for CA genes or proteins. In particular these sequences and the proteins they encode find use in marking or identifying agent-treated cells. In addition, antibodies can be raised against the agent-induced proteins and used to target novel therapeutics to the treated CA tissue sample.

[0212] Thus, in one embodiment, a candidate agent is administered to a population of CA cells, that thus has an associated CA expression profile. By “administration” or “contacting” herein is meant that the candidate agent is added to the cells in such a manner as to allow the agent to act upon the cell, whether by uptake and intracellular action, or by action at the cell surface. In some embodiments, nucleic acid encoding a proteinaceous candidate agent (i.e. a peptide) may be put into a viral construct such as a retroviral construct and added to the cell, such that expression of the peptide agent is accomplished; see PCT US97/01019, hereby expressly incorporated by reference.

[0213] Once the candidate agent has been administered to the cells, the cells can be washed if desired and are allowed to incubate under preferably physiological conditions for some period of time. The cells are then harvested and a new gene expression profile is generated, as outlined herein.

[0214] Thus, for example, CA tissue may be screened for agents that reduce or suppress the CA phenotype. A change in at least one gene of the expression profile indicates that the agent has an effect on CA activity. By defining such a signature for the CA phenotype, screens for new drugs that alter the phenotype can be devised. With this approach, the drug target need not be known and need not be represented in the original expression screening platform, nor does the level of transcript for the target protein need to change.

[0215] In a preferred embodiment, as outlined above, screens may be done on individual genes and gene products (proteins). That is, having identified a particular differentially expressed gene as important in a particular state, screening of modulators of either the expression of the gene or the gene product itself can be done. The gene products of differentially expressed genes are sometimes referred to herein as “CA proteins” or “CAP”. The CAP may be a fragment, or alternatively, be the full-length protein to the fragment encoded by the nucleic acids of Tables 1-64 (human genomic sequences of SEQ ID NOS: 6, 11, 17, 25, 37, 45, 53, 61, 71, 79, 89, 99, 120, 126, 134, 144, 153, 172, 183, 189, 197, 203, 211, 217, 227, 244, 264, 276, 294, 304, 314, 326, 340, 346, 364, 376, 390, 459, 475, 485, 499, and 507, and sequences of SEQ ID NOS: 7, 9, 12, 18, 26, 28, 30, 32, 38, 40, 46, 48, 54, 62, 64, 66, 72, 74, 80, 90, 92, 100, 102, 104, 106, 108, 121, 127, 129, 135, 137, 139, 145, 154, 156, 158, 173, 175, 184, 190, 192, 198, 204, 206, 212, 218, 220, 228, 230, 232, 234, 236, 245, 247, 249, 251, 253, 255, 265, 267, 269, 271, 277, 279, 281, 283, 285, 287, 295, 297, 299, 305, 307, 309, 315, 317, 327, 329, 331, 333, 335, 341, 347, 349, 351, 353, 355, 357, 365, 367, 369, 371, 377, 379, 381, 383, 385, 391, 460, 462, 464, 466, 468, 470, 476, 478, 480, 486, 488, 500, 502, and 508 corresponding to the human mRNAs generated therefrom). In a preferred embodiment, the CAP is selected from the human protein sequences shown in Tables 1-64 (of SEQ ID NOS: 8, 10, 13, 19, 27, 29, 31, 33, 39, 41, 47, 49, 55, 63, 65, 67, 73, 75, 81, 91, 93, 101, 103, 105, 107, 109, 122, 128, 130, 136, 138, 140, 146, 155, 157, 159, 174, 176, 185, 191, 193, 199, 205, 207, 213, 219, 221, 229, 231, 233, 235, 237, 246, 248, 250, 252, 254, 256, 266, 268, 270, 272, 278, 280, 282, 284, 286, 288, 296, 298, 300, 306, 308, 310, 316, 318, 328, 330, 332, 334, 336, 342, 348, 350, 352, 354, 356, 358, 366, 368, 370, 372, 378, 380, 382, 384, 386, 392, 461, 463, 465, 467, 469, 471, 477, 479, 481, 487, 489, 501, 503, and 509). In another embodiment, the sequences are sequence variants as further described herein.

[0216] Preferably, the CAP is a fragment approximately 14 to 24 amino acids in length. More preferably the fragment is a soluble fragment. Preferably, the fragment includes a non-transmembrane region. In a preferred embodiment, the fragment has an N-terminal Cys to aid in solubility. In one embodiment, the C-terminus of the fragment is kept as a free acid and the N-terminus is a free amine to aid in coupling, e.g., to a cysteine.

[0217] In one embodiment the CA proteins are conjugated to an immunogenic agent as discussed herein. In one embodiment the CA protein is conjugated to BSA.

[0218] In a preferred embodiment, screening is done to alter the biological function of the expression product of the CA gene. Again, having identified the importance of a gene in a particular state, screening for agents that bind and/or modulate the biological activity of the gene product can be run as is more fully outlined below.

[0219] In a preferred embodiment, screens are designed to first find candidate agents that can bind to CA proteins, and then these agents may be used in assays that evaluate the ability of the candidate agent to modulate the CAP activity and the cancer phenotype. Thus, as will be appreciated by those in the art, there are a number of different assays that may be run; binding assays and activity assays.

[0220] In a preferred embodiment, binding assays are done. In general, purified or isolated gene product is used; that is, the gene products of one or more CA nucleic acids are made. In general, this is done as is known in the art. For example, antibodies are generated to the protein gene products, and standard immunoassays are run to determine the amount of protein present. Alternatively, cells comprising the CA proteins can be used in the assays.

[0221] Thus, in a preferred embodiment, the methods comprise combining a CA protein and a candidate bioactive agent, and determining the binding of the candidate agent to the CA protein. Preferred embodiments utilize the human or mouse CA protein, although other mammalian proteins may also be used, for example for the development of animal models of human disease. In some embodiments, as outlined herein, variant or derivative CA proteins may be used.

[0222] Generally, in a preferred embodiment of the methods herein, the CA protein or the candidate agent is non-diffusably bound to an insoluble support having isolated sample receiving areas (e.g. a microtiter plate, an array, etc.). The insoluble support may be made of any composition to which the compositions can be bound, is readily separated from soluble material, and is otherwise compatible with the overall method of screening. The surface of such supports may be solid or porous and of any convenient shape. Examples of suitable insoluble supports include microtiter plates, arrays, membranes and beads. These are typically made of glass, plastic (e.g., polystyrene), polysaccharides, nylon or nitrocellulose, Teflon®, etc. Microtiter plates and arrays are especially convenient because a large number of assays can be carried out simultaneously, using small amounts of reagents and samples.

[0223] The particular manner of binding of the composition is not crucial so long as it is compatible with the reagents and overall methods of the invention, maintains the activity of the composition and is nondiffusable. Preferred methods of binding include the use of antibodies (which do not sterically block either the ligand binding site or activation sequence when the protein is bound to the support), direct binding to “sticky” or ionic supports, chemical crosslinking, the synthesis of the protein or agent on the surface, etc. Following binding of the protein or agent, excess unbound material is removed by washing. The sample receiving areas may then be blocked through incubation with bovine serum albumin (BSA), casein or other innocuous protein or other moiety.

[0224] In a preferred embodiment, the CA protein is bound to the support, and a candidate bioactive agent is added to the assay. Alternatively, the candidate agent is bound to the support and the CA protein is added. Novel binding agents include specific antibodies, non-natural binding agents identified in screens of chemical libraries, peptide analogs, etc. Of particular interest are screening assays for agents that have a low toxicity for human cells. A wide variety of assays may be used for this purpose, including labeled in vitro protein-protein binding assays, electrophoretic mobility shift assays, immunoassays for protein binding, functional assays (phosphorylation assays, etc.) and the like.

[0225] The determination of the binding of the candidate bioactive agent to the CA protein may be done in a number of ways. In a preferred embodiment, the candidate bioactive agent is labeled, and binding determined directly. For example, this may be done by attaching all or a portion of the CA protein to a solid support, adding a labeled candidate agent (for example a fluorescent label), washing off excess reagent, and determining whether the label is present on the solid support. Various blocking and washing steps may be utilized as is known in the art.

[0226] By “labeled” herein is meant that the compound is either directly or indirectly labeled with a label which provides a detectable signal, e.g. radioisotope, fluorescers, enzyme, antibodies, particles such as magnetic particles, chemiluminescers, or specific binding molecules, etc. Specific binding molecules include pairs, such as biotin and streptavidin, digoxin and antidigoxin etc. For the specific binding members, the complementary member would normally be labeled with a molecule which provides for detection, in accordance with known procedures, as outlined above. The label can directly or indirectly provide a detectable signal.

[0227] In some embodiments, only one of the components is labeled. For example, the proteins (or proteinaceous candidate agents) may be labeled at tyrosine positions using ¹²⁵I, or with fluorophores. Alternatively, more than one component may be labeled with different labels; using ¹²⁵I for the proteins, for example, and a fluorophore for the candidate agents.

[0228] In a preferred embodiment, the binding of the candidate bioactive agent is determined through the use of competitive binding assays. In this embodiment, the competitor is a binding moiety known to bind to the target molecule (i.e. CA protein), such as an antibody, peptide, binding partner, ligand, etc. Under certain circumstances, there may be competitive binding as between the bioactive agent and the binding moiety, with the binding moiety displacing the bioactive agent.

[0229] In one embodiment, the candidate bioactive agent is labeled. Either the candidate bioactive agent, or the competitor, or both, is added first to the protein for a time sufficient to allow binding, if present. Incubations may be performed at any temperature which facilitates optimal activity, typically between 4 and 40° C. Incubation periods are selected for optimum activity, but may also be optimized to facilitate rapid high throughput screening. Typically between 0.1 and 1 hour will be sufficient. Excess reagent is generally removed or washed away. The second component is then added, and the presence or absence of the labeled component is followed, to indicate binding.

[0230] In a preferred embodiment, the competitor is added first, followed by the candidate bioactive agent. Displacement of the competitor is an indication that the candidate bioactive agent is binding to the CA protein and thus is capable of binding to, and potentially modulating, the activity of the CA protein. In this embodiment, either component can be labeled. Thus, for example, if the competitor is labeled, the presence of label in the wash solution indicates displacement by the agent. Alternatively, if the candidate bioactive agent is labeled, the presence of the label on the support indicates displacement.

[0231] In an alternative embodiment, the candidate bioactive agent is added first, with incubation and washing, followed by the competitor. The absence of binding by the competitor may indicate that the bioactive agent is bound to the CA protein with a higher affinity. Thus, if the candidate bioactive agent is labeled, the presence of the label on the support, coupled with a lack of competitor binding, may indicate that the candidate agent is capable of binding to the CA protein.

[0232] In a preferred embodiment, the methods comprise differential screening to identity bioactive agents that are capable of modulating the activity of the CA proteins. In this embodiment, the methods comprise combining a CA protein and a competitor in a first sample. A second sample comprises a candidate bioactive agent, a CA protein and a competitor. The binding of the competitor is determined for both samples, and a change, or difference in binding between the two samples indicates the presence of an agent capable of binding to the CA protein and potentially modulating its activity. That is, if the binding of the competitor is different in the second sample relative to the first sample, the agent is capable of binding to the CA protein.

[0233] Alternatively, a preferred embodiment utilizes differential screening to identify drug candidates that bind to the native CA protein, but cannot bind to modified CA proteins. The structure of the CA protein may be modeled, and used in rational drug design to synthesize agents that interact with that site. Drug candidates that affect CA bioactivity are also identified by screening drugs for the ability to either enhance or reduce the activity of the protein.

[0234] Positive controls and negative controls may be used in the assays. Preferably all control and test samples are performed in at least triplicate to obtain statistically significant results. Incubation of all samples is for a time sufficient for the binding of the agent to the protein. Following incubation, all samples are washed free of non-specifically bound material and the amount of bound, generally labeled agent determined. For example, where a radiolabel is employed, the samples may be counted in a scintillation counter to determine the amount of bound compound.

[0235] A variety of other reagents may be included in the screening assays. These include reagents like salts, neutral proteins, e.g. albumin, detergents, etc which may be used to facilitate optimal protein-protein binding and/or reduce non-specific or background interactions. Also reagents that otherwise improve the efficiency of the assay, such as protease inhibitors, nuclease inhibitors, anti-microbial agents, etc., may be used. The mixture of components may be added in any order that provides for the requisite binding.

[0236] Screening for agents that modulate the activity of CA proteins may also be done. In a preferred embodiment, methods for screening for a bioactive agent capable of modulating the activity of CA proteins comprise the steps of adding a candidate bioactive agent to a sample of CA proteins, as above, and determining an alteration in the biological activity of CA proteins. “Modulating the activity of a CA protein” includes an increase in activity, a decrease in activity, or a change in the type or kind of activity present. Thus, in this embodiment, the candidate agent should both bind to CA proteins (although this may not be necessary), and alter its biological or biochemical activity as defined herein. The methods include both in vitro screening methods, as are generally outlined above, and in vivo screening of cells for alterations in the presence, distribution, activity or amount of CA proteins.

[0237] Thus, in this embodiment, the methods comprise combining a CA sample and a candidate bioactive agent, and evaluating the effect on CA activity. By “CA activity” or grammatical equivalents herein is meant one of the CA protein's biological activities, including, but not limited to, its role in tumorigenesis, including cell division, preferably in lymphatic tissue, cell proliferation, tumor growth and transformation of cells. In one embodiment, CA activity includes activation of or by a protein encoded by a nucleic acid of Tables 1-64. An inhibitor of CA activity is the inhibition of any one or more CA activities.

[0238] In a preferred embodiment, the activity of the CA protein is increased; in another preferred embodiment, the activity of the CA protein is decreased. Thus, bioactive agents that are antagonists are preferred in some embodiments, and bioactive agents that are agonists may be preferred in other embodiments.

[0239] In a preferred embodiment, the invention provides methods for screening for bioactive agents capable of modulating the activity of a CA protein. The methods comprise adding a candidate bioactive agent, as defined above, to a cell comprising CA proteins. Preferred cell types include almost any cell. The cells contain a recombinant nucleic acid that encodes a CA protein. In a preferred embodiment, a library of candidate agents is tested on a plurality of cells.

[0240] In one aspect, the assays are evaluated in the presence or absence or previous or subsequent exposure of physiological signals, for example hormones, antibodies, peptides, antigens, cytokines, growth factors, action potentials, pharmacological agents including chemotherapeutics, radiation, carcinogenics, or other cells (i.e. cell-cell contacts). In another example, the determinations are determined at different stages of the cell cycle process.

[0241] In this way, bioactive agents are identified. Compounds with pharmacological activity are able to enhance or interfere with the activity of the CA protein.

### APPLICATIONS OF THE INVENTION

[0242] In one embodiment, a method of inhibiting cancer cell division is provided. In another embodiment, a method of inhibiting tumor growth is provided. In a further embodiment, methods of treating cells or individuals with cancer are provided.

[0243] The method comprises administration of a cancer inhibitor. In particular embodiments, the cancer inhibitor is an antisense molecule, a pharmaceutical composition, a therapeutic agent or small molecule, or a monoclonal, polyclonal, chimeric or humanized antibody. In particular embodiments, a therapeutic agent is coupled with a an antibody, preferable a monoclonal antobody.

[0244] In other embodiments, methods for detection or diagnosis of cancer cells in an individual are provided. In particular embodiments, the diagnostic/detection agent is a small molecule that pereferentially binds to a CAP according to the invention. In one embodiment, the diagnostic/detection agent is an antibody, preferably a monoclonal antobody, preferably linked to a detectable agent.

[0245] In other embodiments of the invention, animal models and transgenic animals are provided, which find use in generating animal models of cancers, particularly lymphomas and carcinomas.

### (a) Antisense Molecules

[0246] In one embodiment, the cancer inhibitor is an antisense molecule. Antisense molecules as used herein include antisense or sense oligonucleotides comprising a single-stranded nucleic acid sequence (either RNA or DNA) capable of binding to target mRNA (sense) or DNA (antisense) sequences for cancer molecules. Antisense or sense oligonucleotides, according to the present invention, comprise a fragment generally at least about 14 nucleotides, preferably from about 14 to 30 nucleotides. The ability to derive an antisense or a sense oligonucleotide, based upon a cDNA sequence encoding a given protein is described in, for example, Stein and Cohen, Cancer Res. 48:2659, (1988) and van der Krol et al., BioTechniques 6:958, (1988).

[0247] Antisense molecules can be modified or unmodified RNA, DNA, or mixed polymer oligonucleotides. These molecules function by specifically binding to matching sequences resulting in inhibition of peptide synthesis (Wu-Pong, November 1994, BioPharm, 20-33) either by steric blocking or by activating an RNase H enzyme. Antisense molecules can also alter protein synthesis by interfering with RNA processing or transport from the nucleus into the cytoplasm (Mukhopadhyay & Roth, 1996, Crit. Rev. in Oncogenesis 7, 151-190). In addition, binding of single stranded DNA to RNA can result in nuclease-mediated degradation of the heteroduplex (Wu-Pong, supra). Backbone modified DNA chemistry which have thus far been shown to act as substrates for RNase H are phosphorothioates, phosphorodithioates, borontrifluoridates, and 2′-arabino and 2′-fluoro arabino-containing oligonucleotides.

[0248] Antisense molecules may be introduced into a cell containing the target nucleotide sequence by formation of a conjugate with a ligand binding molecule, as described in WO 91/04753. Suitable ligand binding molecules include, but are not limited to, cell surface receptors, growth factors, other cytokines, or other ligands that bind to cell surface receptors. Preferably, conjugation of the ligand binding molecule does not substantially interfere with the ability of the ligand binding molecule to bind to its corresponding molecule or receptor, or block entry of the sense or antisense oligonucleotide or its conjugated version into the cell. Alternatively, a sense or an antisense oligonucleotide may be introduced into a cell containing the target nucleic acid sequence by formation of an oligonucleotide-lipid complex, as described in WO 90/10448. It is understood that the use of antisense molecules or knock out and knock in models may also be used in screening assays as discussed above, in addition to methods of treatment.

### (b) RNA Interference

[0249] RNA interference refers to the process of sequence-specific post transcriptional gene silencing in animals mediated by short interfering RNAs (siRNA) (Fire et al., Nature, 391, 806 (1998)). The corresponding process in plants is referred to as post transcriptional gene silencing or RNA silencing and is also referred to as quelling in fingi. The presence of dsRNA in cells triggers the RNAi response though a mechanism that has yet to be fully characterized. This mechanism appears to be different from the interferon response that results from dsRNA mediated activation of protein kinase PKR and 2′,5′-oligoadenylate synthetase resulting in non-specific cleavage of mRNA by ribonuclease L. (reviewed in Sharp, P. A., RNA interference—2001, Genes & Development 15:485-490 (2001)).

[0250] Small interfering RNAs (siRNAs) are powerful sequence-specific reagents designed to suppress the expression of genes in cultured mammalian cells through a process known as RNA interference (RNAi). Elbashir, S. M. et al. Nature 411:494-498 (2001); Caplen, N. J. et al. Proc. Natl. Acad. Sci. USA 98:9742-9747 (2001); Harborth, J. et al. J Cell Sci. 114:4557-4565 (2001). The term “short interfering RNA” or “siRNA” refers to a double stranded nucleic acid molecule capable of RNA interference “RNAi”, (see Kreutzer et al., WO 00/44895; Zernicka-Goetz et al. WO 01/36646; Fire, WO 99/32619; Mello and Fire, WO 01/29058). As used herein, siRNA molecules are limited to RNA molecules but further encompasses chemically modified nucleotides and non-nucleotides. siRNA gene-targeting experiments have been carried out by transient siRNA transfer into cells (achieved by such classic methods as liposome-mediated transfection, electroporation, or microinjection).

[0251] Molecules of siRNA are 21- to 23-nucleotide RNAs, with characteristic 2- to 3-nucleotide 3′-overhanging ends resembling the RNase III processing products of long double-stranded RNAs (dsRNAs) that normally initiate RNAi. When introduced into a cell, they assemble with yet-to-be-identified proteins of an endonuclease complex (RNA-induced silencing complex), which then guides target mRNA cleavage. As a consequence of degradation of the targeted mRNA, cells with a specific phenotype characteristic of suppression of the corresponding protein product are obtained. The small size of siRNAs, compared with traditional antisense molecules, prevents activation of the dsRNA-inducible interferon system present in mammalian cells. This avoids the nonspecific phenotypes normally produced by dsRNA larger than 30 base pairs in somatic cells.

[0252] Intracellular transcription of small RNA molecules is achieved by cloning the siRNA templates into RNA polymerase III (Pol III) transcription units, which normally encode the small nuclear RNA (snRNA) U6 or the human RNase P RNA H1. Two approaches have been developed for expressing siRNAs: in the first, sense and antisense strands constituting the siRNA duplex are transcribed by individual promoters (Lee, N. S. et al. Nat. Biotechnol. 20, 500-505 (2002). Miyagishi, M. & Taira, K. Nat. Biotechnol. 20, 497-500 (2002).); in the second, siRNAs are expressed as fold-back stem-loop structures that give rise to siRNAs after intracellular processing (Paul, C. P. et al. Nat. Biotechnol. 20:505-508 (2002)). The endogenous expression of siRNAs from introduced DNA templates is thought to overcome some limitations of exogenous siRNA delivery, in particular the transient loss of phenotype. U6 and H1 RNA promoters are members of the type III class of Pol III promoters. (Paule, M. R. & White, R. J. Nucleic Acids Res. 28, 1283-1298 (2000)).

[0253] Co-expression of sense and antisense siRNAs mediate silencing of target genes, whereas expression of sense or antisense siRNA alone do not greatly affect target gene expression. Transfection of plasmid DNA, rather than synthetic siRNAs, may appear advantageous, considering the danger of RNase contamination and the costs of chemically synthesized siRNAs or siRNA transcription kits. Stable expression of siRNAs allows new gene therapy applications, such as treatment of persistent viral infections. Considering the high specificity of siRNAs, the approach also allows the targeting of disease-derived transcripts with point mutations, such as RAS or TP53 oncogene transcripts, without alteration of the remaining wild-type allele. Finally, by high-throughput sequence analysis of the various genomes, the DNA-based methodology may also be a cost-effective alternative for automated genome-wide loss-of-function phenotypic analysis, especially when combined with miniaturized array-based phenotypic screens. (Ziauddin, J. & Sabatini, D. M. Nature 411:107-110 (2001)).

[0254] The presence of long dsRNAs in cells stimulates the activity of a ribonuclease III enzyme referred to as dicer. Dicer is involved in the processing of the dsRNA into short pieces of dsRNA known as short interfering RNAs (siRNA) (Berstein et al., 2001, Nature, 409:363 (2001)). Short interfering RNAs derived from dicer activity are typically about 21-23 nucleotides in length and comprise about 19 base pair duplexes. Dicer has also been implicated in the excision of 21 and 22 nucleotide small temporal RNAs (stRNA) from precursor RNA of conserved structure that are implicated in translational control (Hutvagner et al., Science, 293, 834 (2001)). The RNAi response also features an endonuclease complex containing a siRNA, commonly referred to as an RNA-induced silencing complex (RISC), which mediates cleavage of single stranded RNA having sequence homologous to the siRNA. Cleavage of the target RNA takes place in the middle of the region complementary to the guide sequence of the siRNA duplex (Elbashir et al., Genes Dev., 15, 188 (2001)).

[0255] This invention provides an expression system comprising an isolated nucleic acid molecule comprising a sequence capable of specifically hybridizing to the CA sequences. In an embodiment, the nucleic acid molecule is capable of inhibiting the expression of the CA protein. A method of inhibiting expression of CA inside a cell by a vector-directed expression of a short RNA which short RNA can fold in itself and create a double strand RNA having CA mRNA sequence identity and able to trigger posttranscriptional gene silencing, or RNA interference (RNAi), of the CA gene inside the cell. In another method a short double strand RNA having CA mRNA sequence identity is delivered inside the cell to trigger posttranscriptional gene silencing, or RNAi, of the CA gene. In various embodiments, the nucleic acid molecule is at least a 7 mer, at least a 10 mer, or at least a 20 mer. In a further embodiment, the sequence is unique.

### (c) Pharmaceutical Compositions

[0256] Pharmaceutical compositions encompassed by the present invention include as active agent, the polypeptides, polynucleotides, antisense oligonucleotides, or antibodies of the invention disclosed herein in a therapeutically effective amount. An “effective amount” is an amount sufficient to effect beneficial or desired results, including clinical results. An effective amount can be administered in one or more administrations. For purposes of this invention, an effective amount of an adenoviral vector is an amount that is sufficient to palliate, ameliorate, stabilize, reverse, slow or delay the progression of the disease state.

[0257] The compositions can be used to treat cancer as well as metastases of primary cancer. In addition, the pharmaceutical compositions can be used in conjunction with conventional methods of cancer treatment, e.g., to sensitize tumors to radiation or conventional chemotherapy. The terms “treatment”, “treating”, “treat” and the like are used herein to generally refer to obtaining a desired pharmacologic and/or physiologic effect. The effect may be prophylactic in terms of completely or partially preventing a disease or symptom thereof and/or may be therapeutic in terms of a partial or complete stabilization or cure for a disease and/or adverse effect attributable to the disease. “Treatment” as used herein covers any treatment of a disease in a mammal, particularly a human, and includes: (a) preventing the disease or symptom from occurring in a subject which may be predisposed to the disease or symptom but has not yet been diagnosed as having it; (b) inhibiting the disease symptom, i.e., arresting its development; or (c) relieving the disease symptom, i.e., causing regression of the disease or symptom.

[0258] Where the pharmaceutical composition comprises an antibody that specifically binds to a gene product encoded by a differentially expressed polynucleotide, the antibody can be coupled to a drug for delivery to a treatment site or coupled to a detectable label to facilitate imaging of a site comprising cancer cells, such as prostate cancer cells. Methods for coupling antibodies to drugs and detectable labels are well known in the art, as are methods for imaging using detectable labels.

[0259] A “patient” for the purposes of the present invention includes both humans and other animals, particularly mammals, and organisms. Thus the methods are applicable to both human therapy and veterinary applications. In the preferred embodiment the patient is a mammal, and in the most preferred embodiment the patient is human.

[0260] The term “therapeutically effective amount” as used herein refers to an amount of a therapeutic agent to treat, ameliorate, or prevent a desired disease or condition, or to exhibit a detectable therapeutic or preventative effect. The effect can be detected by, for example, chemical markers or antigen levels. Therapeutic effects also include reduction in physical symptoms, such as decreased body temperature. The precise effective amount for a subject will depend upon the subject's size and health, the nature and extent of the condition, and the therapeutics or combination of therapeutics selected for administration. The effective amount for a given situation is determined by routine experimentation and is within the judgment of the clinician. For purposes of the present invention, an effective dose will generally be from about 0.01 mg/kg to about 5 mg/kg, or about 0.01 mg/kg to about 50 mg/kg or about 0.05 mg/kg to about 10 mg/kg of the compositions of the present invention in the individual to which it is administered.

[0261] A pharmaceutical composition can also contain a pharmaceutically acceptable carrier. The term “pharmaceutically acceptable carrier” refers to a carrier for administration of a therapeutic agent, such as antibodies or a polypeptide, genes, and other therapeutic agents. The term refers to any pharmaceutical carrier that does not itself induce the production of antibodies harmful to the individual receiving the composition, and which can be administered without undue toxicity. Suitable carriers can be large, slowly metabolized macromolecules such as proteins, polysaccharides, polylactic acids, polyglycolic acids, polymeric amino acids, amino acid copolymers, and inactive virus particles. Such carriers are well known to those of ordinary skill in the art. Pharmaceutically acceptable carriers in therapeutic compositions can include liquids such as water, saline, glycerol and ethanol. Auxiliary substances, such as wetting or emulsifying agents, pH buffering substances, and the like, can also be present in such vehicles. Typically, the therapeutic compositions are prepared as injectables, either as liquid solutions or suspensions; solid forms suitable for solution in, or suspension in, liquid vehicles prior to injection can also be prepared. Liposomes are included within the definition of a pharmaceutically acceptable carrier. Pharmaceutically acceptable salts can also be present in the pharmaceutical composition, e.g., mineral acid salts such as hydrochlorides, hydrobromides, phosphates, sulfates, and the like; and the salts of organic acids such as acetates, propionates, malonates, benzoates, and the like. A thorough discussion of pharmaceutically acceptable excipients is available in Remington: The Science and Practice of Pharmacy (1995) Alfonso Gennaro, Lippincott, Williams, & Wilkins.

[0262] The pharmaceutical compositions can be prepared in various forms, such as granules, tablets, pills, suppositories, capsules, suspensions, salves, lotions and the like. Pharmaceutical grade organic or inorganic carriers and/or diluents suitable for oral and topical use can be used to make up compositions containing the therapeutically-active compounds. Diluents known to the art include aqueous media, vegetable and animal oils and fats. Stabilizing agents, wetting and emulsifying agents, salts for varying the osmotic pressure or buffers for securing an adequate pH value, and skin penetration enhancers can be used as auxiliary agents.

[0263] The pharmaceutical compositions of the present invention comprise a CA protein in a form suitable for administration to a patient. In the preferred embodiment, the pharmaceutical compositions are in a water soluble form, such as being present as pharmaceutically acceptable salts, which is meant to include both acid and base addition salts. “Pharmaceutically acceptable acid addition salt” refers to those salts that retain the biological effectiveness of the free bases and that are not biologically or otherwise undesirable, formed with inorganic acids such as hydrochloric acid, hydrobromic acid, sulfuric acid, nitric acid, phosphoric acid and the like, and organic acids such as acetic acid, propionic acid, glycolic acid, pyruvic acid, oxalic acid, maleic acid, malonic acid, succinic acid, fumaric acid, tartaric acid, citric acid, benzoic acid, cinnamic acid, mandelic acid, methanesulfonic acid, ethanesulfonic acid, p-toluenesulfonic acid, salicylic acid and the like. “Pharmaceutically acceptable base addition salts” include those derived from inorganic bases such as sodium, potassium, lithium, ammonium, calcium, magnesium, iron, zinc, copper, manganese, aluminum salts and the like. Particularly preferred are the ammonium, potassium, sodium, calcium, and magnesium salts. Salts derived from pharmaceutically acceptable organic non-toxic bases include salts of primary, secondary, and tertiary amines, substituted amines including naturally occurring substituted amines, cyclic amines and basic ion exchange resins, such as isopropylamine, trimethylamine, diethylamine, triethylamine, tripropylamine, and ethanol amine.

[0264] The pharmaceutical compositions may also include one or more of the following: carrier proteins such as serum albumin; buffers; fillers such as microcrystalline cellulose, lactose, corn and other starches; binding agents; sweeteners and other flavoring agents; coloring agents; and polyethylene glycol. Additives are well known in the art, and are used in a variety of formulations.

[0265] The compounds having the desired pharmacological activity may be administered in a physiologically acceptable carrier to a host, as previously described. The agents may be administered in a variety of ways, orally, parenterally e.g., subcutaneously, intraperitoneally, intravascularly, etc. Depending upon the manner of introduction, the compounds may be formulated in a variety of ways. The concentration of therapeutically active compound in the formulation may vary from about 0.1-100% wgt/vol. Once formulated, the compositions contemplated by the invention can be (1) administered directly to the subject (e.g., as polynucleotide, polypeptides, small molecule agonists or antagonists, and the like); or (2) delivered ex vivo, to cells derived from the subject (e.g., as in ex vivo gene therapy). Direct delivery of the compositions will generally be accomplished by parenteral injection, e.g., subcutaneously, intraperitoneally, intravenously or intramuscularly, intratumoral or to the interstitial space of a tissue. Other modes of administration include oral and pulmonary administration, suppositories, and transdermal applications, needles, and gene guns or hyposprays. Dosage treatment can be a single dose schedule or a multiple dose schedule.

[0266] Methods for the ex vivo delivery and reimplantation of transformed cells into a subject are known in the art and described in e.g., International Publication No. WO 93/14778. Examples of cells useful in ex vivo applications include, for example, stem cells, particularly hematopoetic, lymph cells, macrophages, dendritic cells, or tumor cells. Generally, delivery of nucleic acids for both ex vivo and in vitro applications can be accomplished by, for example, dextran-mediated transfection, calcium phosphate precipitation, polybrene mediated transfection, protoplast fusion, electroporation, encapsulation of the polynucleotide(s) in liposomes, and direct microinjection of the DNA into nuclei, all well known in the art.

[0267] Once differential expression of a gene corresponding to a CA polynucleotide described herein has been found to correlate with a proliferative disorder, such as neoplasia, dysplasia, and hyperplasia, the disorder can be amenable to treatment by administration of a therapeutic agent based on the provided polynucleotide, corresponding polypeptide or other corresponding molecule (e.g., antisense, ribozyme, etc.). In other embodiments, the disorder can be amenable to treatment by administration of a small molecule drug that, for example, serves as an inhibitor (antagonist) of the function of the encoded gene product of a gene having increased expression in cancerous cells relative to normal cells or as an agonist for gene products that are decreased in expression in cancerous cells (e.g., to promote the activity of gene products that act as tumor suppressors).

[0268] The dose and the means of administration of the inventive pharmaceutical compositions are determined based on the specific qualities of the therapeutic composition, the condition, age, and weight of the patient, the progression of the disease, and other relevant factors. For example, administration of polynucleotide therapeutic compositions agents includes local or systemic administration, including injection, oral administration, particle gun or catheterized administration, and topical administration. Preferably, the therapeutic polynucleotide composition contains an expression construct comprising a promoter operably linked to a polynucleotide of at least 12, 22, 25, 30, or 35 contiguous nt of the polynucleotide disclosed herein. Various methods can be used to administer the therapeutic composition directly to a specific site in the body. For example, a small metastatic lesion is located and the therapeutic composition injected several times in several different locations within the body of tumor. Alternatively, arteries that serve a tumor are identified, and the therapeutic composition injected into such an artery, in order to deliver the composition directly into the tumor. A tumor that has a necrotic center is aspirated and the composition injected directly into the now empty center of the tumor. An antisense composition is directly administered to the surface of the tumor, for example, by topical application of the composition. X-ray imaging is used to assist in certain of the above delivery methods.

[0269] Targeted delivery of therapeutic compositions containing an antisense polynucleotide, subgenomic polynucleotides, or antibodies to specific tissues can also be used. Receptor-mediated DNA delivery techniques are described in, for example, Findeis et al., Trends Biotechnol. (1993) 11:202; Chiou et al., Gene Therapeutics: Methods And Applications Of Direct Gene Transfer (J. A. Wolff, ed.) (1994); Wu et al., J. Biol. Chem. (1988) 263:621; Wu et al., J. Biol. Chem. (1994) 269:542; Zenke et al., Proc. Natl. Acad. Sci. (USA) (1990) 87:3655; Wu et al., J. Biol. Chem. (1991) 266:338. Therapeutic compositions containing a polynucleotide are administered in a range of about 100 ng to about 200 mg of DNA for local administration in a gene therapy protocol. Concentration ranges of about 500 ng to about 50 mg, about 1 μg to about 2 mg, about 5 μg to about 500 μg, and about 20 μg to about 100 μg of DNA can also be used during a gene therapy protocol. Factors such as method of action (e.g., for enhancing or inhibiting levels of the encoded gene product) and efficacy of transformation and expression are considerations that will affect the dosage required for ultimate efficacy of the antisense subgenomic polynucleotides. Where greater expression is desired over a larger area of tissue, larger amounts of antisense subgenomic polynucleotides or the same amounts re-administered in a successive protocol of administrations, or several administrations to different adjacent or close tissue portions of, for example, a tumor site, may be required to effect a positive therapeutic outcome. In all cases, routine experimentation in clinical trials will determine specific ranges for optimal therapeutic effect.

[0270] The therapeutic polynucleotides and polypeptides of the present invention can be delivered using gene delivery vehicles. The gene delivery vehicle can be of viral or non-viral origin (see generally, Jolly, Cancer Gene Therapy (1994) 1:51; Kimura, Human Gene Therapy (1994) 5:845; Connelly, Human Gene Therapy (1995) 1:185; and Kaplitt, Nature Genetics (1994) 6:148). Expression of such coding sequences can be induced using endogenous mammalian or heterologous promoters. Expression of the coding sequence can be either constitutive or regulated.

[0271] Viral-based vectors for delivery of a desired polynucleotide and expression in a desired cell are well known in the art. Exemplary viral-based vehicles include, but are not limited to, recombinant retroviruses (see, e.g., WO 90/07936; WO 94/03622; WO 93/25698; WO 93/25234; U.S. Pat. No. 5,219,740; WO 93/11230; WO 93/10218; U.S. Pat. No. 4,777,127; GB Patent No. 2,200,651; EP 0 345 242; and WO 91/02805), alphavirus-based vectors (e.g., Sindbis virus vectors, Semliki forest virus (ATCC VR-67; ATCC VR-1247), Ross River virus (ATCC VR-373; ATCC VR-1246) and Venezuelan equine encephalitis virus (ATCC VR-923; ATCC VR-1250; ATCC VR 1249; ATCC VR-532)), and adeno-associated virus (AAV) vectors (see, e.g., WO 94/12649, WO 93/03769; WO 93/19191; WO 94/28938; WO 95/11984 and WO 95/00655). Administration of DNA linked to killed adenovirus as described in Curiel, Hum. Gene Ther. (1992) 3:147 can also be employed.

[0272] Non-viral delivery vehicles and methods can also be employed, including, but not limited to, polycationic condensed DNA linked or unlinked to killed adenovirus alone (see, e.g., Curiel, Hum. Gene Ther. (1992) 3:147); ligand-linked DNA (see, e.g., Wu, J. Biol. Chem. (1989) 264:16985); eukaryotic cell delivery vehicles cells (see, e.g., U.S. Pat. No. 5,814,482; WO 95/07994; WO 96/17072; WO 95/30763; and WO 97/42338) and nucleic charge neutralization or fusion with cell membranes. Naked DNA can also be employed. Exemplary naked DNA introduction methods are described in WO 90/11092 and U.S. Pat. No. 5,580,859. Liposomes that can act as gene delivery vehicles are described in U.S. Pat. No. 5,422,120; WO 95/13796; WO 94/23697; WO 91/14445; and EP 0524968. Additional approaches are described in Philip, Mol. Cell. Biol. (1994) 14:2411, and in Woffendin, Proc. Natl. Acad. Sci. (1994) 91:1581.

[0273] Further non-viral delivery suitable for use includes mechanical delivery systems such as the approach described in Woffendin et al., Proc. Natl. Acad. Sci. USA (1994) 91(24): 11581. Moreover, the coding sequence and the product of expression of such can be delivered through deposition of photopolymerized hydrogel materials or use of ionizing radiation (see, e.g., U.S. Pat. No. 5,206,152 and WO 92/11033). Other conventional methods for gene delivery that can be used for delivery of the coding sequence include, for example, use of hand-held gene transfer particle gun (see, e.g., U.S. Pat. No. 5,149,655); use of ionizing radiation for activating transferred gene (see, e.g., U.S. Pat. No. 5,206,152 and WO 92/11033).

[0274] The administration of the CA proteins and modulators of the present invention can be done in a variety of ways as discussed above, including, but not limited to, orally, subcutaneously, intravenously, intranasally, transdermally, intraperitoneally, intramuscularly, intrapulmonary, vaginally, rectally, or intraocularly. In some instances, for example, in the treatment of wounds and inflammation, the CA proteins and modulators may be directly applied as a solution or spray.

[0275] In a preferred embodiment, CA proteins and modulators are administered as therapeutic agents, and can be formulated as outlined above. Similarly, CA genes (including both the full-length sequence, partial sequences, or regulatory sequences of the CA coding regions) can be administered in gene therapy applications, as is known in the art. These CA genes can include antisense applications, either as gene therapy (i.e. for incorporation into the genome) or as antisense compositions, as will be appreciated by those in the art.

[0276] Thus, in one embodiment, methods of modulating CA gene activity in cells or organisms are provided. In one embodiment, the methods comprise administering to a cell an anti-CA antibody that reduces or eliminates the biological activity of an endogenous CA protein. Alternatively, the methods comprise administering to a cell or organism a recombinant nucleic acid encoding a CA protein. As will be appreciated by those in the art, this may be accomplished in any number of ways. In a preferred embodiment, for example when the CA sequence is down-regulated in cancer, the activity of the CA gene product is increased by increasing the amount of CA expression in the cell, for example by overexpressing the endogenous CA gene or by administering a gene encoding the CA sequence, using known gene-therapy techniques. In a preferred embodiment, the gene therapy techniques include the incorporation of the exogenous gene using enhanced homologous recombination (EHR), for example as described in PCT/US93/03868, hereby incorporated by reference in its entirety. Alternatively, for example when the CA sequence is up-regulated in cancer, the activity of the endogenous CA gene is decreased, for example by the administration of a CA antisense nucleic acid.

### (d) Vaccines

[0277] In a preferred embodiment, CA genes are administered as DNA vaccines, either single genes or combinations of CA genes. Naked DNA vaccines are generally known in the art. Brower, Nature Biotechnology, 16:1304-1305 (1998).

[0278] In one embodiment, CA genes of the present invention are used as DNA vaccines. Methods for the use of genes as DNA vaccines are well known to one of ordinary skill in the art, and include placing a CA gene or portion of a CA gene under the control of a promoter for expression in a patient with cancer. The CA gene used for DNA vaccines can encode full-length CA proteins, but more preferably encodes portions of the CA proteins including peptides derived from the CA protein. In a preferred embodiment a patient is immunized with a DNA vaccine comprising a plurality of nucleotide sequences derived from a CA gene. Similarly, it is possible to immunize a patient with a plurality of CA genes or portions thereof. Without being bound by theory, expression of the polypeptide encoded by the DNA vaccine, cytotoxic T-cells, helper T-cells and antibodies are induced that recognize and destroy or eliminate cells expressing CA proteins.

[0279] In a preferred embodiment, the DNA vaccines include a gene encoding an adjuvant molecule with the DNA vaccine. Such adjuvant molecules include cytokines that increase the immunogenic response to the CA polypeptide encoded by the DNA vaccine. Additional or alternative adjuvants are known to those of ordinary skill in the art and find use in the invention.

### (e) Antibodies

[0280] In one embodiment, a cancer inhibitor is an antibody as discussed above. In one embodiment, the CA proteins of the present invention may be used to generate polyclonal and monoclonal antibodies to CA proteins, which are useful as described herein. Similarly, the CA proteins can be coupled, using standard technology, to affinity chromatography columns. These columns may then be used to purify CA antibodies. In a preferred embodiment, the antibodies are generated to epitopes unique to a CA protein; that is, the antibodies show little or no cross-reactivity to other proteins. These antibodies find use in a number of applications. For example, the CA antibodies may be coupled to standard affinity chromatography columns and used to purify CA proteins. The antibodies may also be used therapeutically as blocking polypeptides, as outlined above, since they will specifically bind to the CA protein.

[0281] The present invention further provides methods for detecting the presence of and/or measuring a level of a polypeptide in a biological sample, which CA polypeptide is encoded by a CA polynucleotide that is differentially expressed in a cancer cell, using an antibody specific for the encoded polypeptide. The methods generally comprise: a) contacting the sample with an antibody specific for a polypeptide encoded by a CA polynucleotide that is differentially expressed in a prostate cancer cell; and b) detecting binding between the antibody and molecules of the sample.

[0282] Detection of specific binding of the antibody specific for the encoded cancer-associated polypeptide, when compared to a suitable control is an indication that encoded polypeptide is present in the sample. Suitable controls include a sample known not to contain the encoded CA polypeptide or known not to contain elevated levels of the polypeptide; such as normal tissue, and a sample contacted with an antibody not specific for the encoded polypeptide, e.g., an anti-idiotype antibody. A variety of methods to detect specific antibody-antigen interactions are known in the art and can be used in the method, including, but not limited to, standard immunohistological methods, immunoprecipitation, an enzyme immunoassay, and a radioimmunoassay. In general, the specific antibody will be detectably labeled, either directly or indirectly. Direct labels include radioisotopes; enzymes whose products are detectable (e.g., luciferase, β-galactosidase, and the like); fluorescent labels (e.g., fluorescein isothiocyanate, rhodamine, phycoerythrin, and the like); fluorescence emitting metals, e.g., ¹⁵²Eu, or others of the lanthanide series, attached to the antibody through metal chelating groups such as EDTA; chemiluminescent compounds, e.g., luminol, isoluminol, acridinium salts, and the like; bioluminescent compounds, e.g., luciferin, aequorin (green fluorescent protein), and the like. The antibody may be attached (coupled) to an insoluble support, such as a polystyrene plate or a bead. Indirect labels include second antibodies specific for antibodies specific for the encoded polypeptide (“first specific antibody”), wherein the second antibody is labeled as described above; and members of specific binding pairs, e.g., biotin-avidin, and the like. The biological sample may be brought into contact with and immobilized on a solid support or carrier, such as nitrocellulose, that is capable of immobilizing cells, cell particles, or soluble proteins. The support may then be washed with suitable buffers, followed by contacting with a detectably-labeled first specific antibody. Detection methods are known in the art and will be chosen as appropriate to the signal emitted by the detectable label. Detection is generally accomplished in comparison to suitable controls, and to appropriate standards.

[0283] In some embodiments, the methods are adapted for use in vivo, e.g., to locate or identify sites where cancer cells are present. In these embodiments, a detectably-labeled moiety, e.g., an antibody, which is specific for a cancer-associated polypeptide is administered to an individual (e.g., by injection), and labeled cells are located using standard imaging techniques, including, but not limited to, magnetic resonance imaging, computed tomography scanning, and the like. In this manner, cancer cells are differentially labeled.

### (f) Detection and Diagnosis of Cancers

[0284] Without being bound by theory, it appears that the various CA sequences are important in cancers. Accordingly, disorders based on mutant or variant CA genes may be determined. In one embodiment, the invention provides methods for identifying cells containing variant CA genes comprising determining all or part of the sequence of at least one endogenous CA genes in a cell. As will be appreciated by those in the art, this may be done using any number of sequencing techniques. In a preferred embodiment, the invention provides methods of identifying the CA genotype of an individual comprising determining all or part of the sequence of at least one CA gene of the individual. This is generally done in at least one tissue of the individual, and may include the evaluation of a number of tissues or different samples of the same tissue. The method may include comparing the sequence of the sequenced CA gene to a known CA gene, i.e., a wild-type gene. As will be appreciated by those in the art, alterations in the sequence of some CA genes can be an indication of either the presence of the disease, or propensity to develop the disease, or prognosis evaluations.

[0285] The sequence of all or part of the CA gene can then be compared to the sequence of a known CA gene to determine if any differences exist. This can be done using any number of known homology programs, such as Bestfit, etc. In a preferred embodiment, the presence of a difference in the sequence between the CA gene of the patient and the known CA gene is indicative of a disease state or a propensity for a disease state, as outlined herein.

[0286] In a preferred embodiment, the CA genes are used as probes to determine the number of copies of the CA gene in the genome. For example, some cancers exhibit chromosomal deletions or insertions, resulting in an alteration in the copy number of a gene.

[0287] In another preferred embodiment CA genes are used as probes to determine the chromosomal location of the CA genes. Information such as chromosomal location finds use in providing a diagnosis or prognosis in particular when chromosomal abnormalities such as translocations, and the like are identified in CA gene loci.

[0288] The present invention provides methods of using the polynucleotides described herein for detecting cancer cells, facilitating diagnosis of cancer and the severity of a cancer (e.g., tumor grade, tumor burden, and the like) in a subject, facilitating a determination of the prognosis of a subject, and assessing the responsiveness of the subject to therapy (e.g., by providing a measure of therapeutic effect through, for example, assessing tumor burden during or following a chemotherapeutic regimen). Detection can be based on detection of a polynucleotide that is differentially expressed in a cancer cell, and/or detection of a polypeptide encoded by a polynucleotide that is differentially expressed in a cancer cell. The detection methods of the invention can be conducted in vitro or in vivo, on isolated cells, or in whole tissues or a bodily fluid e.g., blood, plasma, serum, urine, and the like).

[0289] In some embodiments, methods are provided for detecting a cancer cell by detecting expression in the cell of a transcript that is differentially expressed in a cancer cell. Any of a variety of known methods can be used for detection, including, but not limited to, detection of a transcript by hybridization with a polynucleotide that hybridizes to a polynucleotide that is differentially expressed in a prostate cancer cell; detection of a transcript by a polymerase chain reaction using specific oligonucleotide primers; in situ hybridization of a cell using as a probe a polynucleotide that hybridizes to a gene that is differentially expressed in a prostate cancer cell. The methods can be used to detect and/or measure mRNA levels of a gene that is differentially expressed in a cancer cell. In some embodiments, the methods comprise: a) contacting a sample with a polynucleotide that corresponds to a differentially expressed gene described herein under conditions that allow hybridization; and b) detecting hybridization, if any.

[0290] Detection of differential hybridization, when compared to a suitable control, is an indication of the presence in the sample of a polynucleotide that is differentially expressed in a cancer cell. Appropriate controls include, for example, a sample that is known not to contain a polynucleotide that is differentially expressed in a cancer cell, and use of a labeled polynucleotide of the same “sense” as the polynucleotide that is differentially expressed in the cancer cell. Conditions that allow hybridization are known in the art, and have been described in more detail above. Detection can also be accomplished by any known method, including, but not limited to, in situ hybridization, PCR (polymerase chain reaction), RT-PCR (reverse transcription-PCR), TMA, bDNA, and Nasbau and “Northern” or RNA blotting, or combinations of such techniques, using a suitably labeled polynucleotide. A variety of labels and labeling methods for polynucleotides are known in the art and can be used in the assay methods of the invention. Specificity of hybridization can be determined by comparison to appropriate controls.

[0291] Polynucleotides generally comprising at least 10 nt, at least 12 nt or at least 15 contiguous nucleotides of a polynucleotide provided herein, such as, for example, those having the sequence as depicted in Tables 1-21, are used for a variety of purposes, such as probes for detection of and/or measurement of, transcription levels of a polynucleotide that is differentially expressed in a prostate cancer cell. As will be readily appreciated by the ordinarily skilled artisan, the probe can be detectably labeled and contacted with, for example, an array comprising immobilized polynucleotides obtained from a test sample (e.g., mRNA). Alternatively, the probe can be immobilized on an array and the test sample detectably labeled. These and other variations of the methods of the invention are well within the skill in the art and are within the scope of the invention.

[0292] Nucleotide probes are used to detect expression of a gene corresponding to the provided polynucleotide. In Northern blots, mRNA is separated electrophoretically and contacted with a probe. A probe is detected as hybridizing to an mRNA species of a particular size. The amount of hybridization can be quantitated to determine relative amounts of expression, for example under a particular condition. Probes are used for in situ hybridization to cells to detect expression. Probes can also be used in vivo for diagnostic detection of hybridizing sequences. Probes are typically labeled with a radioactive isotope. Other types of detectable labels can be used such as chromophores, fluorophores, and enzymes. Other examples of nucleotide hybridization assays are described in WO92/02526 and U.S. Pat. No. 5,124,246.

[0293] PCR is another means for detecting small amounts of target nucleic acids (see, e.g., Mullis et al., Meth. Enzymol. (1987) 155:335; U.S. Pat. No. 4,683,195; and U.S. Pat. No. 4,683,202). Two primer oligonucleotides that hybridize with the target nucleic acids are used to prime the reaction. The primers can be composed of sequence within or 3′ and 5′ to the CA polynucleotides disclosed herein. Alternatively, if the primers are 3′ and 5′ to these polynucleotides, they need not hybridize to them or the complements. After amplification of the target with a thermostable polymerase, the amplified target nucleic acids can be detected by methods known in the art, e.g., Southern blot. mRNA or cDNA can also be detected by traditional blotting techniques (e.g., Southern blot, Northern blot, etc.) described in Sambrook et al., “Molecular Cloning: A Laboratory Manual” (New York, Cold Spring Harbor Laboratory, 1989) (e.g., without PCR amplification). In general, mRNA or cDNA generated from mRNA using a polymerase enzyme can be purified and separated using gel electrophoresis, and transferred to a solid support, such as nitrocellulose. The solid support is exposed to a labeled probe, washed to remove any unhybridized probe, and duplexes containing the labeled probe are detected.

[0294] Methods using PCR amplification can be performed on the DNA from a single cell, although it is convenient to use at least about 10⁵ cells. The use of the polymerase chain reaction is described in Saiki et al. (1985) Science 239:487, and a review of current techniques may be found in Sambrook, et al. Molecular Cloning: A Laboratory Manual, CSH Press 1989, pp. 14.2-14.33. A detectable label may be included in the amplification reaction. Suitable detectable labels include fluorochromes, (e.g. fluorescein isothiocyanate (FITC), rhodamine, Texas Red, phycoerythrin, allophycocyanin, 6-carboxyfluorescein (6-FAM), 2′,7′-dimethoxy-4′,5′-dichloro-6-carboxyfluorescein, 6-carboxy-X-rhodamine (ROX), 6-carboxy-2′,4′,7′,4,7-hexachlorofluorescein (HEX), 5-carboxyfluorescein (5-FAM) or N,N,N′,N′-tetramethyl-6-carboxyrhodamine (TAMRA)), radioactive labels, (e.g. ³²P, ³⁵S, ³H, etc.), and the like. The label may be a two stage system, where the polynucleotides is conjugated to biotin, haptens, etc. having a high affinity binding partner, e.g. avidin, specific antibodies, etc., where the binding partner is conjugated to a detectable label. The label may be conjugated to one or both of the primers. Alternatively, the pool of nucleotides used in the amplification is labeled, so as to incorporate the label into the amplification product.

[0295] The detection methods can be provided as part of a kit. Thus, the invention further provides kits for detecting the presence and/or a level of a polynucleotide that is differentially expressed in a cancer cell (e.g., by detection of an mRNA encoded by the differentially expressed gene of interest), and/or a polypeptide encoded thereby, in a biological sample. Procedures using these kits can be performed by clinical laboratories, experimental laboratories, medical practitioners, or private individuals. The kits of the invention for detecting a polypeptide encoded by a polynucleotide that is differentially expressed in a cancer cell may comprise a moiety that specifically binds the polypeptide, which may be an antibody that binds the polypeptide or fragment thereof. The kits of the invention used for detecting a polynucleotide that is differentially expressed in a prostate cancer cell may comprise a moiety that specifically hybridizes to such a polynucleotide. The kit may optionally provide additional components that are useful in the procedure, including, but not limited to, buffers, developing reagents, labels, reacting surfaces, means for detection, control samples, standards, instructions, and interpretive information. Accordingly, the present invention provides kits for detecting prostate cancer comprising at least one of polynucleotides having the sequence as shown in Tables 1-64 or fragments thereof.

[0296] The present invention further relates to methods of detecting/diagnosing a neoplastic or preneoplastic condition in a mammal (for example, a human). “Diagnosis” as used herein generally includes determination of a subject's susceptibility to a disease or disorder, determination as to whether a subject is presently affected by a disease or disorder, prognosis of a subject affected by a disease or disorder (e.g., identification of pre-metastatic or metastatic cancerous states, stages of cancer, or responsiveness of cancer to therapy), and therametrics (e.g., monitoring a subject's condition to provide information as to the effect or efficacy of therapy).

[0297] The terms “treatment”, “treating”, “treat” and the like are used herein to generally refer to obtaining a desired pharmacologic and/or physiologic effect. The effect may be prophylactic in terms of completely or partially preventing a disease or symptom thereof and/or may be therapeutic in terms of a partial or complete stabilization or cure for a disease and/or adverse effect attributable to the disease. “Treatment” as used herein covers any treatment of a disease in a mammal, particularly a human, and includes: (a) preventing the disease or symptom from occurring in a subject which may be predisposed to the disease or symptom but has not yet been diagnosed as having it; (b) inhibiting the disease symptom, i.e., arresting its development; or (c) relieving the disease symptom, i.e., causing regression of the disease or symptom.

[0298] An “effective amount” is an amount sufficient to effect beneficial or desired results, including clinical results. An effective amount can be administered in one or more administrations.

[0299] A “cell sample” encompasses a variety of sample types obtained from an individual and can be used in a diagnostic or monitoring assay. The definition encompasses blood and other liquid samples of biological origin, solid tissue samples such as a biopsy specimen or tissue cultures or cells derived therefrom, and the progeny thereof. The definition also includes samples that have been manipulated in any way after their procurement, such as by treatment with reagents, solubilization, or enrichment for certain components, such as proteins or polynucleotides. The term “cell sample” encompasses a clinical sample, and also includes cells in culture, cell supernatants, cell lysates, serum, plasma, biological fluid, and tissue samples.

[0300] As used herein, the terms “neoplastic cells”, “neoplasia”, “tumor”, “tumor cells”, “cancer” and “cancer cells”, (used interchangeably) refer to cells which exhibit relatively autonomous growth, so that they exhibit an aberrant growth phenotype characterized by a significant loss of control of cell proliferation (i.e., de-regulated cell division). Neoplastic cells can be malignant or benign.

[0301] The terms “individual,” “subject,” “host,” and “patient,” are used interchangeably herein and refer to any mammalian subject for whom diagnosis, treatment, or therapy is desired, particularly humans. Other subjects may include cattle, dogs, cats, guinea pigs, rabbits, rats, mice, horses, and so on. Examples of conditions that can be detected/diagnosed in accordance with these methods include cancers. Polynucleotides corresponding to genes that exhibit the appropriate expression pattern can be used to detect cancer in a subject. For a review of markers of cancer, see, e.g., Hanahan et al. Cell 100:57-70 (2000).

[0302] One detection/diagnostic method comprises: (a) obtaining from a mammal (e.g., a human) a biological sample, (b) detecting the presence in the sample of a CA protein and (c) comparing the amount of product present with that in a control sample. In accordance with this method, the presence in the sample of elevated levels of a CA gene product indicates that the subject has a neoplastic or preneoplastic condition.

[0303] Biological samples suitable for use in this method include biological fluids such as serum, plasma, pleural effusions, urine and cerebro-spinal fluid, CSF, tissue samples (e.g., mammary tumor or prostate tissue slices) can also be used in the method of the invention, including samples derived from biopsies. Cell cultures or cell extracts derived, for example, from tissue biopsies can also be used.

[0304] The compound is preferably a binding protein, e.g., an antibody, polyclonal or monoclonal, or antigen binding fragment thereof, which can be labeled with a detectable marker (e.g., fluorophore, chromophore or isotope, etc). Where appropriate, the compound can be attached to a solid support such as a bead, plate, filter, resin, etc. Determination of formation of the complex can be effected by contacting the complex with a further compound (e.g., an antibody) that specifically binds to the first compound (or complex). Like the first compound, the further compound can be attached to a solid support and/or can be labeled with a detectable marker.

[0305] The identification of elevated levels of CA protein in accordance with the present invention makes possible the identification of subjects (patients) that are likely to benefit from adjuvant therapy. For example, a biological sample from a post primary therapy subject (e.g., subject having undergone surgery) can be screened for the presence of circulating CA protein, the presence of elevated levels of the protein, determined by studies of normal populations, being indicative of residual tumor tissue. Similarly, tissue from the cut site of a surgically removed tumor can be examined (e.g., by immunofluorescence), the presence of elevated levels of product (relative to the surrounding tissue) being indicative of incomplete removal of the tumor. The ability to identify such subjects makes it possible to tailor therapy to the needs of the particular subject. Subjects undergoing non-surgical therapy, e.g., chemotherapy or radiation therapy, can also be monitored, the presence in samples from such subjects of elevated levels of CA protein being indicative of the need for continued treatment. Staging of the disease (for example, for purposes of optimizing treatment regimens) can also be effected, for example, by biopsy e.g., with antibody specific for a CA protein.

### (g) Animal Models and Transgenics

[0306] In another preferred embodiment CA genes find use in generating animal models of cancers, particularly lymphomas and carcinomas. As is appreciated by one of ordinary skill in the art, when the CA gene identified is repressed or diminished in CA tissue, gene therapy technology wherein antisense RNA directed to the CA gene will also diminish or repress expression of the gene. An animal generated as such serves as an animal model of CA that finds use in screening bioactive drug candidates. Similarly, gene knockout technology, for example as a result of homologous recombination with an appropriate gene targeting vector, will result in the absence of the CA protein. When desired, tissue-specific expression or knockout of the CA protein may be necessary.

[0307] It is also possible that the CA protein is overexpressed in cancer. As such, transgenic animals can be generated that overexpress the CA protein. Depending on the desired expression level, promoters of various strengths can be employed to express the transgene. Also, the number of copies of the integrated transgene can be determined and compared for a determination of the expression level of the transgene. Animals generated by such methods find use as animal models of CA and are additionally useful in screening for bioactive molecules to treat cancer.

Characterization of CA sequences

[0308] The CA nucleic acid sequences of the invention are depicted in Tables 1-64. The sequences in each Table include genomic DNA sequence (mouse genomic sequences mDxx-yyy; human genomic sequences hDxx-yyy), sequence corresponding to the mRNA(s) generated therefrom (mRxx-yyy; hRxx-yyy) and amino acid sequences of the proteins (mPxx-yyy; hPxx-yyy) encoded by the mRNA for both mouse and human genes.

[0309] The mouse and human genomic DNA sequence, sequence corresponding to the mRNA(s) generated therefrom and amino acid sequences of the proteins as shown in Tables 1-64 are described according to SEQ ID NOS as follows in Table 65.

TABLE 65

| DESIGNATION | SEQ ID NO | TYPE OF SEQUENCE |
|---|---|---|
| mD7-234 | SEQ ID NO: 1 | MOUSE GENOMIC SEQUENCE |
| mR7-234.1 | SEQ ID NO: 2 | MOUSE mRNA SEQUENCE |
| mP7-234.1 | SEQ ID NO: 3 | MOUSE PROTEIN SEQUENCE |
| mR7-234.2 | SEQ ID NO: 4 | MOUSE mRNA SEQUENCE |
| mP7-234.2 | SEQ ID NO: 5 | MOUSE PROTEIN SEQUENCE |
| hD7-234 | SEQ ID NO: 6 | HUMAN GENOMIC SEQUENCE |
| hR7-234.1 | SEQ ID NO: 7 | HUMAN mRNA SEQUENCE |
| hP7-234.1 | SEQ ID NO: 8 | HUMAN PROTEIN SEQUENCE |
| hR7-234.2 | SEQ ID NO: 9 | HUMAN mRNA SEQUENCE |
| hP7-234.2 | SEQ ID NO: 10 | HUMAN PROTEIN SEQUENCE |
| hD7-234 | SEQ ID NO: 11 | HUMAN GENOMIC SEQUENCE |
| hR7-234.1 | SEQ ID NO: 12 | HUMAN mRNA SEQUENCE |
| hP7-234.1 | SEQ ID NO: 13 | HUMAN PROTEIN SEQUENCE |
| mD13-064 | SEQ ID NO: 14 | MOUSE GENOMIC SEQUENCE |
| mR13-064.1 | SEQ ID NO: 15 | MOUSE mRNA SEQUENCE |
| mP13-064.1 | SEQ ID NO: 16 | MOUSE PROTEIN SEQUENCE |
| hD13-064 | SEQ ID NO: 17 | HUMAN GENOMIC SEQUENCE |
| hR13-064.1 | SEQ ID NO: 18 | HUMAN mRNA SEQUENCE |
| hP13-064.1 | SEQ ID NO: 19 | HUMAN PROTEIN SEQUENCE |
| mD14-024 | SEQ ID NO: 20 | MOUSE GENOMIC SEQUENCE |
| mR14-024.1 | SEQ ID NO: 21 | MOUSE mRNA SEQUENCE |
| mP14-024.1 | SEQ ID NO: 22 | MOUSE PROTEIN SEQUENCE |
| mR14-024.2 | SEQ ID NO: 23 | MOUSE mRNA SEQUENCE |
| mP14-024.2 | SEQ ID NO: 24 | MOUSE PROTEIN SEQUENCE |
| hD14-024 | SEQ ID NO: 25 | HUMAN GENOMIC SEQUENCE |
| hR14-024.1 | SEQ ID NO: 26 | HUMAN mRNA SEQUENCE |
| hP14-024.1 | SEQ ID NO: 27 | HUMAN PROTEIN SEQUENCE |
| hR14-024.2 | SEQ ID NO: 28 | HUMAN mRNA SEQUENCE |
| hP14-024.2 | SEQ ID NO: 29 | HUMAN PROTEIN SEQUENCE |
| hR14-024.3 | SEQ ID NO: 30 | HUMAN mRNA SEQUENCE |
| hP14-024.3 | SEQ ID NO: 31 | HUMAN PROTEIN SEQUENCE |
| hR14-024.4 | SEQ ID NO: 32 | HUMAN mRNA SEQUENCE |
| hP14-024.4 | SEQ ID NO: 33 | HUMAN PROTEIN SEQUENCE |
| mD16-065 | SEQ ID NO: 34 | MOUSE GENOMIC SEQUENCE |
| mR16-065.1 | SEQ ID NO: 35 | MOUSE mRNA SEQUENCE |
| mP16-065.1 | SEQ ID NO: 36 | MOUSE PROTEIN SEQUENCE |
| hD16-065 | SEQ ID NO: 37 | HUMAN GENOMIC SEQUENCE |
| hR16-065.1 | SEQ ID NO: 38 | HUMAN mRNA SEQUENCE |
| hP16-065.1 | SEQ ID NO: 39 | HUMAN PROTEIN SEQUENCE |
| hR16-065.2 | SEQ ID NO: 40 | HUMAN mRNA SEQUENCE |
| hP16-065.2 | SEQ ID NO: 41 | HUMAN PROTEIN SEQUENCE |
| mD16-072 | SEQ ID NO: 42 | MOUSE GENOMIC SEQUENCE |
| mR16-072.1 | SEQ ID NO: 43 | MOUSE mRNA SEQUENCE |
| mP16-072.1 | SEQ ID NO: 44 | MOUSE PROTEIN SEQUENCE |
| hD16-072 | SEQ ID NO: 45 | HUMAN GENOMIC SEQUENCE |
| hR16-072.1 | SEQ ID NO: 46 | HUMAN mRNA SEQUENCE |
| hP16-072.1 | SEQ ID NO: 47 | HUMAN PROTEIN SEQUENCE |
| hR16-072.2 | SEQ ID NO: 48 | HUMAN mRNA SEQUENCE |
| hP16-072.2 | SEQ ID NO: 49 | HUMAN PROTEIN SEQUENCE |
| mD17-020 | SEQ ID NO: 50 | MOUSE GENOMIC SEQUENCE |
| mR17-020.1 | SEQ ID NO: 51 | MOUSE mRNA SEQUENCE |
| mP17-020.1 | SEQ ID NO: 52 | MOUSE PROTEIN SEQUENCE |
| hD17-020 | SEQ ID NO: 53 | HUMAN GENOMIC SEQUENCE |
| hR17-020.1 | SEQ ID NO: 54 | HUMAN mRNA SEQUENCE |
| hP17-020.1 | SEQ ID NO: 55 | HUMAN PROTEIN SEQUENCE |
| mD22-001 | SEQ ID NO: 56 | MOUSE GENOMIC SEQUENCE |
| mR22-001.1 | SEQ ID NO: 57 | MOUSE mRNA SEQUENCE |
| mP22-001.1 | SEQ ID NO: 58 | MOUSE PROTEIN SEQUENCE |
| mR22-001.2 | SEQ ID NO: 59 | MOUSE mRNA SEQUENCE |
| mP22-001.2 | SEQ ID NO: 60 | MOUSE PROTEIN SEQUENCE |
| hD22-001 | SEQ ID NO: 61 | HUMAN GENOMIC SEQUENCE |
| hR22-001.1 | SEQ ID NO: 62 | HUMAN mRNA SEQUENCE |
| hP22-001.1 | SEQ ID NO: 63 | HUMAN PROTEIN SEQUENCE |
| hR22-001.2 | SEQ ID NO: 64 | HUMAN mRNA SEQUENCE |
| hP22-001.2 | SEQ ID NO: 65 | HUMAN PROTEIN SEQUENCE |
| hR22-001.3 | SEQ ID NO: 66 | HUMAN mRNA SEQUENCE |
| hP22-001.3 | SEQ ID NO: 67 | HUMAN PROTEIN SEQUENCE |
| mD22-002 | SEQ ID NO: 68 | MOUSE GENOMIC SEQUENCE |
| mR22-002.1 | SEQ ID NO: 69 | MOUSE mRNA SEQUENCE |
| mP22-002.1 | SEQ ID NO: 70 | MOUSE PROTEIN SEQUENCE |
| hD22-002 | SEQ ID NO: 71 | HUMAN GENOMIC SEQUENCE |
| hR22-002.1 | SEQ ID NO: 72 | HUMAN mRNA SEQUENCE |
| hP22-002.1 | SEQ ID NO: 73 | HUMAN PROTEIN SEQUENCE |
| hR22-002.2 | SEQ ID NO: 74 | HUMAN mRNA SEQUENCE |
| hP22-002.2 | SEQ ID NO: 75 | HUMAN PROTEIN SEQUENCE |
| mD22-003 | SEQ ID NO: 76 | MOUSE GENOMIC SEQUENCE |
| mR22-003.1 | SEQ ID NO: 77 | MOUSE mRNA SEQUENCE |
| mP22-003.1 | SEQ ID NO: 78 | MOUSE PROTEIN SEQUENCE |
| hD22-003 | SEQ ID NO: 79 | HUMAN GENOMIC SEQUENCE |
| hR22-003.1 | SEQ ID NO: 80 | HUMAN mRNA SEQUENCE |
| hP22-003.1 | SEQ ID NO: 81 | HUMAN PROTEIN SEQUENCE |
| mD22-004 | SEQ ID NO: 82 | MOUSE GENOMIC SEQUENCE |
| mR22-004.1 | SEQ ID NO: 83 | MOUSE mRNA SEQUENCE |
| mP22-004.1 | SEQ ID NO: 84 | MOUSE PROTEIN SEQUENCE |
| mR22-004.2 | SEQ ID NO: 85 | MOUSE mRNA SEQUENCE |
| mP22-004.2 | SEQ ID NO: 86 | MOUSE PROTEIN SEQUENCE |
| mR22-004.3 | SEQ ID NO: 87 | MOUSE mRNA SEQUENCE |
| mP22-004.3 | SEQ ID NO: 88 | MOUSE PROTEIN SEQUENCE |
| hD22-004 | SEQ ID NO: 89 | HUMAN GENOMIC SEQUENCE |
| hR22-004.1 | SEQ ID NO: 90 | HUMAN mRNA SEQUENCE |
| hP22-004.1 | SEQ ID NO: 91 | HUMAN PROTEIN SEQUENCE |
| hR22-004.2 | SEQ ID NO: 92 | HUMAN mRNA SEQUENCE |
| hP22-004.2 | SEQ ID NO: 93 | HUMAN PROTEIN SEQUENCE |
| mD22-006 | SEQ ID NO: 94 | MOUSE GENOMIC SEQUENCE |
| mR22-006.1 | SEQ ID NO: 95 | MOUSE mRNA SEQUENCE |
| mP22-006.1 | SEQ ID NO: 96 | MOUSE PROTEIN SEQUENCE |
| mR22-006.2 | SEQ ID NO: 97 | MOUSE mRNA SEQUENCE |
| mP22-006.2 | SEQ ID NO: 98 | MOUSE PROTEIN SEQUENCE |
| hD22-006 | SEQ ID NO: 99 | HUMAN GENOMIC SEQUENCE |
| hR22-006.1 | SEQ ID NO: 100 | HUMAN mRNA SEQUENCE |
| hP22-006.1 | SEQ ID NO: 101 | HUMAN PROTEIN SEQUENCE |
| hR22-006.2 | SEQ ID NO: 102 | HUMAN mRNA SEQUENCE |
| hP22-006.2 | SEQ ID NO: 103 | HUMAN PROTEIN SEQUENCE |
| hR22-006.3 | SEQ ID NO: 104 | HUMAN mRNA SEQUENCE |
| hP22-006.3 | SEQ ID NO: 105 | HUMAN PROTEIN SEQUENCE |
| hR22-006.4 | SEQ ID NO: 106 | HUMAN mRNA SEQUENCE |
| hP22-006.4 | SEQ ID NO: 107 | HUMAN PROTEIN SEQUENCE |
| hR22-006.5 | SEQ ID NO: 108 | HUMAN mRNA SEQUENCE |
| hP22-006.5 | SEQ ID NO: 109 | HUMAN PROTEIN SEQUENCE |
| mD22-008 | SEQ ID NO: 110 | MOUSE GENOMIC SEQUENCE |
| mR22-008.1 | SEQ ID NO: 111 | MOUSE mRNA SEQUENCE |
| mP22-008.1 | SEQ ID NO: 112 | MOUSE PROTEIN SEQUENCE |
| mR22-008.2 | SEQ ID NO: 113 | MOUSE mRNA SEQUENCE |
| mP22-008.2 | SEQ ID NO: 114 | MOUSE PROTEIN SEQUENCE |
| mR22-008.3 | SEQ ID NO: 115 | MOUSE mRNA SEQUENCE |
| mP22-008.3 | SEQ ID NO: 116 | MOUSE PROTEIN SEQUENCE |
| mD22-009 | SEQ ID NO: 117 | MOUSE GENOMIC SEQUENCE |
| mR22-009.1 | SEQ ID NO: 118 | MOUSE mRNA SEQUENCE |
| mP22-009.1 | SEQ ID NO: 119 | MOUSE PROTEIN SEQUENCE |
| hD22-009 | SEQ ID NO: 120 | HUMAN GENOMIC SEQUENCE |
| hR22-009.1 | SEQ ID NO: 121 | HUMAN mRNA SEQUENCE |
| hP22-009.1 | SEQ ID NO: 122 | HUMAN PROTEIN SEQUENCE |
| mD22-010 | SEQ ID NO: 123 | MOUSE GENOMIC SEQUENCE |
| mR22-010.1 | SEQ ID NO: 124 | MOUSE mRNA SEQUENCE |
| mP22-010.1 | SEQ ID NO: 125 | MOUSE PROTEIN SEQUENCE |
| hD22-010 | SEQ ID NO: 126 | HUMAN GENOMIC SEQUENCE |
| hR22-010.1 | SEQ ID NO: 127 | HUMAN mRNA SEQUENCE |
| hP22-010.1 | SEQ ID NO: 128 | HUMAN PROTEIN SEQUENCE |
| hR22-010.2 | SEQ ID NO: 129 | HUMAN mRNA SEQUENCE |
| hP22-010.2 | SEQ ID NO: 130 | HUMAN PROTEIN SEQUENCE |
| mD22-012 | SEQ ID NO: 131 | MOUSE GENOMIC SEQUENCE |
| mR22-012.1 | SEQ ID NO: 132 | MOUSE mRNA SEQUENCE |
| mP22-012.1 | SEQ ID NO: 133 | MOUSE PROTEIN SEQUENCE |
| hD22-012 | SEQ ID NO: 134 | HUMAN GENOMIC SEQUENCE |
| hR22-012.1 | SEQ ID NO: 135 | HUMAN mRNA SEQUENCE |
| hP22-012.1 | SEQ ID NO: 136 | HUMAN PROTEIN SEQUENCE |
| hR22-012.2 | SEQ ID NO: 137 | HUMAN mRNA SEQUENCE |
| hP22-012.2 | SEQ ID NO: 138 | HUMAN PROTEIN SEQUENCE |
| hR22-012.3 | SEQ ID NO: 139 | HUMAN mRNA SEQUENCE |
| hP22-012.3 | SEQ ID NO: 140 | HUMAN PROTEIN SEQUENCE |
| mD22-013 | SEQ ID NO: 141 | MOUSE GENOMIC SEQUENCE |
| mR22-013.1 | SEQ ID NO: 142 | MOUSE mRNA SEQUENCE |
| mP22-013.1 | SEQ ID NO: 143 | MOUSE PROTEIN SEQUENCE |
| hD22-013 | SEQ ID NO: 144 | HUMAN GENOMIC SEQUENCE |
| hR22-013.1 | SEQ ID NO: 145 | HUMAN mRNA SEQUENCE |
| hP22-013.1 | SEQ ID NO: 146 | HUMAN PROTEIN SEQUENCE |
| mD22-014 | SEQ ID NO: 147 | MOUSE GENOMIC SEQUENCE |
| mR22-014.1 | SEQ ID NO: 148 | MOUSE mRNA SEQUENCE |
| mP22-014.1 | SEQ ID NO: 149 | MOUSE PROTEIN SEQUENCE |
| mD22-015 | SEQ ID NO: 150 | MOUSE GENOMIC SEQUENCE |
| mR22-015.1 | SEQ ID NO: 151 | MOUSE mRNA SEQUENCE |
| mP22-015.1 | SEQ ID NO: 152 | MOUSE PROTEIN SEQUENCE |
| hD22-015 | SEQ ID NO: 153 | HUMAN GENOMIC SEQUENCE |
| hR22-015.1 | SEQ ID NO: 154 | HUMAN mRNA SEQUENCE |
| hP22-015.1 | SEQ ID NO: 155 | HUMAN PROTEIN SEQUENCE |
| hR22-015.2 | SEQ ID NO: 156 | HUMAN mRNA SEQUENCE |
| hP22-015.2 | SEQ ID NO: 157 | HUMAN PROTEIN SEQUENCE |
| hR22-015.3 | SEQ ID NO: 158 | HUMAN mRNA SEQUENCE |
| hP22-015.3 | SEQ ID NO: 159 | HUMAN PROTEIN SEQUENCE |
| mD22-018 | SEQ ID NO: 160 | MOUSE GENOMIC SEQUENCE |
| mR22-018.1 | SEQ ID NO: 161 | MOUSE mRNA SEQUENCE |
| mP22-018.1 | SEQ ID NO: 162 | MOUSE PROTEIN SEQUENCE |
| mD22-019 | SEQ ID NO: 163 | MOUSE GENOMIC SEQUENCE |
| mR22-019.1 | SEQ ID NO: 164 | MOUSE mRNA SEQUENCE |
| mP22-019.1 | SEQ ID NO: 165 | MOUSE PROTEIN SEQUENCE |
| mR22-019.2 | SEQ ID NO: 166 | MOUSE mRNA SEQUENCE |
| mP22-019.2 | SEQ ID NO: 167 | MOUSE PROTEIN SEQUENCE |
| mR22-019.3 | SEQ ID NO: 168 | MOUSE mRNA SEQUENCE |
| mP22-019.3 | SEQ ID NO: 169 | MOUSE PROTEIN SEQUENCE |
| mR22-019.4 | SEQ ID NO: 170 | MOUSE mRNA SEQUENCE |
| mP22-019.4 | SEQ ID NO: 171 | MOUSE PROTEIN SEQUENCE |
| hD22-019 | SEQ ID NO: 172 | HUMAN GENOMIC SEQUENCE |
| hR22-019.1 | SEQ ID NO: 173 | HUMAN mRNA SEQUENCE |
| hP22-019.1 | SEQ ID NO: 174 | HUMAN PROTEIN SEQUENCE |
| hR22-019.2 | SEQ ID NO: 175 | HUMAN mRNA SEQUENCE |
| hP22-019.2 | SEQ ID NO: 176 | HUMAN PROTEIN SEQUENCE |
| mD22-020 | SEQ ID NO: 177 | MOUSE GENOMIC SEQUENCE |
| mR22-020.1 | SEQ ID NO: 178 | MOUSE mRNA SEQUENCE |
| mP22-020.1 | SEQ ID NO: 179 | MOUSE PROTEIN SEQUENCE |
| mD22-021 | SEQ ID NO: 180 | MOUSE GENOMIC SEQUENCE |
| mR22-021.1 | SEQ ID NO: 181 | MOUSE mRNA SEQUENCE |
| mP22-021.1 | SEQ ID NO: 182 | MOUSE PROTEIN SEQUENCE |
| hD22-021 | SEQ ID NO: 183 | HUMAN GENOMIC SEQUENCE |
| hR22-021.1 | SEQ ID NO: 184 | HUMAN mRNA SEQUENCE |
| hP22-021.1 | SEQ ID NO: 185 | HUMAN PROTEIN SEQUENCE |
| mD22-023 | SEQ ID NO: 186 | MOUSE GENOMIC SEQUENCE |
| mR22-023.1 | SEQ ID NO: 187 | MOUSE mRNA SEQUENCE |
| mP22-023.1 | SEQ ID NO: 188 | MOUSE PROTEIN SEQUENCE |
| hD22-023 | SEQ ID NO: 189 | HUMAN GENOMIC SEQUENCE |
| hR22-023.1 | SEQ ID NO: 190 | HUMAN mRNA SEQUENCE |
| hP22-023.1 | SEQ ID NO: 191 | HUMAN PROTEIN SEQUENCE |
| hR22-023.2 | SEQ ID NO: 192 | HUMAN mRNA SEQUENCE |
| hP22-023.2 | SEQ ID NO: 193 | HUMAN PROTEIN SEQUENCE |
| mD22-024 | SEQ ID NO: 194 | MOUSE GENOMIC SEQUENCE |
| mR22-024.1 | SEQ ID NO: 195 | MOUSE mRNA SEQUENCE |
| mP22-024.1 | SEQ ID NO: 196 | MOUSE PROTEIN SEQUENCE |
| hD22-024 | SEQ ID NO: 197 | HUMAN GENOMIC SEQUENCE |
| hR22-024.1 | SEQ ID NO: 198 | HUMAN mRNA SEQUENCE |
| hP22-024.1 | SEQ ID NO: 199 | HUMAN PROTEIN SEQUENCE |
| mD22-026 | SEQ ID NO: 200 | MOUSE GENOMIC SEQUENCE |
| mR22-026.1 | SEQ ID NO: 201 | MOUSE mRNA SEQUENCE |
| mP22-026.1 | SEQ ID NO: 202 | MOUSE PROTEIN SEQUENCE |
| hD22-026 | SEQ ID NO: 203 | HUMAN GENOMIC SEQUENCE |
| hR22-026.1 | SEQ ID NO: 204 | HUMAN mRNA SEQUENCE |
| hP22-026.1 | SEQ ID NO: 205 | HUMAN PROTEIN SEQUENCE |
| hR22-026.2 | SEQ ID NO: 206 | HUMAN mRNA SEQUENCE |
| hP22-026.2 | SEQ ID NO: 207 | HUMAN PROTEIN SEQUENCE |
| mD23-002 | SEQ ID NO: 208 | MOUSE GENOMIC SEQUENCE |
| mR23-002.1 | SEQ ID NO: 209 | MOUSE mRNA SEQUENCE |
| mP23-002.1 | SEQ ID NO: 210 | MOUSE PROTEIN SEQUENCE |
| hD23-002 | SEQ ID NO: 211 | HUMAN GENOMIC SEQUENCE |
| hR23-002.1 | SEQ ID NO: 212 | HUMAN mRNA SEQUENCE |
| hP23-002.1 | SEQ ID NO: 213 | HUMAN PROTEIN SEQUENCE |
| mD23-004 | SEQ ID NO: 214 | MOUSE GENOMIC SEQUENCE |
| mR23-004.1 | SEQ ID NO: 215 | MOUSE mRNA SEQUENCE |
| mP23-004.1 | SEQ ID NO: 216 | MOUSE PROTEIN SEQUENCE |
| hD23-004 | SEQ ID NO: 217 | HUMAN GENOMIC SEQUENCE |
| hR23-004.1 | SEQ ID NO: 218 | HUMAN mRNA SEQUENCE |
| hP23-004.1 | SEQ ID NO: 219 | HUMAN PROTEIN SEQUENCE |
| hR23-004.2 | SEQ ID NO: 220 | HUMAN mRNA SEQUENCE |
| hP23-004.2 | SEQ ID NO: 221 | HUMAN PROTEIN SEQUENCE |
| mD23-005 | SEQ ID NO: 222 | MOUSE GENOMIC SEQUENCE |
| mR23-005.1 | SEQ ID NO: 223 | MOUSE mRNA SEQUENCE |
| mP23-005.1 | SEQ ID NO: 224 | MOUSE PROTEIN SEQUENCE |
| mR23-005.2 | SEQ ID NO: 225 | MOUSE mRNA SEQUENCE |
| mP23-005.2 | SEQ ID NO: 226 | MOUSE PROTEIN SEQUENCE |
| hD23-005 | SEQ ID NO: 227 | HUMAN GENOMIC SEQUENCE |
| hR23-005.1 | SEQ ID NO: 228 | HUMAN mRNA SEQUENCE |
| hP23-005.1 | SEQ ID NO: 229 | HUMAN PROTEIN SEQUENCE |
| hR23-005.2 | SEQ ID NO: 230 | HUMAN mRNA SEQUENCE |
| hP23-005.2 | SEQ ID NO: 231 | HUMAN PROTEIN SEQUENCE |
| hR23-005.3 | SEQ ID NO: 232 | HUMAN mRNA SEQUENCE |
| hP23-005.3 | SEQ ID NO: 233 | HUMAN PROTEIN SEQUENCE |
| hR23-005.4 | SEQ ID NO: 234 | HUMAN mRNA SEQUENCE |
| hP23-005.4 | SEQ ID NO: 235 | HUMAN PROTEIN SEQUENCE |
| hR23-005.5 | SEQ ID NO: 236 | HUMAN mRNA SEQUENCE |
| hP23-005.5 | SEQ ID NO: 237 | HUMAN PROTEIN SEQUENCE |
| mD23-006 | SEQ ID NO: 238 | MOUSE GENOMIC SEQUENCE |
| mR23-006.1 | SEQ ID NO: 239 | MOUSE mRNA SEQUENCE |
| mP23-006.1 | SEQ ID NO: 240 | MOUSE PROTEIN SEQUENCE |
| mD23-008 | SEQ ID NO: 241 | MOUSE GENOMIC SEQUENCE |
| mR23-008.1 | SEQ ID NO: 242 | MOUSE mRNA SEQUENCE |
| mP23-008.1 | SEQ ID NO: 243 | MOUSE PROTEIN SEQUENCE |
| hD23-008 | SEQ ID NO: 244 | HUMAN GENOMIC SEQUENCE |
| hR23-008.1 | SEQ ID NO: 245 | HUMAN mRNA SEQUENCE |
| hP23-008.1 | SEQ ID NO: 246 | HUMAN PROTEIN SEQUENCE |
| hR23-008.2 | SEQ ID NO: 247 | HUMAN mRNA SEQUENCE |
| hP23-008.2 | SEQ ID NO: 248 | HUMAN PROTEIN SEQUENCE |
| hR23-008.3 | SEQ ID NO: 249 | HUMAN mRNA SEQUENCE |
| hP23-008.3 | SEQ ID NO: 250 | HUMAN PROTEIN SEQUENCE |
| hR23-008.4 | SEQ ID NO: 251 | HUMAN mRNA SEQUENCE |
| hP23-008.4 | SEQ ID NO: 252 | HUMAN PROTEIN SEQUENCE |
| hR23-008.5 | SEQ ID NO: 253 | HUMAN mRNA SEQUENCE |
| hP23-008.5 | SEQ ID NO: 254 | HUMAN PROTEIN SEQUENCE |
| hR23-008.6 | SEQ ID NO: 255 | HUMAN mRNA SEQUENCE |
| hP23-008.6 | SEQ ID NO: 256 | HUMAN PROTEIN SEQUENCE |
| mD23-009 | SEQ ID NO: 257 | MOUSE GENOMIC SEQUENCE |
| mR23-009.1 | SEQ ID NO: 258 | MOUSE mRNA SEQUENCE |
| mP23-009.1 | SEQ ID NO: 259 | MOUSE PROTEIN SEQUENCE |
| mR23-009.2 | SEQ ID NO: 260 | MOUSE mRNA SEQUENCE |
| mP23-009.2 | SEQ ID NO: 261 | MOUSE PROTEIN SEQUENCE |
| mR23-009.3 | SEQ ID NO: 262 | MOUSE mRNA SEQUENCE |
| mP23-009.3 | SEQ ID NO: 263 | MOUSE PROTEIN SEQUENCE |
| hD23-009 | SEQ ID NO: 264 | HUMAN GENOMIC SEQUENCE |
| hR23-009.1 | SEQ ID NO: 265 | HUMAN mRNA SEQUENCE |
| hP23-009.1 | SEQ ID NO: 266 | HUMAN PROTEIN SEQUENCE |
| hR23-009.2 | SEQ ID NO: 267 | HUMAN mRNA SEQUENCE |
| hP23-009.2 | SEQ ID NO: 268 | HUMAN PROTEIN SEQUENCE |
| hR23-009.3 | SEQ ID NO: 269 | HUMAN mRNA SEQUENCE |
| hP23-009.3 | SEQ ID NO: 270 | HUMAN PROTEIN SEQUENCE |
| hR23-009.4 | SEQ ID NO: 271 | HUMAN mRNA SEQUENCE |
| hP23-009.4 | SEQ ID NO: 272 | HUMAN PROTEIN SEQUENCE |
| mD23-011 | SEQ ID NO: 273 | MOUSE GENOMIC SEQUENCE |
| mR23-011.1 | SEQ ID NO: 274 | MOUSE mRNA SEQUENCE |
| mP23-011.1 | SEQ ID NO: 275 | MOUSE PROTEIN SEQUENCE |
| hD23-011 | SEQ ID NO: 276 | HUMAN GENOMIC SEQUENCE |
| hR23-011.1 | SEQ ID NO: 277 | HUMAN mRNA SEQUENCE |
| hP23-011.1 | SEQ ID NO: 278 | HUMAN PROTEIN SEQUENCE |
| hR23-011.2 | SEQ ID NO: 279 | HUMAN mRNA SEQUENCE |
| hP23-011.2 | SEQ ID NO: 280 | HUMAN PROTEIN SEQUENCE |
| hR23-011.3 | SEQ ID NO: 281 | HUMAN mRNA SEQUENCE |
| hP23-011.3 | SEQ ID NO: 282 | HUMAN PROTEIN SEQUENCE |
| hR23-011.4 | SEQ ID NO: 283 | HUMAN mRNA SEQUENCE |
| hP23-011.4 | SEQ ID NO: 284 | HUMAN PROTEIN SEQUENCE |
| hR23-011.5 | SEQ ID NO: 285 | HUMAN mRNA SEQUENCE |
| hP23-011.5 | SEQ ID NO: 286 | HUMAN PROTEIN SEQUENCE |
| hR23-011.6 | SEQ ID NO: 287 | HUMAN mRNA SEQUENCE |
| hP23-011.6 | SEQ ID NO: 288 | HUMAN PROTEIN SEQUENCE |
| mD23-012 | SEQ ID NO: 289 | MOUSE GENOMIC SEQUENCE |
| mR23-012.1 | SEQ ID NO: 290 | MOUSE mRNA SEQUENCE |
| mP23-012.1 | SEQ ID NO: 291 | MOUSE PROTEIN SEQUENCE |
| mR23-012.2 | SEQ ID NO: 292 | MOUSE mRNA SEQUENCE |
| mP23-012.2 | SEQ ID NO: 293 | MOUSE PROTEIN SEQUENCE |
| hD23-012 | SEQ ID NO: 294 | HUMAN GENOMIC SEQUENCE |
| hR23-012.1 | SEQ ID NO: 295 | HUMAN mRNA SEQUENCE |
| hP23-012.1 | SEQ ID NO: 296 | HUMAN PROTEIN SEQUENCE |
| hR23-012.2 | SEQ ID NO: 297 | HUMAN mRNA SEQUENCE |
| hP23-012.2 | SEQ ID NO: 298 | HUMAN PROTEIN SEQUENCE |
| hR23-012.3 | SEQ ID NO: 299 | HUMAN mRNA SEQUENCE |
| hP23-012.3 | SEQ ID NO: 300 | HUMAN PROTEIN SEQUENCE |
| mD23-014 | SEQ ID NO: 301 | MOUSE GENOMIC SEQUENCE |
| mR23-014.1 | SEQ ID NO: 302 | MOUSE mRNA SEQUENCE |
| mP23-014.1 | SEQ ID NO: 303 | MOUSE PROTEIN SEQUENCE |
| hD23-014 | SEQ ID NO: 304 | HUMAN GENOMIC SEQUENCE |
| hR23-014.1 | SEQ ID NO: 305 | HUMAN mRNA SEQUENCE |
| hP23-014.1 | SEQ ID NO: 306 | HUMAN PROTEIN SEQUENCE |
| hR23-014.2 | SEQ ID NO: 307 | HUMAN mRNA SEQUENCE |
| hP23-014.2 | SEQ ID NO: 308 | HUMAN PROTEIN SEQUENCE |
| hR23-014.3 | SEQ ID NO: 309 | HUMAN mRNA SEQUENCE |
| hP23-014.3 | SEQ ID NO: 310 | HUMAN PROTEIN SEQUENCE |
| mD24-002 | SEQ ID NO: 311 | MOUSE GENOMIC SEQUENCE |
| mR24-002.1 | SEQ ID NO: 312 | MOUSE mRNA SEQUENCE |
| mP24-002.1 | SEQ ID NO: 313 | MOUSE PROTEIN SEQUENCE |
| hD24-002 | SEQ ID NO: 314 | HUMAN GENOMIC SEQUENCE |
| hR24-002.1 | SEQ ID NO: 315 | HUMAN mRNA SEQUENCE |
| hP24-002.1 | SEQ ID NO: 316 | HUMAN PROTEIN SEQUENCE |
| hR24-002.2 | SEQ ID NO: 317 | HUMAN mRNA SEQUENCE |
| hP24-002.2 | SEQ ID NO: 318 | HUMAN PROTEIN SEQUENCE |
| mD24-003 | SEQ ID NO: 319 | MOUSE GENOMIC SEQUENCE |
| mR24-003.1 | SEQ ID NO: 320 | MOUSE mRNA SEQUENCE |
| mP24-003.1 | SEQ ID NO: 321 | MOUSE PROTEIN SEQUENCE |
| mR24-003.2 | SEQ ID NO: 322 | MOUSE mRNA SEQUENCE |
| mP24-003.2 | SEQ ID NO: 323 | MOUSE PROTEIN SEQUENCE |
| mR24-003.3 | SEQ ID NO: 324 | MOUSE mRNA SEQUENCE |
| mP24-003.3 | SEQ ID NO: 325 | MOUSE PROTEIN SEQUENCE |
| hD24-003 | SEQ ID NO: 326 | HUMAN GENOMIC SEQUENCE |
| hR24-003.1 | SEQ ID NO: 327 | HUMAN mRNA SEQUENCE |
| hP24-003.1 | SEQ ID NO: 328 | HUMAN PROTEIN SEQUENCE |
| hR24-003.2 | SEQ ID NO: 329 | HUMAN mRNA SEQUENCE |
| hP24-003.2 | SEQ ID NO: 330 | HUMAN PROTEIN SEQUENCE |
| hR24-003.3 | SEQ ID NO: 331 | HUMAN mRNA SEQUENCE |
| hP24-003.3 | SEQ ID NO: 332 | HUMAN PROTEIN SEQUENCE |
| hR24-003.4 | SEQ ID NO: 333 | HUMAN mRNA SEQUENCE |
| hP24-003.4 | SEQ ID NO: 334 | HUMAN PROTEIN SEQUENCE |
| hR24-003.5 | SEQ ID NO: 335 | HUMAN mRNA SEQUENCE |
| hP24-003.5 | SEQ ID NO: 336 | HUMAN PROTEIN SEQUENCE |
| mD24-005 | SEQ ID NO: 337 | MOUSE GENOMIC SEQUENCE |
| mR24-005.1 | SEQ ID NO: 338 | MOUSE mRNA SEQUENCE |
| mP24-005.1 | SEQ ID NO: 339 | MOUSE PROTEIN SEQUENCE |
| hD24-005 | SEQ ID NO: 340 | HUMAN GENOMIC SEQUENCE |
| hR24-005.1 | SEQ ID NO: 341 | HUMAN mRNA SEQUENCE |
| hP24-005.1 | SEQ ID NO: 342 | HUMAN PROTEIN SEQUENCE |
| mD24-007 | SEQ ID NO: 343 | MOUSE GENOMIC SEQUENCE |
| mR24-007.1 | SEQ ID NO: 344 | MOUSE mRNA SEQUENCE |
| mP24-007.1 | SEQ ID NO: 345 | MOUSE PROTEIN SEQUENCE |
| hD24-007 | SEQ ID NO: 346 | HUMAN GENOMIC SEQUENCE |
| hR24-007.1 | SEQ ID NO: 347 | HUMAN mRNA SEQUENCE |
| hP24-007.1 | SEQ ID NO: 348 | HUMAN PROTEIN SEQUENCE |
| hR24-007.2 | SEQ ID NO: 349 | HUMAN mRNA SEQUENCE |
| hP24-007.2 | SEQ ID NO: 350 | HUMAN PROTEIN SEQUENCE |
| hR24-007.3 | SEQ ID NO: 351 | HUMAN mRNA SEQUENCE |
| hP24-007.3 | SEQ ID NO: 352 | HUMAN PROTEIN SEQUENCE |
| hR24-007.4 | SEQ ID NO: 353 | HUMAN mRNA SEQUENCE |
| hP24-007.4 | SEQ ID NO: 354 | HUMAN PROTEIN SEQUENCE |
| hR24-007.5 | SEQ ID NO: 355 | HUMAN mRNA SEQUENCE |
| hP24-007.5 | SEQ ID NO: 356 | HUMAN PROTEIN SEQUENCE |
| hR24-007.6 | SEQ ID NO: 357 | HUMAN mRNA SEQUENCE |
| hP24-007.6 | SEQ ID NO: 358 | HUMAN PROTEIN SEQUENCE |
| mD24-008 | SEQ ID NO: 359 | MOUSE GENOMIC SEQUENCE |
| mR24-008.1 | SEQ ID NO: 360 | MOUSE mRNA SEQUENCE |
| mP24-008.1 | SEQ ID NO: 361 | MOUSE PROTEIN SEQUENCE |
| mR24-008.2 | SEQ ID NO: 362 | MOUSE mRNA SEQUENCE |
| mP24-008.2 | SEQ ID NO: 363 | MOUSE PROTEIN SEQUENCE |
| hD24-008 | SEQ ID NO: 364 | HUMAN GENOMIC SEQUENCE |
| hR24-008.1 | SEQ ID NO: 365 | HUMAN mRNA SEQUENCE |
| hP24-008.1 | SEQ ID NO: 366 | HUMAN PROTEIN SEQUENCE |
| hR24-008.2 | SEQ ID NO: 367 | HUMAN mRNA SEQUENCE |
| hP24-008.2 | SEQ ID NO: 368 | HUMAN PROTEIN SEQUENCE |
| hR24-008.3 | SEQ ID NO: 369 | HUMAN mRNA SEQUENCE |
| hP24-008.3 | SEQ ID NO: 370 | HUMAN PROTEIN SEQUENCE |
| hR24-008.4 | SEQ ID NO: 371 | HUMAN mRNA SEQUENCE |
| hP24-008.4 | SEQ ID NO: 372 | HUMAN PROTEIN SEQUENCE |
| mD25-001 | SEQ ID NO: 373 | MOUSE GENOMIC SEQUENCE |
| mR25-001.1 | SEQ ID NO: 374 | MOUSE mRNA SEQUENCE |
| mP25-001.1 | SEQ ID NO: 375 | MOUSE PROTEIN SEQUENCE |
| hD25-001 | SEQ ID NO: 376 | HUMAN GENOMIC SEQUENCE |
| hR25-001.1 | SEQ ID NO: 377 | HUMAN mRNA SEQUENCE |
| hP25-001.1 | SEQ ID NO: 378 | HUMAN PROTEIN SEQUENCE |
| hR25-001.2 | SEQ ID NO: 379 | HUMAN mRNA SEQUENCE |
| hP25-001.2 | SEQ ID NO: 380 | HUMAN PROTEIN SEQUENCE |
| hR25-001.3 | SEQ ID NO: 381 | HUMAN mRNA SEQUENCE |
| hP25-001.3 | SEQ ID NO: 382 | HUMAN PROTEIN SEQUENCE |
| hR25-001.4 | SEQ ID NO: 383 | HUMAN mRNA SEQUENCE |
| hP25-001.4 | SEQ ID NO: 384 | HUMAN PROTEIN SEQUENCE |
| hR25-001.5 | SEQ ID NO: 385 | HUMAN mRNA SEQUENCE |
| hP25-001.5 | SEQ ID NO: 386 | HUMAN PROTEIN SEQUENCE |
| mD25-002 | SEQ ID NO: 387 | MOUSE GENOMIC SEQUENCE |
| mR25-002.1 | SEQ ID NO: 388 | MOUSE mRNA SEQUENCE |
| mP25-002.1 | SEQ ID NO: 389 | MOUSE PROTEIN SEQUENCE |
| hD25-002 | SEQ ID NO: 390 | HUMAN GENOMIC SEQUENCE |
| hR25-002.1 | SEQ ID NO: 391 | HUMAN mRNA SEQUENCE |
| hP25-002.1 | SEQ ID NO: 392 | HUMAN PROTEIN SEQUENCE |
| mD25-003 | SEQ ID NO: 393 | MOUSE GENOMIC SEQUENCE |
| mR25-003.1 | SEQ ID NO: 394 | MOUSE mRNA SEQUENCE |
| mP25-003.1 | SEQ ID NO: 395 | MOUSE PROTEIN SEQUENCE |
| mD25-004 | SEQ ID NO: 396 | MOUSE GENOMIC SEQUENCE |
| mR25-004.1 | SEQ ID NO: 397 | MOUSE mRNA SEQUENCE |
| mP25-004.1 | SEQ ID NO: 398 | MOUSE PROTEIN SEQUENCE |
| mD25-005 | SEQ ID NO: 399 | MOUSE GENOMIC SEQUENCE |
| mR25-005.1 | SEQ ID NO: 400 | MOUSE mRNA SEQUENCE |
| mP25-005.1 | SEQ ID NO: 401 | MOUSE PROTEIN SEQUENCE |
| mD25-010 | SEQ ID NO: 402 | MOUSE GENOMIC SEQUENCE |
| mR25-010.1 | SEQ ID NO: 403 | MOUSE mRNA SEQUENCE |
| mP25-010.1 | SEQ ID NO: 404 | MOUSE PROTEIN SEQUENCE |
| mR25-010.2 | SEQ ID NO: 405 | MOUSE mRNA SEQUENCE |
| mP25-010.2 | SEQ ID NO: 406 | MOUSE PROTEIN SEQUENCE |
| mR25-010.3 | SEQ ID NO: 407 | MOUSE mRNA SEQUENCE |
| mP25-010.3 | SEQ ID NO: 408 | MOUSE PROTEIN SEQUENCE |
| mD25-011 | SEQ ID NO: 409 | MOUSE GENOMIC SEQUENCE |
| mR25-011.1 | SEQ ID NO: 410 | MOUSE mRNA SEQUENCE |
| mP25-011.1 | SEQ ID NO: 411 | MOUSE PROTEIN SEQUENCE |
| mR25-011.2 | SEQ ID NO: 412 | MOUSE mRNA SEQUENCE |
| mP25-011.2 | SEQ ID NO: 413 | MOUSE PROTEIN SEQUENCE |
| mR25-011.3 | SEQ ID NO: 414 | MOUSE mRNA SEQUENCE |
| mP25-011.3 | SEQ ID NO: 415 | MOUSE PROTEIN SEQUENCE |
| mR25-011.4 | SEQ ID NO: 416 | MOUSE mRNA SEQUENCE |
| mP25-011.4 | SEQ ID NO: 417 | MOUSE PROTEIN SEQUENCE |
| mD25-012 | SEQ ID NO: 418 | MOUSE GENOMIC SEQUENCE |
| mR25-012.1 | SEQ ID NO: 419 | MOUSE mRNA SEQUENCE |
| mP25-012.1 | SEQ ID NO: 420 | MOUSE PROTEIN SEQUENCE |
| mD25-014 | SEQ ID NO: 421 | MOUSE GENOMIC SEQUENCE |
| mR25-014.1 | SEQ ID NO: 422 | MOUSE mRNA SEQUENCE |
| mP25-014.1 | SEQ ID NO: 423 | MOUSE PROTEIN SEQUENCE |
| mR25-014.2 | SEQ ID NO: 424 | MOUSE mRNA SEQUENCE |
| mP25-014.2 | SEQ ID NO: 425 | MOUSE PROTEIN SEQUENCE |
| mD25-016 | SEQ ID NO: 426 | MOUSE GENOMIC SEQUENCE |
| mR25-016.1 | SEQ ID NO: 427 | MOUSE mRNA SEQUENCE |
| mP25-016.1 | SEQ ID NO: 428 | MOUSE PROTEIN SEQUENCE |
| mR25-016.2 | SEQ ID NO: 429 | MOUSE mRNA SEQUENCE |
| mP25-016.2 | SEQ ID NO: 430 | MOUSE PROTEIN SEQUENCE |
| mD25-018 | SEQ ID NO: 431 | MOUSE GENOMIC SEQUENCE |
| mR25-018.1 | SEQ ID NO: 432 | MOUSE mRNA SEQUENCE |
| mP25-018.1 | SEQ ID NO: 433 | MOUSE PROTEIN SEQUENCE |
| mD25-019 | SEQ ID NO: 434 | MOUSE GENOMIC SEQUENCE |
| mR25-019.1 | SEQ ID NO: 435 | MOUSE mRNA SEQUENCE |
| mP25-019.1 | SEQ ID NO: 436 | MOUSE PROTEIN SEQUENCE |
| mD25-020 | SEQ ID NO: 437 | MOUSE GENOMIC SEQUENCE |
| mR25-020.1 | SEQ ID NO: 438 | MOUSE mRNA SEQUENCE |
| mP25-020.1 | SEQ ID NO: 439 | MOUSE PROTEIN SEQUENCE |
| mD25-021 | SEQ ID NO: 440 | MOUSE GENOMIC SEQUENCE |
| mR25-021.1 | SEQ ID NO: 441 | MOUSE mRNA SEQUENCE |
| mP25-021.1 | SEQ ID NO: 442 | MOUSE PROTEIN SEQUENCE |
| mD25-022 | SEQ ID NO: 443 | MOUSE GENOMIC SEQUENCE |
| mR25-022.1 | SEQ ID NO: 444 | MOUSE mRNA SEQUENCE |
| mP25-022.1 | SEQ ID NO: 445 | MOUSE PROTEIN SEQUENCE |
| mD25-023 | SEQ ID NO: 446 | MOUSE GENOMIC SEQUENCE |
| mR25-023.1 | SEQ ID NO: 447 | MOUSE mRNA SEQUENCE |
| mP25-023.1 | SEQ ID NO: 448 | MOUSE PROTEIN SEQUENCE |
| mR25-023.2 | SEQ ID NO: 449 | MOUSE mRNA SEQUENCE |
| mP25-023.2 | SEQ ID NO: 450 | MOUSE PROTEIN SEQUENCE |
| mR25-023.3 | SEQ ID NO: 451 | MOUSE mRNA SEQUENCE |
| mP25-023.3 | SEQ ID NO: 452 | MOUSE PROTEIN SEQUENCE |
| mD25-024 | SEQ ID NO: 453 | MOUSE GENOMIC SEQUENCE |
| mR25-024.1 | SEQ ID NO: 454 | MOUSE mRNA SEQUENCE |
| mP25-024.1 | SEQ ID NO: 455 | MOUSE PROTEIN SEQUENCE |
| mD26-001 | SEQ ID NO: 456 | MOUSE GENOMIC SEQUENCE |
| mR26-001.1 | SEQ ID NO: 457 | MOUSE mRNA SEQUENCE |
| mP26-001.1 | SEQ ID NO: 458 | MOUSE PROTEIN SEQUENCE |
| hD26-001 | SEQ ID NO: 459 | HUMAN GENOMIC SEQUENCE |
| hR26-001.1 | SEQ ID NO: 460 | HUMAN mRNA SEQUENCE |
| hP26-001.1 | SEQ ID NO: 461 | HUMAN PROTEIN SEQUENCE |
| hR26-001.2 | SEQ ID NO: 462 | HUMAN mRNA SEQUENCE |
| hP26-001.2 | SEQ ID NO: 463 | HUMAN PROTEIN SEQUENCE |
| hR26-001.3 | SEQ ID NO: 464 | HUMAN mRNA SEQUENCE |
| hP26-001.3 | SEQ ID NO: 465 | HUMAN PROTEIN SEQUENCE |
| hR26-001.4 | SEQ ID NO: 466 | HUMAN mRNA SEQUENCE |
| hP26-001.4 | SEQ ID NO: 467 | HUMAN PROTEIN SEQUENCE |
| hR26-001.5 | SEQ ID NO: 468 | HUMAN mRNA SEQUENCE |
| hP26-001.5 | SEQ ID NO: 469 | HUMAN PROTEIN SEQUENCE |
| hR26-001.6 | SEQ ID NO: 470 | HUMAN mRNA SEQUENCE |
| hP26-001.6 | SEQ ID NO: 471 | HUMAN PROTEIN SEQUENCE |
| mD26-003 | SEQ ID NO: 472 | MOUSE GENOMIC SEQUENCE |
| mR26-003.1 | SEQ ID NO: 473 | MOUSE mRNA SEQUENCE |
| mP26-003.1 | SEQ ID NO: 474 | MOUSE PROTEIN SEQUENCE |
| hD26-003 | SEQ ID NO: 475 | HUMAN GENOMIC SEQUENCE |
| hR26-003.1 | SEQ ID NO: 476 | HUMAN mRNA SEQUENCE |
| hP26-003.1 | SEQ ID NO: 477 | HUMAN PROTEIN SEQUENCE |
| hR26-003.2 | SEQ ID NO: 478 | HUMAN mRNA SEQUENCE |
| hP26-003.2 | SEQ ID NO: 479 | HUMAN PROTEIN SEQUENCE |
| hR26-003.3 | SEQ ID NO: 480 | HUMAN mRNA SEQUENCE |
| hP26-003.3 | SEQ ID NO: 481 | HUMAN PROTEIN SEQUENCE |
| mD26-006 | SEQ ID NO: 482 | MOUSE GENOMIC SEQUENCE |
| mR26-006.1 | SEQ ID NO: 483 | MOUSE mRNA SEQUENCE |
| mP26-006.1 | SEQ ID NO: 484 | MOUSE PROTEIN SEQUENCE |
| hD26-006 | SEQ ID NO: 485 | HUMAN GENOMIC SEQUENCE |
| hR26-006.1 | SEQ ID NO: 486 | HUMAN mRNA SEQUENCE |
| hP26-006.1 | SEQ ID NO: 487 | HUMAN PROTEIN SEQUENCE |
| hR26-006.2 | SEQ ID NO: 488 | HUMAN mRNA SEQUENCE |
| hP26-006.2 | SEQ ID NO: 489 | HUMAN PROTEIN SEQUENCE |
| mD26-007 | SEQ ID NO: 490 | MOUSE GENOMIC SEQUENCE |
| mR26-007.1 | SEQ ID NO: 491 | MOUSE mRNA SEQUENCE |
| mP26-007.1 | SEQ ID NO: 492 | MOUSE PROTEIN SEQUENCE |
| mD26-008 | SEQ ID NO: 493 | MOUSE GENOMIC SEQUENCE |
| mR26-008.1 | SEQ ID NO: 494 | MOUSE mRNA SEQUENCE |
| mP26-008.1 | SEQ ID NO: 495 | MOUSE PROTEIN SEQUENCE |
| mD26-010 | SEQ ID NO: 496 | MOUSE GENOMIC SEQUENCE |
| mR26-010.1 | SEQ ID NO: 497 | MOUSE mRNA SEQUENCE |
| mP26-010.1 | SEQ ID NO: 498 | MOUSE PROTEIN SEQUENCE |
| hD26-010 | SEQ ID NO: 499 | HUMAN GENOMIC SEQUENCE |
| hR26-010.1 | SEQ ID NO: 500 | HUMAN mRNA SEQUENCE |
| hP26-010.1 | SEQ ID NO: 501 | HUMAN PROTEIN SEQUENCE |
| hR26-010.2 | SEQ ID NO: 502 | HUMAN mRNA SEQUENCE |
| hP26-010.2 | SEQ ID NO: 503 | HUMAN PROTEIN SEQUENCE |
| mD26-011 | SEQ ID NO: 504 | MOUSE GENOMIC SEQUENCE |
| mR26-011.1 | SEQ ID NO: 505 | MOUSE mRNA SEQUENCE |
| mP26-011.1 | SEQ ID NO: 506 | MOUSE PROTEIN SEQUENCE |
| hD26-011 | SEQ ID NO: 507 | HUMAN GENOMIC SEQUENCE |
| hR26-011.1 | SEQ ID NO: 508 | HUMAN mRNA SEQUENCE |
| hP26-011.1 | SEQ ID NO: 509 | HUMAN PROTEIN SEQUENCE |
| mD26-012 | SEQ ID NO: 510 | MOUSE GENOMIC SEQUENCE |
| mR26-012.1 | SEQ ID NO: 511 | MOUSE mRNA SEQUENCE |
| mP26-012.1 | SEQ ID NO: 512 | MOUSE PROTEIN SEQUENCE |
| mR26-012.2 | SEQ ID NO: 513 | MOUSE mRNA SEQUENCE |
| mP26-012.2 | SEQ ID NO: 514 | MOUSE PROTEIN SEQUENCE |

[0310] The CA sequences were analyzed by Panther™ (Molecular Diagnostics, Palo Alto, Calif.) software designed to detect homologs and enable prediction of molecular function through a system for protein functional classification. Human Gene Ontlogy annotations were prepared in accordance with the Gene Ontology Consortium (Gene Ontology: tool for the unification of biology. The Gene Ontology Consortium Nature Genet. 25: 25-29 (2000)). Similar analysis was carried out by determining IPR information regarding the CA polypeptides from InterPro, which is an integrated documentation resource for protein families, domains and functional sites (Apweiler at al. Bioinformatics 16(12): 1145-1150 (2000)).

[0311] The CA sequences may be classified according to the predicted general classifications of function by Panther™ analysis, human gene ontology and IPR domain information shown in Tables 1-64 for polypeptides having SEQ ID NOS: 8, 10, 13, 19, 27, 29, 31, 33, 39, 41, 47, 49, 55, 63, 65, 67, 73, 75, 81, 91, 93, 101, 103, 105, 107, 109, 122, 128, 130, 136, 138, 140, 146, 155, 157, 159, 174, 176, 185, 191, 193, 199, 205, 207, 213, 219, 221, 229, 231, 233, 235, 237, 246, 248, 250, 252, 254, 256, 266, 268, 270, 272, 278, 280, 282, 284, 286, 288, 296, 298, 300, 306, 308, 310, 316, 318, 328, 330, 332, 334, 336, 342, 348, 350, 352, 354, 356, 358, 366, 368, 370, 372, 378, 380, 382, 384, 386, 392, 461, 463, 465, 467, 469, 471, 477, 479, 481, 487, 489, 501, 503, and 509.

[0312] Certain aspects of the present invention are described in greater detail in the non-limiting examples that follow.

### EXAMPLES

[0313] The following examples are put forth so as to provide those of ordinary skill in the art with a complete disclosure and description of how to make and use the present invention, and are not intended to limit the scope of what the inventors regard as their invention nor are they intended to represent that the experiments below are all and only experiments performed. Efforts have been made to ensure accuracy with respect to numbers used (e.g. amounts, temperature, etc.) but some experimental errors and deviations should be accounted for. Unless indicated otherwise, parts are parts by weight, molecular weight is weight average molecular weight, temperature is in degrees Celsius, and pressure is at or near atmospheric.

### Example 1

### Insertion Site Analysis Following Tumor Induction in Mice

[0314] Tumors are induced in mice using either mouse mammary tumor virus (MMTV) or murine leukemia virus (MLV). MMTV causes mammary adenocarcinomas and MLV causes a variety of different hematopoetic malignancies (primarily T- or B-cell lymphomas). Three routes of infection are used: (1) injection of neonates with purified virus preparations, (2) infection by milk-borne virus during nursing, and (3) genetic transmission of pathogenic proviruses via the germ-line (Akvr1 and/or Mtv2). The type of malignancy present in each affected mouse is determined by histological analysis of H&E-stained thin sections of formalin-fixed, paraffin-embedded biopsy samples. Host DNA sequences flanking all clonally-integrated proviruses in each tumor are recovered by nested anchored-PCR using two virus-specific primers and two primers specific for a 40 bp double stranded DNA anchor ligated to restriction enzyme digested tumor DNA. Amplified bands representing host/virus junction fragments are cloned and sequenced. Then the host sequences (called “tags”) are used to BLAST analyze the Celera mouse genomic sequence. For each individual tag, three parameters are recorded: (1) the mouse chromosome assignment, (2) base pair coordinates at which the integration occurred, and (3) provirus orientation. Using this information, all available tags from all analyzed tumors are mapped to the mouse genome. To identify the protooncogene targets of provirus insertion mutation, the provirus integration pattern at each cluster of integrants is analyzed relative to the locations of all known genes in the transcriptome. The presence of provirus at the same locus in two or more independent tumors is prima facie evidence that a protooncogene is present at or very near the proviral integration sites. This is because the genome is too large for random integrations to result in observable clustering. Any clustering that is detected is unequivocal evidence for biological selection during tumorigenesis. In order to identify the human orthologs of the protooncogene targets of provirus insertion mutation, a comparative analysis of syntenic regions of the mouse and human genomes is performed.

[0315] An example of PCR amplification of host/virus junction fragments is presented in FIG. 1. Lane 1 contains the amplification products from normal control DNA and lane 2 contains the amplification products from tumor DNA. The bands result from 5′ host/virus junction fragments present in the DNA samples. Lane 1 has bands from the env/3′ LTR junctions from all proviruses (upper) and the host/5′ LTR from the pathogenic endogenous Mtv2 provirus present in this particular mouse strain. This endogenous provirus is detected because its sequence is identical to the new clonally integrated proviruses in the tumor. All four new clonally integrated proviruses known to be in this tumor are readily detected.

### Example 2

### Analysis of Quantitative RT-PCR: Comparative C_{T} Method

[0316] The expression level of target genes is quantified using the ABI PRISM 7900HT Sequence Detection System (Applied Biosystems, California). The method is based on the quantitation of the initial copy number of target template in comparison to that of a reference (normalizer) housekeeper gene (Pre-Developed TaqMan® Assay Reagents Gene Expression Quantification Protocol, Applied Biosystems, 2001). Accumulation of DNA product with each PCR cycle is related to amplicon efficiency and the initial template concentration. Therefore the amplification efficiency of both the target and the normalizer must be approximately equal. The threshold cycle (C_{T}), which is dependent on the starting template copy number and the DNA amplification efficiency, is a PCR cycle during which PCR product growth is exponential. With a similar dynamic range for the target and normalizer, the comparative C_{T} method is applicable.

[0317] An example of the comparative C_{T} method of gene expression for quantitative RT-PCR is shown in FIG. 2. In the first step, assays are performed in quadruplicate on a normal tissue and several sample tissues. In these tissues, the means and standard deviations of C_{T} values are determined for housekeeper genes (chosen as controls if shown to be biologically stable among various samples, irrespective of disease state) and for the target gene. FIG. 2 shows an example of average C_{T} values for a housekeeper gene and target gene. These values can fall within a range from upper teens to 40 depending on the intrinsic expression level of the gene in the particular tissue. The coefficient of variance of all replicate sets cannot exceed 1.5%.

[0318] An assessment of how the ΔC_{T} changes with template dilution verifies that the efficiencies of the target and housekeeper amplicons are approximately equal if the log input amount of template RNA versus ΔC_{T} plot has a slope <0.10. With the relative efficiencies verified for target and housekeeper, the ΔΔC_{T} comparative calculation becomes valid, as mentioned above. An example of the calculated difference between the C_{T} values of target and housekeeper genes (ΔC_{T}) for various samples is shown in FIG. 3. The ΔΔC_{T} is calculated for each sample by subtracting its ΔC_{T} value from the ΔC_{T} value of the baseline (calibrator) sample. If the expression is increased in some samples and decreased in others, ΔΔC_{T} will be a mixture of negative and positive values. The final step in the calculation is to transform these values to absolute values. The formula for this is:

Comparative expression level=2^{-ΔCT}

[0319] The final value for the calibrator should always be one. FIG. 4 shows the ΔΔC_{T} and comparative expression level for each sample from FIG. 3.

### Example 3

### Detection of Elevated Levels of cDNA Associated with Cancer Using Arrays

[0320] cDNA sequences representing a variety of candidate CA genes to be screened for differential expression in cancer are assayed by hybridization on polynucleotide arrays. The cDNA sequences include cDNA clones isolated from cell lines or tissues of interest. The cDNA sequences analyzed also include polynucleotides comprising sequence overlap with sequences in the Unigene database, and which encode a variety of gene products of various origins, functionality, and levels of characterization. cDNAs are spotted onto reflective slides (Amersham) according to methods well known in the art at a density of 9,216 spots per slide representing 4,068 sequences (including controls) spotted in duplicate, with approximately 0.8 μl of an approximately 200 ng/μl solution of cDNA.

[0321] PCR products of selected cDNA clones corresponding to the gene products of interest are prepared in a 50% DMSO solution. These PCR products are spotted onto Amersham aluminum microarray slides at a density of 9216 clones per array using a Molecular Dynamics Generation III spotting robot. Clones are spotted in duplicate, for a total of 4608 different sequences per chip.

[0322] cDNA probes are prepared from total RNA obtained by laser capture microdissection (LCM, Arcturus Enginering Inc., Mountain View, Calif.) of tumor tissue samples and normal tissue samples isolated from patients.

[0323] Total RNA is first reverse transcribed into cDNA using a primer containing a T7 RNA polymerase promoter, followed by second strand DNA synthesis. cDNA is then transcribed in vitro to produce antisense RNA using the T7 promoter-mediated expression (see, e.g., Luo et al. (1999) Nature Med 5:117-122), and the antisense RNA is then converted into cDNA. The second set of cDNAs are again transcribed in vitro, using the T7 promoter, to provide antisense RNA. This antisense RNA is then fluorescently labeled, or the RNA is again converted into cDNA, allowing for a third round of T7-mediated amplification to produce more antisense RNA. Thus the procedure provides for two or three rounds of in vitro transcription to produce the final RNA used for fluorescent labeling. Probes are labeled by making fluorescently labeled cDNA from the RNA starting material. Fluorescently labeled cDNAs prepared from the tumor RNA sample are compared to fluorescently labeled cDNAs prepared from normal cell RNA sample. For example, the cDNA probes from the normal cells are labeled with Cy3 fluorescent dye (green) and the cDNA probes prepared from suspected cancer cells are labeled with Cy5 fluorescent dye (red).

[0324] The differential expression assay is performed by mixing equal amounts of probes from tumor cells and normal cells of the same patient. The arrays are prehybridized by incubation for about 2 hrs at 60° C. in 5×SSC, 0.2% SDS, 1 mM EDTA, and then washing three times in water and twice in isopropanol. Following prehybridization of the array, the probe mixture is then hybridized to the array under conditions of high stringency (overnight at 42° C. in 50% formamide, 5×SSC, and 0.2% SDS. After hybridization, the array is washed at 55° C. three times as follows: 1) first wash in 1×SSC/0.2% SDS; 2) second wash in 0.1×SSC/0.2% SDS; and 3) third wash in 0.1×SSC.

[0325] The arrays are then scanned for green and red fluorescence using a Molecular Dynamics Generation III dual color laser-scanner/detector. The images are processed using BioDiscovery Autogene software, and the data from each scan set normalized. The experiment is repeated, this time labeling the two probes with the opposite color in order to perform the assay in both “color directions.” Each experiment is sometimes repeated with two more slides (one in each color direction). The data from each scan is normalized, and the level of fluorescence for each sequence on the array expressed as a ratio of the geometric mean of 8 replicate spots/genes from the four arrays or 4 replicate spots/gene from 2 arrays or some other permutation.

[0326] Normalization: The objective of normalization is to generate a cDNA library in which all transcripts expressed in a particular cell type or tissue are equally represented (S. M. Weissman, Mol. Biol. Med. 4(3):133-143 (1987); Patanjali, et al., Proc. Natl. Acad. Sci. USA 88(5):1943-1947 (1991)), and therefore isolation of as few as 30,000 recombinant clones in an optimally normalized library may represent the entire gene expression repertoire of a cell, estimated to number 10,000 per cell.

[0327] Total RNA is extracted from harvested cells using RNeasy™ Protect Kit (Qiagen, Valencia, Calif.), following manufacturer's recommended procedures. RNA is quantified using RiboGreen™ RNA quantification kit (Molecular Probes, Inc. Eugene, Oreg.). One μg of total RNA is reverse transcribed and PCR amplified using SMART™ PCR cDNA synthesis kit (ClonTech, Palo Alto, Calif.). The cDNA products are size-selected by agarose gel electrophoresis using standard procedures (Sambrook, J. T., et al. Molecular Cloning: A Laboratory Manual, 2d ed., Cold Spring Harbor Laboratory Press, NY). The cDNA is extracted using Bio 101 Geneclean® II kit (Qbiogene, Carlsbad, Calif.). Normalization of the cDNA is carried out using kinetics of hybridization principles: 1.0 μg of cDNA is denatured by heat at 100° C. for 10 minutes, then incubated at 42° C. for 42 hours in the presence of 120 mM NaCl, 10 mM Tris.HCl (pH=8.0), 5 mM EDTA.Na+ and 50% formamide. Single-stranded cDNA (“normalized”) is purified by hydroxyapatite chromatography (#130-0520, BioRad, Hercules, Calif.) following the manufacturer's recommended procedures, amplified and converted to double-stranded cDNA by three cycles of PCR amplification, and cloned into plasmid vectors using standard procedures (Sambrook, J. T., et al. Molecular Cloning: A Laboratory Manual, 2d ed., Cold Spring Harbor Laboratory Press, NY). All primers/adaptors used in the normalization and cloning process are provided by the manufacturer in the SMAR™ PCR cDNA synthesis kit (ClonTech, Palo Alto, Calif.). Supercompetent cells (XL-2 Blue Ultracompetent Cells, Stratagene, Calif.) are transfected with the normalized cDNA libraries, plated on solid media and grown overnight at 36° C.

[0328] The sequences of 10,000 recombinants per normalized library are analyzed by capillary sequencing using the ABI PRISM 3700 DNA Analyzer (Applied Biosystems, California). To determine the representation of transcripts in a library, BLAST analysis is performed on the clone sequences to assign transcript identity to each isolated clone, i.e., the sequences of the isolated polynucleotides are first masked to eliminate low complexity sequences using the XBLAST masking program (Claverie “Effective Large-Scale Sequence Similarity Searches,” Computer Methods for Macromolecular Sequence Analysis, Doolittle, ed., Meth. Enzymol. 266:212-227 Academic Press, NY, N.Y. (1996); see particularly Claverie, in “Automated DNA Sequencing and Analysis Techniques” Adams et al., eds., Chap. 36, p. 267 Academic Press, San Diego, 1994 and Claverie et al. Comput. Chem. (1993) 17:191). Generally, masking does not influence the final search results, except to eliminate sequences of relative little interest due to their low complexity, and to eliminate multiple “hits” based on similarity to repetitive regions common to multiple sequences, e.g., Alu repeats. The remaining sequences are then used in a BLASTN vs. GenBank search. The sequences are also used as query sequence in a BLASTX vs. NRP (non-redundant proteins) database search.

[0329] Automated sequencing reactions are performed using a Perkin-Elmer PRISM Dye Terminator Cycle Sequencing Ready Reaction Kit containing AmpliTaq DNA Polymerase, FS, according to the manufacturer's directions. The reactions are cycled on a GeneAmp PCR System 9600 as per manufacturer's instructions, except that they are annealed at 20° C. or 30° C. for one minute. Sequencing reactions are ethanol precipitated, pellets are resuspended in 8 microliters of loading buffer, 1.5 microliters is loaded on a sequencing gel, and the data is collected by an ABI PRISM 3700 DNA Sequencer. (Applied Biosystems, Foster City, Calif.).

[0330] The number of times a sequence is represented in a library is determined by performing sequence identity analysis on the cloned cDNA sequences and assigning transcript identity to each isolated clone. First, each sequence is checked to determine if it is a bacterial, ribosomal, or mitochondrial contaminant. Such sequences are excluded from the subsequent analysis. Second, sequence artifacts, such as vector and repetitive elements, are masked and/or removed from each sequence.

[0331] The remaining sequences are compared via BLAST (Altschul et. al, J. Mol. Biol., 215:40, 1990) to GenBank and EST databases for gene identification and are compared with each other via FastA (Pearson & Lipman, PNAS, 85:2444, 1988) to calculate the frequency of cDNA appearance in the normalized cDNA library. The sequences are also searched against the GenBank and GeneSeq nucleotide databases using the BLASTN program (BLASTN 1.3 MP: Altschul et al., J. Mol. Bio. 215:403, 1990). Fourth, the sequences are analyzed against a non-redundant protein (NRP) database with the BLASTX program (BLASTX 1.3 MP: Altschul et al., supra). This protein database is a combination of the Swiss-Prot, PIR, and NCBI GenPept protein databases. The BLASTX program is run using the default BLOSUM-62 substitution matrix with the filter parameter: “xnu+seg”. The score cutoff utilized is 75. Assembly of overlapping clones into contigs is done using the program Sequencher (Gene Codes Corp.; Ann Arbor, Mich.). The assembled contigs are analyzed using the programs in the GCG package (Genetic Computer Group, University Research Park, 575 Science Drive, Madison, Wis. 53711) Suite Version 10.1.

### Example 4

### Detection of CA-Sequences in Human Cancer Cells and Tissues

[0332] DNA from prostate and breast cancer tissues and other human cancer tissues, human colon, normal human tissues including non-cancerous prostate, and from other human cell lines are extracted following the procedure of Delli Bovi et al. (1986, Cancer Res. 46:6333-6338). The DNA is resuspended in a solution containing 0.05 M Tris HCl buffer, pH 7.8, and 0.1 mM EDTA, and the amount of DNA recovered is determined by microfluorometry using Hoechst 33258 dye. Cesarone, C. et al., Anal Biochem 100:188-197 (1979).

[0333] Polymerase chain reaction (PCR) is performed using Taq polymerase following the conditions recommended by the manufacturer (Perkin Elmer Cetus) with regard to buffer, Mg²⁺, and nucleotide concentrations. Thermocycling is performed in a DNA cycler by denaturation at 94° C. for 3 min. followed by either 35 or 50 cycles of 94° C. for 1.5 min., 50° C. for 2 min. and 72° C. for 3 min. The ability of the PCR to amplify the selected regions of the CA gene is tested by using a cloned CA polynucleotide(s) as a positive template(s). Optimal Mg²⁺, primer concentrations and requirements for the different cycling temperatures are determined with these templates. The master mix recommended by the manufacturer is used. To detect possible contamination of the master mix components, reactions without template are routinely tested.

[0334] Southern blotting and hybridization are performed as described by Southern, E. M., (J. Mol. Biol. 98:503-517, 1975), using the cloned sequences labeled by the random primer procedure (Feinberg, A. P., et al., 1983, Anal. Biochem. 132:6-13). Prehybridization and hybridization are performed in a solution containing 6×SSPE, 5% Denhardt's, 0.5% SDS, 50% formamide, 100 μg/ml denaturated salmon testis DNA, incubated for 18 hrs at 42° C., followed by washings with 2×SSC and 0.5% SDS at room temperature and at 37° C. and finally in 0.1×SSC with 0.5% SDS at 68° C. for 30 min (Sambrook et al., 1989, in “Molecular Cloning: A Laboratory Manual”, Cold Spring Harbor Lab. Press). For paraffin-embedded tissue sections the conditions described by Wright and Manos (1990, in “PCR Protocols”, Innis et al., eds., Academic Press, pp. 153-158) are followed using primers designed to detect a 250 bp sequence.

### Example 5

### Expression of Cloned Polynucleotides in Host Cells

[0335] To study the protein products of CA genes, restriction fragments from CA DNA are cloned into the expression vector pMT2 (Sambrook, et al., Molecular Cloning: A Laboratory Manual, Cold Spring Harbor Laboratory Press pp 16.17-16.22 (1989)) and transfected into COS cells grown in DMEM supplemented with 10% FCS. Transfections are performed employing calcium phosphate techniques (Sambrook, et al (1989) pp. 16.32-16.40, supra) and cell lysates are prepared forty-eight hours after transfection from both transfected and untransfected COS cells. Lysates are subjected to analysis by immunoblotting using anti-peptide antibody.

[0336] In immunoblotting experiments, preparation of cell lysates and electrophoresis are performed according to standard procedures. Protein concentration is determined using BioRad protein assay solutions. After semi-dry electrophoretic transfer to nitrocellulose, the membranes are blocked in 500 mM NaCl, 20 mM Tris, pH 7.5, 0.05% Tween-20 (TTBS) with 5% dry milk. After washing in TTBS and incubation with secondary antibodies (Amersham), enhanced chemiluminescence (ECL) protocols (Amersham) are performed as described by the manufacturer to facilitate detection.

### Example 6

### Generation of Antibodies Against Polypeptides

[0337] Polypeptides, unique to CA genes are synthesized or isolated from bacterial or other (e.g., yeast, baculovirus) expression systems and conjugated to rabbit serum albumin (RSA) with m-maleimido benzoic acid N-hydroxysuccinimide ester (MBS) (Pierce, Rockford, Ill.). Immunization protocols with these peptides are performed according to standard methods. Initially, a pre-bleed of the rabbits is performed prior to immunization. The first immunization includes Freund's complete adjuvant and 500 μg conjugated peptide or 100 μg purified peptide. All subsequent immunizations, performed four weeks after the previous injection, include Freund's incomplete adjuvant with the same amount of protein. Bleeds are conducted seven to ten days after the immunizations.

[0338] For affinity purification of the antibodies, the corresponding CA polypeptide is conjugated to RSA with MBS, and coupled to CNBr-activated Sepharose (Pharmacia, Uppsala, Sweden). Antiserum is diluted 10-fold in 10 mM Tris-HCl, pH 7.5, and incubated overnight with the affinity matrix. After washing, bound antibodies are eluted from the resin with 100 mM glycine, pH 2.5.

### Example 7

### Generation of Monoclonal Antibodies Against a CA Polypeptide

[0339] A non-denaturing adjuvant (Ribi, R730, Corixa, Hamilton Mont.) is rehydrated to 4 ml in phosphate buffered saline. 1001 of this rehydrated adjuvant is then diluted with 400 μl of Hank's Balanced Salt Solution and this is then gently mixed with the cell pellet used for immunization. Approximately 500 μg conjugated peptide or 100 μg purified peptide and Freund's complete are injected into Balb/c mice via foot-pad, once a week. After 6 weeks of weekly injection, a drop of blood is drawn from the tail of each immunized animal to test the titer of antibodies against CA polypeptides using FACS analysis. When the titer reaches at least 1:2000, the mice are sacrificed in a CO₂ chamber followed by cervical dislocation. Lymph nodes are harvested for hybridoma preparation. Lymphocytes from mice with the highest titer are fused with the mouse myeloma line X63-Ag8.653 using 35% polyethylene glycol 4000. On day 10 following the fusion, the hybridoma supernatants are screened for the presence of CAP-specific monoclonal antibodies by fluorescence activated cell sorting (FACS). Conditioned medium from each hybridoma is incubated for 30 minutes with a combined aliquot of PC3, Colo-205, LnCap, or Panc-1 cells. After incubation, the cell samples are washed, resuspended in 0.1 ml diluent and incubated with 1 μg/ml of FITC conjugated F(ab′)2 fragment of goat anti-mouse IgG for 30 min at 4° C. The cells are washed, resuspended in 0.5 ml FACS diluent and analyzed using a FACScan cell analyzer (Becton Dickinson; San Jose, Calif.). Hybridoma clones are selected for further expansion, cloning, and characterization based on their binding to the surface of one or more of cell lines which express the CA polypeptide as assessed by FACS. A hybridoma making a monoclonal antibody designated mAbCA which binds an antigen designated Ag-CA.x and an epitope on that antigen designated Ag-CA.x.1 is selected.

### Example 8

### ELISA Assay for Detecting CA Related Antigens

[0340] To test blood samples for antibodies that bind specifically to recombinantly produced CA antigens, the following procedure is employed. After a recombinant CA related protein is purified, the recombinant protein is diluted in PBS to a concentration of 5 μg/ml (500 ng/100 μl). 100 microliters of the diluted antigen solution is added to each well of a 96-well Immulon 1 plate (Dynatech Laboratories, Chantilly, Va.), and the plate is then incubated for 1 hour at room temperature, or overnight at 4° C., and washed 3 times with 0.05% Tween 20 in PBS. Blocking to reduce nonspecific binding of antibodies is accomplished by adding to each well 200 μl of a 1% solution of bovine serum albumin in PBS/Tween 20 and incubation for 1 hour. After aspiration of the blocking solution, 100 μl of the primary antibody solution (anticoagulated whole blood, plasma, or serum), diluted in the range of 1/16 to 1/2048 in blocking solution, is added and incubated for 1 hour at room temperature or overnight at 4° C. The wells are then washed 3 times, and 100 μl of goat anti-human IgG antibody conjugated to horseradish peroxidase (Organon Teknika, Durham, N.C.), diluted 1/500 or 1/1000 in PBS/Tween 20, 100 μl of o-phenylenediamine dihydrochloride (OPD, Sigma) solution is added to each well and incubated for 5-15 minutes. The OPD solution is prepared by dissolving a 5 mg OPD tablet in 50 ml 1% methanol in H₂O and adding 50 μl 30% H₂O₂ immediately before use. The reaction is stopped by adding 25 l of 4M H₂SO₄. Absorbances are read at 490 nm in a microplate reader (Bio-Rad).

### Example 9

### Identification and Characterization of CA Antigen on Cancer Cell Surface

[0341] A cell pellet of proximately 25 ul packed cell volume of a cancer cell preparation is lysed by first diluting the cells to 0.5 ml in water followed by freezing and thawing three times. The solution is centrifuged at 14,000 rpm. The resulting pellet, containing the cell membrane fragments, is resuspended in 50/1 of SDS sample buffer (Invitrogen, Carlsbad, Calif.). The sample is heated at 80° C. for 5 minutes and then centrifuged for 2 minutes at 14,000 rpm to remove any insoluble materials.

[0342] The samples are analyzed by Western blot using a 4 to 20% polyacrylamide gradient gel in Tris-Glycine SDS (Invitrogen; Carlsbad Calif.) following the manufacturer's directions. Ten microliters of membrane sample are applied to one lane on the polyacrylamide gel. A separate 10 μL sample is reduced first by the addition of 2 μL of dithiothreitol (100 mM) with heating at 80° C. for 2 minutes and then loaded into another lane. Pre-stained molecular weight markers SeeBlue Plus2 (Invitrogen; Carlsbad, Calif.) are used to assess molecular weight on the gel. The gel proteins are transferred to a nitrocellulose membrane using a transfer buffer of 14.4 g/l glycine, 3 g/l of Tris Base, 10% methanol, and 0.05% SDS. The membranes are blocked, probed with a CAP-specific monoclonal antibody (at a concentration of 0.5 ug/ml), and developed using the Invitrogen WesternBreeze Chromogenic Kit-AntiMouse according to the manufacturer's directions. In the reduced sample of the tumor cell membrane samples, a prominent band is observed migrating at a molecular weight within about 10% of the predicted molecular weight of the corresponding CA protein.

### Example 10

### Preparation of Vaccines

[0343] The present invention also relates to a method of stimulating an immune response against cells that express CA polypeptides in a patient using CA polypeptides of the invention that act as an antigen produced by or associated with a malignant cell. This aspect of the invention provides a method of stimulating an immune response in a human against cancer cells or cells that express CA polynucleotides and polypeptides. The method comprises the step of administering to a human an immunogenic amount of a polypeptide comprising: (a) the amino acid sequence of a huma CA protein or (b) a mutein or variant of a polypeptide comprising the amino acid sequence of a human endogenous retrovirus CA protein.

### Example 11

### Generation of Transgenic Animals Expressing Polypeptides as a Means for Testing Therapeutics

[0344] CA nucleic acids are used to generate genetically modified non-human animals, or site specific gene modifications thereof, in cell lines, for the study of function or regulation of prostate tumor-related genes, or to create animal models of diseases, including prostate cancer. The term “transgenic” is intended to encompass genetically modified animals having an exogenous CA gene(s) that is stably transmitted in the host cells where the gene(s) may be altered in sequence to produce a modified protein, or having an exogenous CA LTR promoter operably linked to a reporter gene. Transgenic animals may be made through a nucleic acid construct randomly integrated into the genome. Vectors for stable integration include plasmids, retroviruses and other animal viruses, YACs, and the like. Of interest are transgenic mammals, e.g. cows, pigs, goats, horses, etc., and particularly rodents, e.g. rats, mice, etc.

[0345] The modified cells or animals are useful in the study of CA gene function and regulation. For example, a series of small deletions and/or substitutions may be made in the CA genes to determine the role of different genes in tumorigenesis. Specific constructs of interest include, but are not limited to, antisense constructs to block CA gene expression, expression of dominant negative CA gene mutations, and over-expression of a CA gene. Expression of a CA gene or variants thereof in cells or tissues where it is not normally expressed or at abnormal times of development is provided. In addition, by providing expression of proteins derived from CA in cells in which it is otherwise not normally produced, changes in cellular behavior can be induced.

[0346] DNA constructs for random integration need not include regions of homology to mediate recombination. Conveniently, markers for positive and negative selection are included. For various techniques for transfecting mammalian cells, see Keown et al., Methods in Enzymology 185:527-537 (1990).

[0347] For embryonic stem (ES) cells, an ES cell line is employed, or embryonic cells are obtained freshly from a host, e.g. mouse, rat, guinea pig, etc. Such cells are grown on an appropriate fibroblast-feeder layer or grown in the presence of appropriate growth factors, such as leukemia inhibiting factor (LIF). When ES cells are transformed, they may be used to produce transgenic animals. After transformation, the cells are plated onto a feeder layer in an appropriate medium. Cells containing the construct may be detected by employing a selective medium. After sufficient time for colonies to grow, they are picked and analyzed for the occurrence of integration of the construct. Those colonies that are positive may then be used for embryo manipulation and blastocyst injection. Blastocysts are obtained from 4 to 6 week old superovulated females. The ES cells are trypsinized, and the modified cells are injected into the blastocoel of the blastocyst. After injection, the blastocysts are returned to each uterine horn of pseudopregnant females. Females are then allowed to go to term and the resulting chimeric animals screened for cells bearing the construct. By providing for a different phenotype of the blastocyst and the ES cells, chimeric progeny can be readily detected.

[0348] The chimeric animals are screened for the presence of the modified gene and males and females having the modification are mated to produce homozygous progeny. If the gene alterations cause lethality at some point in development, tissues or organs are maintained as allogeneic or congenic grafts or transplants, or in in vitro culture. The transgenic animals may be any non-human mammal, such as laboratory animals, domestic animals, etc. The transgenic animals are used in functional studies, drug screening, etc., e.g. to determine the effect of a candidate drug on prostate cancer, to test potential therapeutics or treatment regimens, etc.

### Example 12

### Diagnostic Imaging Using CA Specific Antibodies

[0349] The present invention encompasses the use of antibodies to CA polypeptides to accurately stage cancer patients at initial presentation and for early detection of metastatic spread of cancer. Radioimmunoscintigraphy using monoclonal antibodies specific for CA polypeptides can provide an additional cancer-specific diagnostic test. The monoclonal antibodies of the instant invention are used for histopathological diagnosis of carcinomas.

[0350] Subcutaneous human xenografts of cancer cells in nude mice is used to test whether a technetium-99m (^{99m}Tc)-labeled monoclonal antibody of the invention can successfully image the xenografted cancer by external gamma scintography as described for seminoma cells by Marks, et al., Brit. J. Urol. 75:225 (1995). Each monoclonal antibody specific for a CA polypeptide is purified from ascitic fluid of BALB/c mice bearing hybridoma tumors by affinity chromatography on protein A-Sepharose. Purified antibodies, including control monoclonal antibodies such as an avidin-specific monoclonal antibody (Skea, et al., J. Immunol. 151:3557 (1993)) are labeled with ^{99m}Tc following reduction, using the methods of Mather, et al., J. Nucl. Med. 31:692 (1990) and Zhang et al., Nucl. Med. Biol. 19:607 (1992). Nude mice bearing human cancer cells are injected intraperitoneally with 200-500 μCi of ^{99m}Tc-labeled antibody. Twenty-four hours after injection, images of the mice are obtained using a Siemens ZLC3700 gamma camera equipped with a 6 mm pinhole collimator set approximately 8 cm from the animal. To determine monoclonal antibody biodistribution following imaging, the normal organs and tumors are removed, weighed, and the radioactivity of the tissues and a sample of the injectate are measured. Additionally, CA-specific antibodies conjugated to antitumor compounds are used for cancer-specific chemotherapy.

### Example 13

### Immunohistochemical Methods

[0351] Frozen tissue samples from cancer patients are embedded in an optimum cutting temperature (OCT) compound and quick-frozen in isopentane with dry ice. Cryosections are cut with a Leica 3050 CM mictrotome at thickness of 5 μm and thaw-mounted on vectabound-coated slides. The sections are fixed with ethanol at −20° C. and allowed to air dry overnight at room temperature. The fixed sections are stored at −80° C. until use. For immunohistochemistry, the tissue sections are retrieved and first incubated in blocking buffer (PBS, 5% normal goat serum, 0.1% Tween 20) for 30 minutes at room temperature, and then incubated with the CA protein-specific monoclonal antibody and control monoclonal antibodies diluted in blocking buffer (1 μg/ml) for 120 minutes. The sections are then washed three times with the blocking buffer. The bound monoclonal antibodies are detected with a goat anti-mouse IgG+IgM (H+L) F(ab′)²-peroxidase conjugates and the peroxidase substrate diaminobenzidine (1 mg/ml, Sigma Catalog No. D 5637) in 0.1 M sodium acetate buffer pH 5.05 and 0.003% hydrogen peroxide (Sigma cat. No. H1009). The stained slides are counter-stained with hematoxylin and examined under Nikon microscope.

[0352] Monoclonal antibody against a CA protein (antigen) is used to test reactivity with various cell lines from different types of tissues. Cells from different established cell lines are removed from the growth surface without using proteases, packed and embedded in OCT compound. The cells are frozen and sectioned, then stained using a standard IHC protocol. The CellArray™ technology is described in WO 01/43869. Normal tissue (human) obtained by surgical resection are frozen and mounted. Cryosections are cut with a Leica 3050 CM mictrotome at thickness of 5 μm and thaw-mounted on vectabound-coated slides. The sections are fixed with ethanol at −20° C. and allowed to air dry overnight at room temperature. PolyMICA™ Detection kit is used to determine binding of a CA-specific monoclonal antibody to normal tissue. Primary monoclonal antibody is used at a final concentration of 1 μg/ml.

[0353] All publications and patent applications cited in this specification are herein incorporated by reference as if each individual publication or patent application were specifically and individually indicated to be incorporated by reference.

[0354] Although the foregoing invention has been described in some detail by way of illustration and example for purposes of clarity of understanding, it will be readily apparent to those of ordinary skill in the art in light of the teachings of this invention that certain changes and modifications may be made thereto without departing from the spirit or scope of the appended claims.

What is claimed is:

1. An isolated nucleic acid comprising at least 10 contiguous nucleotides of a sequence selected from the group consisting of the polynucleotide sequences of SEQ ID NOS: 7, 9, 12, 18, 26, 28, 30, 32, 38, 40, 46, 48, 54, 62, 64, 66, 72, 74, 80, 90, 92, 100, 102, 104, 106, 108, 121, 127, 129, 135, 137, 139, 145, 154, 156, 158, 173, 175, 184, 190, 192, 198, 204, 206, 212, 218, 220, 228, 230, 232, 234, 236, 245, 247, 249, 251, 253, 255, 265, 267, 269, 271, 277, 279, 281, 283, 285, 287, 295, 297, 299, 305, 307, 309, 315, 317, 327, 329, 331, 333, 335, 341, 347, 349, 351, 353, 355, 357, 365, 367, 369, 371, 377, 379, 381, 383, 385, 391, 460, 462, 464, 466, 468, 470, 476, 478, 480, 486, 488, 500, 502, and 508 shown in Tables 1-64, or its complement.

2. A host cell comprising a recombinant nucleic acid of claim 1.

3. An expression vector comprising the isolated nucleic acid according to claim 1.

4. A host cell comprising the expression vector of claim 3.

5. The polynucleotide according to claim 1, wherein said polynucleotide, or its complement or a fragment thereof, further comprises a detectable label.

6. The polynucleotide according to claim 1, wherein said polynucleotide, or its complement or a fragment thereof, is attached to a solid support.

7. The polynucleotide according to claim 1, wherein said polynucleotide, or its complement or a fragment thereof, is prepared at least in part by chemical synthesis.

8. The polynucleotide according to claim 1, wherein said polynucleotide, or its complement or a fragment thereof, is an antisense fragment.

9. The polynucleotide according to claim 1, wherein said polynucleotide, or its complement or a fragment thereof, is single stranded.

10. The polynucleotide according to claim 1, wherein said polynucleotide, or its complement or a fragment thereof, is double stranded.

11. The polynucleotide according to claim 1, comprising at least 15 contiguous nucleotides.

12. The polynucleotide according to claim 1, comprising at least 20 contiguous nucleotides.

13. A microarray for detecting a cancer associated (CA) nucleic acid comprising: at least one probe comprising at least 10 contiguous nucleotides of a sequence selected from the group consisting of the polynucleotide sequences SEQ ID NOS: 7, 9, 12, 18, 26, 28, 30, 32, 38, 40, 46, 48, 54, 62, 64, 66, 72, 74, 80, 90, 92, 100, 102, 104, 106, 108, 121, 127, 129, 135, 137, 139, 145, 154, 156, 158, 173, 175, 184, 190, 192, 198, 204, 206, 212, 218, 220, 228, 230, 232, 234, 236, 245, 247, 249, 251, 253, 255, 265, 267, 269, 271, 277, 279, 281, 283, 285, 287, 295, 297, 299, 305, 307, 309, 315, 317, 327, 329, 331, 333, 335, 341, 347, 349, 351, 353, 355, 357, 365, 367, 369, 371, 377, 379, 381, 383, 385, 391, 460, 462, 464, 466, 468, 470, 476, 478, 480, 486, 488, 500, 502, and 508 shown in Tables 1-64, or its complement.

14. The microarray according to claim 13, comprising at least 15 contiguous nucleotides.

15. The microarray according to claim 13, comprising at least 20 contiguous nucleotides.

16. An isolated polypeptide, encoded within an open reading frame of a CA sequence selected from the group consisting of the polynucleotide sequences of SEQ ID NOS: 6, 11, 17, 25, 37, 45, 53, 61, 71, 79, 89, 99, 120, 126, 134, 144, 153, 172, 183, 189, 197, 203, 211, 217, 227, 244, 264, 276, 294, 304, 314, 326, 340, 346, 364, 376, 390, 459, 475, 485, 499, and 507 shown in Tables 1-64, or its complement.

17. The polypeptide of claim 16, wherein said polypeptide comprises the amino acid sequence encoded by a polynucleotide selected from the group consisting of SEQ ID NOS: 7, 9, 12, 18, 26, 28, 30, 32, 38, 40, 46, 48, 54, 62, 64, 66, 72, 74, 80, 90, 92, 100, 102, 104, 106, 108, 121, 127, 129, 135, 137, 139, 145, 154, 156, 158, 173, 175, 184, 190, 192, 198, 204, 206, 212, 218, 220, 228, 230, 232, 234, 236, 245, 247, 249, 251, 253, 255, 265, 267, 269, 271, 277, 279, 281, 283, 285, 287, 295, 297, 299, 305, 307, 309, 315, 317, 327, 329, 331, 333, 335, 341, 347, 349, 351, 353, 355, 357, 365, 367, 369, 371, 377, 379, 381, 383, 385, 391, 460, 462, 464, 466, 468, 470, 476, 478, 480, 486, 488, 500, 502, and 508 shown in Tables 1-64.

18. The polypeptide of claim 16, wherein said polypeptide comprises the amino acid sequence encoded by a polypeptide selected from the group consisting of SEQ ID NOS: 8, 10, 13, 19, 27, 29, 31, 33, 39, 41, 47, 49, 55, 63, 65, 67, 73, 75, 81, 91, 93, 101, 103, 105, 107, 109, 122, 128, 130, 136, 138, 140, 146, 155, 157, 159, 174, 176, 185, 191, 193, 199, 205, 207, 213, 219, 221, 229, 231, 233, 235, 237, 246, 248, 250, 252, 254, 256, 266, 268, 270, 272, 278, 280, 282, 284, 286, 288, 296, 298, 300, 306, 308, 310, 316, 318, 328, 330, 332, 334, 336, 342, 348, 350, 352, 354, 356, 358, 366, 368, 370, 372, 378, 380, 382, 384, 386, 392, 461, 463, 465, 467, 469, 471, 477, 479, 481, 487, 489, 501, 503, and 509 shown in Tables 1-64.

19. The polypeptide of claim 16, wherein said polypeptide comprises the amino acid sequence of an epitope of the amino acid sequence of a CA polypeptide selected from the group consisting of SEQ ID NOS: 8, 10, 13, 19, 27, 29, 31, 33, 39, 41, 47, 49, 55, 63, 65, 67, 73, 75, 81, 91, 93, 101, 103, 105, 107, 109, 122, 128, 130, 136, 138, 140, 146, 155, 157, 159, 174, 176, 185, 191, 193, 199, 205, 207, 213, 219, 221, 229, 231, 233, 235, 237, 246, 248, 250, 252, 254, 256, 266, 268, 270, 272, 278, 280, 282, 284, 286, 288, 296, 298, 300, 306, 308, 310, 316, 318, 328, 330, 332, 334, 336, 342, 348, 350, 352, 354, 356, 358, 366, 368, 370, 372, 378, 380, 382, 384, 386, 392, 461, 463, 465, 467, 469, 471, 477, 479, 481, 487, 489, 501, 503, and 509 shown in Tables 1-64.

20. The polypeptide of claim 16, wherein said polypeptide or fragment thereof is attached to a solid support.

21. An isolated antibody or antigen binding fragment thereof, that binds to a polypeptide according to claim 16.

22. The isolated antibody or antigen binding fragment thereof according the claim 21, wherein said antibody or fragment thereof is attached to a solid support.

23. The isolated antibody or antigen binding fragment thereof according the claim 21, wherein said antibody is a monoclonal antibody.

24. The isolated antibody or antigen binding fragment thereof according the claim 21, wherein said antibody is a polyclonal antibody.

25. The isolated antibody or antigen binding fragment thereof according the claim 21, wherein said antibody or fragment thereof further comprises a detectable label.

26. An isolated antibody that binds to a polypeptide, or antigen binding fragment thereof, according to claim 16, prepared by a method comprising the steps of: (i) immunizing a host animal with a composition comprising said polypeptide, or antigen binding fragment thereof, and (ii) collecting cells from said host expressing antibodies against the antigen or antigen binding fragment thereof.

27. The monoclonal antibody according to claim 23, wherein the monoclonal antibody is prepared by a process comprising:
(a) providing a hybridoma capable of producing the monoclonal antibody; and
(b) culturing the hybridoma under conditions that provide for the production of the monoclonal antibody by the hybridoma.

28. A hybridoma that produces the monoclonal antibody according to claim 23.

29. The antibody according to claim 21, wherein the antibody is a humanized antibody.

30. A kit for detecting cancer cells comprising the antibody according to claim 21.

31. A kit for detecting cancer cells comprising the monoclonal antibody according to claim 23.

32. A method for detecting a presence or an absence of cancer cells in an individual, the method comprising:
contacting cells from the individual with the antibody according to claim 21;
and detecting a complex of a CAP from the cancer cells and the antibody,
wherein detection of the complex correlates with the presence of cancer cells in the individual.

33. A kit for diagnosing the presence of cancer in a test sample, said kit comprising at least one polynucleotide that selectively hybridizes to a CA polynucleotide sequence selected from the group consisting of the polynucleotide sequences SEQ ID NOS: 6, 11, 17, 25, 37, 45, 53, 61, 71, 79, 89, 99, 120, 126, 134, 144, 153, 172, 183, 189, 197, 203, 211, 217, 227, 244, 264, 276, 294, 304, 314, 326, 340, 346, 364, 376, 390, 459, 475, 485, 499, and 507 shown in Tables 1-64, or its complement.

34. A kit for diagnosing the presence of cancer in a test sample, said kit comprising at least one polynucleotide that selectively hybridizes to the sequence of a polynucleotide sequence selected from the group consisting of the polynucleotide sequences SEQ ID NOS: 7, 9, 12, 18, 26, 28, 30, 32, 38, 40, 46, 48, 54, 62, 64, 66, 72, 74, 80, 90, 92, 100, 102, 104, 106, 108, 121, 127, 129, 135, 137, 139, 145, 154, 156, 158, 173, 175, 184, 190, 192, 198, 204, 206, 212, 218, 220, 228, 230, 232, 234, 236, 245, 247, 249, 251, 253, 255, 265, 267, 269, 271, 277, 279, 281, 283, 285, 287, 295, 297, 299, 305, 307, 309, 315, 317, 327, 329, 331, 333, 335, 341, 347, 349, 351, 353, 355, 357, 365, 367, 369, 371, 377, 379, 381, 383, 385, 391, 460, 462, 464, 466, 468, 470, 476, 478, 480, 486, 488, 500, 502, and 508 shown in Tables 1-64, a fragment thereof, or their complement.

35. An electronic library comprising a polynucleotide, or fragment thereof, comprising a CA polynucleotide sequence selected from the group consisting of the polynucleotide sequences of SEQ ID NOS: 6, 11, 17, 25, 37, 45, 53, 61, 71, 79, 89, 99, 120, 126, 134, 144, 153, 172, 183, 189, 197, 203, 211, 217, 227, 244, 264, 276, 294, 304, 314, 326, 340, 346, 364, 376, 390, 459, 475, 485, 499, and 507 shown in Tables 1-64, or its complement.

36. An electronic library comprising a polynucleotide, or fragment thereof, comprising a CA polynucleotide sequence selected from the group consisting of the polynucleotide sequences of SEQ ID NOS: 7, 9, 12, 18, 26, 28, 30, 32, 38, 40, 46, 48, 54, 62, 64, 66, 72, 74, 80, 90, 92, 100, 102, 104, 106, 108, 121, 127, 129, 135, 137, 139, 145, 154, 156, 158, 173, 175, 184, 190, 192, 198, 204, 206, 212, 218, 220, 228, 230, 232, 234, 236, 245, 247, 249, 251, 253, 255, 265, 267, 269, 271, 277, 279, 281, 283, 285, 287, 295, 297, 299, 305, 307, 309, 315, 317, 327, 329, 331, 333, 335, 341, 347, 349, 351, 353, 355, 357, 365, 367, 369, 371, 377, 379, 381, 383, 385, 391, 460, 462, 464, 466, 468, 470, 476, 478, 480, 486, 488, 500, 502, and 508 shown in Tables 1-64.

37. An electronic library comprising a polypeptide, or fragment thereof, comprising a CA polypeptide sequence selected from the group consisting of the polypeptide sequences of SEQ ID NOS: 8, 10, 13, 19, 27, 29, 31, 33, 39, 41, 47, 49, 55, 63, 65, 67, 73, 75, 81, 91, 93, 101, 103, 105, 107, 109, 122, 128, 130, 136, 138, 140, 146, 155, 157, 159, 174, 176, 185, 191, 193, 199, 205, 207, 213, 219, 221, 229, 231, 233, 235, 237, 246, 248, 250, 252, 254, 256, 266, 268, 270, 272, 278, 280, 282, 284, 286, 288, 296, 298, 300, 306, 308, 310, 316, 318, 328, 330, 332, 334, 336, 342, 348, 350, 352, 354, 356, 358, 366, 368, 370, 372, 378, 380, 382, 384, 386, 392, 461, 463, 465, 467, 469, 471, 477, 479, 481, 487, 489, 501, 503, and 509 shown in Tables 1-64.

38. A method of screening for anticancer activity comprising:
(a) providing a cell that expresses a cancer associated (CA) gene encoded by a nucleic acid sequence selected from the group consisting of the sequences SEQ ID NOS: 6, 11, 17, 25, 37, 45, 53, 61, 71, 79, 89, 99, 120, 126, 134, 144, 153, 172, 183, 189, 197, 203, 211, 217, 227, 244, 264, 276, 294, 304, 314, 326, 340, 346, 364, 376, 390, 459, 475, 485, 499, and 507 shown in Tables 1-64, or fragment thereof,
(b) contacting a tissue sample derived from a cancer cell with an anticancer drug candidate; and
(c) monitoring an effect of the anticancer drug candidate on an expression of the CA polynucleotide in the tissue sample.

39. The method of screening for anticancer activity according to claim 38, wherein the CA gene comprises at least one nucleic acid sequence selected from the group consisting of the sequences SEQ ID NOS: 7, 9, 12, 18, 26, 28, 30, 32, 38, 40, 46, 48, 54, 62, 64, 66, 72, 74, 80, 90, 92, 100, 102, 104, 106, 108, 121, 127, 129, 135, 137, 139, 145, 154, 156, 158, 173, 175, 184, 190, 192, 198, 204, 206, 212, 218, 220, 228, 230, 232, 234, 236, 245, 247, 249, 251, 253, 255, 265, 267, 269, 271, 277, 279, 281, 283, 285, 287, 295, 297, 299, 305, 307, 309, 315, 317, 327, 329, 331, 333, 335, 341, 347, 349, 351, 353, 355, 357, 365, 367, 369, 371, 377, 379, 381, 383, 385, 391, 460, 462, 464, 466, 468, 470, 476, 478, 480, 486, 488, 500, 502, and 508 shown in Tables 1-64.

40. The method of screening for anticancer activity according to claim 38, further comprising:
(d) comparing the level of expression in the absence of said drug candidate to the level of expression in the presence of the drug candidate.

41. The method of screening for anticancer activity according to claim 39, wherein the drug candidate is an inhibitor of transcription and further wherein the nucleic acid sequence is selected from the group consisting of SEQ ID NOS: 7, 9, 12, 18, 26, 28, 30, 32, 38, 40, 46, 48, 54, 62, 64, 66, 72, 74, 80, 90, 92, 100, 102, 104, 106, 108, 121, 127, 129, 135, 137, 139, 145, 154, 156, 158, 173, 175, 184, 190, 192, 198, 204, 206, 212, 218, 220, 228, 230, 232, 234, 236, 245, 247, 249, 251, 253, 255, 265, 267, 269, 271, 277, 279, 281, 283, 285, 287, 295, 297, 299, 305, 307, 309, 315, 317, 327, 329, 331, 333, 335, 341, 347, 349, 351, 353, 355, 357, 365, 367, 369, 371, 377, 379, 381, 383, 385, 391, 460, 462, 464, 466, 468, 470, 476, 478, 480, 486, 488, 500, 502, and 508 shown in Tables 1-64.

42. A method for detecting cancer associated with expression of a polypeptide in a test cell sample, comprising the steps of:
(i) detecting a level of expression of at least one polypeptide selected from the group consisting of SEQ ID NOS: 8, 10, 13, 19, 27, 29, 31, 33, 39, 41, 47, 49, 55, 63, 65, 67, 73, 75, 81, 91, 93, 101, 103, 105, 107, 109, 122, 128, 130, 136, 138, 140, 146, 155, 157, 159, 174, 176, 185, 191, 193, 199, 205, 207, 213, 219, 221, 229, 231, 233, 235, 237, 246, 248, 250, 252, 254, 256, 266, 268, 270, 272, 278, 280, 282, 284, 286, 288, 296, 298, 300, 306, 308, 310, 316, 318, 328, 330, 332, 334, 336, 342, 348, 350, 352, 354, 356, 358, 366, 368, 370, 372, 378, 380, 382, 384, 386, 392, 461, 463, 465, 467, 469, 471, 477, 479, 481, 487, 489, 501, 503, and 509 shown in Tables 1-64, or a fragment thereof, and
(ii) comparing the level of expression of the polypeptide in the test sample with a level of expression of polypeptide in a normal cell sample, wherein an altered level of expression of the polypeptide in the test cell sample relative to the level of polypeptide expression in the normal cell sample is indicative of the presence of cancer in the test cell sample.

43. A method for detecting cancer associated with expression of a polypeptide in a test cell sample, comprising the steps of:
(i) detecting a level of activity of at least one polypeptide selected from the group consisting of SEQ ID NOS: 8, 10, 13, 19, 27, 29, 31, 33, 39, 41, 47, 49, 55, 63, 65, 67, 73, 75, 81, 91, 93, 101, 103, 105, 107, 109, 122, 128, 130, 136, 138, 140, 146, 155, 157, 159, 174, 176, 185, 191, 193, 199, 205, 207, 213, 219, 221, 229, 231, 233, 235, 237, 246, 248, 250, 252, 254, 256, 266, 268, 270, 272, 278, 280, 282, 284, 286, 288, 296, 298, 300, 306, 308, 310, 316, 318, 328, 330, 332, 334, 336, 342, 348, 350, 352, 354, 356, 358, 366, 368, 370, 372, 378, 380, 382, 384, 386, 392, 461, 463, 465, 467, 469, 471, 477, 479, 481, 487, 489, 501, 503, and 509 shown in Tables 1-64, or a fragment thereof, wherein said activity corresponds to at least one activity for the polypeptide listed in Tables 1-64; and
(ii) comparing the level of activity of the polypeptide in the test sample with a level of activity of polypeptide in a normal cell sample, wherein an altered level of activity of the polypeptide in the test cell sample relative to the level of polypeptide activity in the normal cell sample is indicative of the presence of cancer in the test cell sample.

44. A method for detecting cancer associated with the presence of an antibody in a test serum sample, comprising the steps of:
(i) detecting a level of an antibody against an antigenic polypeptide selected from the group consisting of SEQ ID NOS: 8, 10, 13, 19, 27, 29, 31, 33, 39, 41, 47, 49, 55, 63, 65, 67, 73, 75, 81, 91, 93, 101, 103, 105, 107, 109, 122, 128, 130, 136, 138, 140, 146, 155, 157, 159, 174, 176, 185, 191, 193, 199, 205, 207, 213, 219, 221, 229, 231, 233, 235, 237, 246, 248, 250, 252, 254, 256, 266, 268, 270, 272, 278, 280, 282, 284, 286, 288, 296, 298, 300, 306, 308, 310, 316, 318, 328, 330, 332, 334, 336, 342, 348, 350, 352, 354, 356, 358, 366, 368, 370, 372, 378, 380, 382, 384, 386, 392, 461, 463, 465, 467, 469, 471, 477, 479, 481, 487, 489, 501, 503, and 509 shown in Tables 1-64, or antigenic fragment thereof; and
(ii) comparing said level of said antibody in the test sample with a level of said antibody in the control sample, wherein an altered level of antibody in said test sample relative to the level of antibody in the control sample is indicative of the presence of cancer in the test serum sample.

45. A method for screening for a bioactive agent capable of modulating the activity of a CA protein (CAP), wherein said CAP is encoded by a nucleic acid comprising a nucleic acid sequence selected from the group consisting of the polynucleotide sequences SEQ ID NOS: 7, 9, 12, 18, 26, 28, 30, 32, 38, 40, 46, 48, 54, 62, 64, 66, 72, 74, 80, 90, 92, 100, 102, 104, 106, 108, 121, 127, 129, 135, 137, 139, 145, 154, 156, 158, 173, 175, 184, 190, 192, 198, 204, 206, 212, 218, 220, 228, 230, 232, 234, 236, 245, 247, 249, 251, 253, 255, 265, 267, 269, 271, 277, 279, 281, 283, 285, 287, 295, 297, 299, 305, 307, 309, 315, 317, 327, 329, 331, 333, 335, 341, 347, 349, 351, 353, 355, 357, 365, 367, 369, 371, 377, 379, 381, 383, 385, 391, 460, 462, 464, 466, 468, 470, 476, 478, 480, 486, 488, 500, 502, and 508 shown in Tables 1-64, said method. comprising:
a) combining said CAP and a candidate bioactive agent; and
b) determining the effect of the candidate agent on the bioactivity of said CAP.

46. The method of screening for the bioactive agent according to claim 45, wherein the bioactive agent affects the expression of the CA protein (CAP).

47. The method of screening for the bioactive agent according to claim 45, wherein the bioactive agent affects the activity of the CA protein (CAP), wherein such activity is selected from the activities listed in Tables 1-64.

48. The method of screening for the bioactive agent according to claim 45, wherein the bioactive agent is a modulator of an activity selected from the group consisting of: G-protein coupled receptor, nucleotide binding, nucleic acid binding, calcium binding protein, apoptosis, cell cycle regulator, chromatin protein. transcription factor, transport protein, signal transduction, nuclear receptor, growth factor, protein kinase, protein phosphorylase, peptidase, electron transport, thioredoxin, semaphorin, signaling, and motility as shown in Tables 1-64.

49. A method for diagnosing cancer comprising:
a) determining the expression of one or more genes comprising a nucleic acid sequence selected from the group consisting of the human genomic and mRNA sequences outlined in Tables 1-64, in a first tissue type of a first individual; and
b) comparing said expression of said gene(s) from a second normal tissue type from said first individual or a second unaffected individual;
wherein a difference in said expression indicates that the first individual has cancer.

50. A method for treating cancers comprising administering to a patient an inhibitor of a CA protein (CAP), wherein said CAP is encoded by a nucleic acid comprising a nucleic acid sequence selected from the group consisting of the human nucleic acid sequences in Tables 1-64.

51. The method for treating cancers according to claim 50, wherein the inhibitor of a CA protein (CAP) binds to the CA protein.

52. A method for inhibiting expression of a cancer associated (CA) gene in a cell comprising:
contacting a cell expressing a CA gene with a double stranded RNA comprising a sequence capable of hybridizing to a cancer associated (CA) mRNA corresponding to the polynucleotide sequences of SEQ ID NOS: 7, 9, 12, 18, 26, 28, 30, 32, 38, 40, 46, 48, 54, 62, 64, 66, 72, 74, 80, 90, 92, 100, 102, 104, 106, 108, 121, 127, 129, 135, 137, 139, 145, 154, 156, 158, 173, 175, 184, 190, 192, 198, 204, 206, 212, 218, 220, 228, 230, 232, 234, 236, 245, 247, 249, 251, 253, 255, 265, 267, 269, 271, 277, 279, 281, 283, 285, 287, 295, 297, 299, 305, 307, 309, 315, 317, 327, 329, 331, 333, 335, 341, 347, 349, 351, 353, 355, 357, 365, 367, 369, 371, 377, 379, 381, 383, 385, 391, 460, 462, 464, 466, 468, 470, 476, 478, 480, 486, 488, 500, 502, and 508 shown in Tables 1-64, in an amount sufficient to elicit RNA interference; and inhibiting expression of the CA gene in the cell.

53. The method of claim 52, wherein the double stranded RNA is provided by introducing a short interfering RNA (siRNA) into the cell by a method selected from the group consisting of transfection, electroporation, and microinjection.

54. The method of claim 52, wherein the double stranded RNA is provided by introducing a short interfering RNA (siRNA) into the cell by an expression vector.

The application's sequence listing, which the Patent Office published only in electronic form, follows.

SEQUENCE LISTING (515 sequences)

SEQ ID NO: 1 - DNA, 160671 bp, Mus Musculus
  misc_feature (1)...(160671): n = A,T,C or G
tctggaatgcggctagattctcagcagctgttttctctcaggtgaggtgactctggggcataactggttaggccagcttattcaagtgtgcgtgtcttgctcaagaagccaaagttgcaggctctcttcttacagaacagagaaggactcacacaaaccaagttcatggctgaccaggttggcaccccacaaagtatacccactgtaagtaaataagcaaaaacttttaaattaaaacatgaataaactcaggcaccataggtaattactccttagatattaatgttgaggaaagaagaaagctattcgaacatagacatctaagagtggttgccatagggtcctcccctctgtacctcaggctgatctcagatctactgtgtagtccccaacccacatcttcctgcctcatctctgtgagtgctgagattacaggcatgtgccacctggccctgtttaaggtaggtaaacaaaatcctgctcaagtacatcccaggatactgtcttaggtagggtcttcctgctgtgaacagacaccgtgaccaaggcaagtcttgtaaggacaacagttaattggggctggcttacaggctcagaggttcagtccatcaccatcaaggtgggagcagggaagcatccagacaggcatgatgcaggcagacctgagagttctacatcttcatctgaaggctgacttcctggcagctagagtgaggagggtcttaagcccccacacacagtgacacacctacctaataagaccacatcccctaatagtgccactccctgggccaaacgtatacaaaccatcacagacaccaaagagaagtatcaatatttcaatataatagacttatttcatttctgtgcccatctttactgaaggtacgaagctgttctttcttgcctagaagggtggatacagcgtagttgtgcagtgaaatctgatgaatgaatagtcatgtggcttctgtagcaattactcagaaatcactgtcatagtatacaggagccataggtggcatgtaaggaatgacacggctgtgagccagtgaaattatatgtataaaaacaagaggtactttgatctggtctgccatctaattcctgattgagcacaatgctaagtatagagtgtttgctatctgtggaacgaatggatgaatgggagaatgaaggtttttcttaatttccaacatattggtttgtaccgtctctaaacataaagtacagagataggcatgaatgagaataatcttgatggaaaccacccatcaggtctttcttgctccaagcagagtatgttacaatgttacagaaaattaacacatacaaaccagaatacttctacaacagaagtgtgagcctgaaaggtagtttcttctaaagtttttttcaaagtgtggatcttgattcgtggctagcattgtttttaagggagggctctgaacacctatatcatccctagtccttttgaaagccttggagaacatatgggaagggtgatggaaagattataagagccaagggccagaggggattaggtgaaactgtcttctaaacatgatggaactagtgcacagcagctgtggttgcctgcacagatctgtaccagattaagccagttgacaagcagtcatggacaggggagaggctcacagggccccacccctgactgatgatcatctggaagatgaaggctgctgagttcttcaacattgtggcccatggtaggatgcccaagcttcagtggatggctgtatacatgcagaatacaggcagtactaagtggactctgtgggttacaaagaagaaaagggaaaggaggaagaggaagcacggagcctgaagggagagatactggtggggtctgggagtagtggggggggggtcaggaataggggctgcatgtgaattagtgtatgaaactaaaatatagaataaaaatttaaaataataagaaaaacagaagaggaatattgtcataactcactagtaatattcttatctagcacacgtgatgccaaaaattatcaagtaagtcaaatcagtagcttctccaaaaataaaaataaagagaaaaagaaaaagaagaaacctaaaaacaaaaagaagaaaatcaaagcaaaaccaaaatgaacaaaactcacatagcaaagtcttttaaaactcccatttttttttcaattacagcttacttaccttgtggagtgcaccaagctataaggaaaacaaaaacaaaaaacaaacaaaaaaaatgttctaagtttgaccactatctgtctaccttctgattcttggggaagttaagtacagatgtgtatttagaggaaaagacacatccgtacagtggtttgaataagaatagcctcccctccataggctcatgtgtttgactacttggtcttccattggtggaactgtttgggaaggatcaggaggctggaggaggcatgtcactggaggcaggctttgagatttcaaaagcccacaccagttcccagttaactctttctgcctcatggttgtgtcataaagtgtaagctcttagctactgctccagtaccctgcctgcctgcctgcctgcctgcctgcctgcctgcctgcctgcctgcttgcctgcttgcctgcttactgccatgctccctgccatgatgatcatgggcactaatttgctgaaactgtaaaccccaaataaattctttctttcataagttgcctgggtcataatgttttatcacagcaatagaaaagtaactaagacaaatctaatgtgacttcaacaaaaagatacaatgtagccattcaggtcaagattctggcacccaagtgtctgccttgttttccctcttactagctttgagaccttaagtcatttaatcaccccggggccttaatttcttcaacaattaaatcaacatctaatgctatcgacctcatagaattcttctgagaatttgatgggtcattctgagctaagagtaatgcctaagtgtggagccaaactattcactgatgtctaagcagcaatggagccttaagtcctgacagcttctccagcattgtggccctcagaaggcagtcttgaaagctatgggaatggtttgccagagctgatgttcaggaaagaaacagccaaactgaagtcatccatctcgcccgactgacacctttgaggtctcagcaaaaacagcatgttccagggagacatcctgtccacgaacatgctgctatctctcagaattctaggcagagtggaatccagggtggtgagggactgggtgccaagtgccctttcccctccaggggcccgtcacagctcgcactggcttcctgactctcctgctgtcgtgccttttactccacattttgggatcatcacagctgggggtgaacaggaagtgcgtccccatgaattcaattatttaaaattttccagttatcttgactttgcaatgggaagtgaagttggcccagtgtttgtcacaagtcacctttcacggtggaatttgaagcttcatgtagcacctaggggcatgaaaagcttacacgcatgcagacatcagaacactaggcaaaactgtaactggctgttcaccaataaagacgtaacaatggccagttgtgttcagggaatacacccgaaggctccctcagagctagctgtttgcacacttgtggatttcctcacactcttcacaatagcctagacgtggaccaagttcagatgcccatcaacggatctatggacggagagtggggtgtgcatgcacataggatcttacgaagccttaaagaaatacaagtcctaaagtttgcaggaaactgggtgtgacgggaaataagcatgttaagtggaataagccaagttcagaaagaaaaataccacattttctctctcatgtggaatctagatttaaacacctcaaccatcccaccatgagtgcattcctgtgcgagtatgcacccatttgtatctgtgtgagtgtatgtgtcagtgagtttgagatgtatgtgtgtgtgtggggggggtgtctgtgtgtgcatgttcaagcatgtgtgtgtatgtgtatgtggatacatgtgtcaatgagtgtgtgtgcatacgtatgtgtaggtatgtgtttgggtggggcatgcatgtgtgtgtgtgtagttgtgtgtgtgtgtgtgcatgcatgcgtgtatgcattgtgtccatgtataaatatgtgcgtatgcatgcatgtgcatgtgtgtgtgtgtgtgtgtgtgtgtgtgtgtgtatgtttaggacttgaaagtaaaaaggagactatgaaatagaaggaagagggtgaggagaggagacaaggagtaaggaatgcgtgcactgtgaaaccaagagagggactatgttgggggagaaaagaaaagagcagagggtgagcactggtgggagactgtggaaggtgacaaggacaagttataatgatatgtgtgtggatgtgtgaaaagaaaccccttcctctatgtgctaacaaaagtcaatgtgcactcataactaagaaatgcaaattgggacactgaaatagctttttaaaaatctataaaatttaataaataataataataataataataataataataataataagcaagtgaaaactgggcctggtggttcatgcctagaatctcacatgatagagaggaggaaaaagggatccaggctagcctgggctacatggtaagattctgtgggaaggcaggaagaatccaacactggaaaggatgtgggagacaggcagtctcagactttagggacaaagggctaaattgtgaaacctcttaggagaacattcctgcagtgtctaccaaaacagcaaacgctcacaagctttggccagcccggaagcaaccaagactatgaatcaaagtagctgcctgtacacagagacccccctcactccaggaaacatttgtagtctgttacttattaacaatatactccacttaaaattcatttgggggctggtgagatggctcagtgggttagagcacccgactgctcttccgaaggtccagagttcaaatcccagcaaccacatggtggctcacaaccatccgtaacaagatctgaccccctcttctggagtgtctgaagacagctacaatgtacttacatttaataaataaataaataaatcttaaaaaaaaattcatttggttttggtgtgcccgtgcttgagtgtgtgtgtgtgtgtgtgtgtgtgtgtgtgtgtgcgcgcatgcatgctcactcgggtgttctgctgtgcagatatatgtgccctaactctgctcctcatgattctgaagctagcactcttaactcccatctccccccacccccagcagtggatctcagacttcttaactctgcaaccctttcatatactttttttttttttgctgtttcataactgtaattttgctactgtcgtaatatacgtacctgtgttctccgattgatggtcttaggtgacccctttgaaggttgtttggccctcaagagggtcccaaccaacaggttgagacctgttttaaagtcttgtgtggtgatgtgggcctaagatcctagtcctcaaaaggctgtgaggagagagttcgcagttccaacttcctcaaatggctgggggagggtggagggatggagagaggaagggaaggaaggagggagggaagaaggtattcttatctagcgtttagcaccaggatttctagcaatggtttgggagctaaacttgaccctttgactcacactgccaaggtaatggtttatctttggacaccgtattctcaggactattaggcatttgttgtaatgattagtttttttgttctctcatgatctccttgtgctgtaagcgcctgcaattctgtttgctaatgttctacttaagatttattattaatttgggcgtggtggcatgcgcctttaatcccagcacttgggaggcagaggcaggtggatttctcagttcgagaccagcctggtctacagagtgagttccaggacatccagggctacagagaaaccctgtctcgaaaaagaaaaagaaaaaaaaaagatttatgattaatttagttgtgttttattttatgtgtatgagtgtttctacaagcgtatgtgactgcataccatgaggtggcttggcacccagggaagccagaaaaggtgctggattctttagaactggagttagagagagtcctgagctcctgtgtcaattctgggaattgaacctgggtcctttacaaaggctgccagttctcataactgctaaagttgtctctccagctcttgttaagatttctgatccagaacctgtaactgaaattatttctttccctttttttttttgaaagttacttcatttttatgtcatttttatcctttttgaatttcttgagactataatatggttttaatagttctccttttcctttcctccctccaaaccttcccatatatccgatgaaaaccatggcctcttctttcattattgttattgtttgtatctatgcatctgcataatcagcgtttgactttagacagccaagcgttgcgctcttttaacatagtccactgacttagcaggaaagcatcctatccctaaagattgtaaggataagtattgaatcctcttgtagcttttcaaattttcctgtcctctcctttacattctgactagtgctgcccctcttccctgggactagagatctaaccagggctctgagaagatgctctgctccttagctacagcctcctgcagctgtgaccgacaatgtacgcactcttccaaggtattctgttatctcaaggacttacagggctagtgctcccatttatgggtctacacacttataaagtttgtgtgattcattttcaattttgatttataattcttttatctttttaaaatttattatttttatgtgtgtgtggttctgggtattggatatagggccattaaacaacatatcacccccacacccacatataaacatcatataaacaacatataaacatattaaacaacatatcacccccacacccccaagaaaaccttattttgagacatagtcttaagttaccaggcctggcctgaactcaccttgtagcccaggtaggccttgaacttgccatcctcctggaattgaaggcttgaaccacttgttctgcctgggctctgtgctcttaagctcatctgcagtagatgttatttattttgctaaatatcagaatgaacaacagagttttacatttgcctatgatagaccaaggaggttcagtgctttgaaaccagcttttatattcttaactcaggactctcttctctctctctctctctctctttttctctctctcatatgtgtgtgtatgtatgaatgtttgtatgtatgtatacctcacagctatgcaaggcataaggtgtttgatttacatggagactgtcctagcattactttttggcataattaaacactgttaccaaaagacattggagagggaaaggtttatttggcttgcacttcgcattgtagtccaccattggaggaactcagaatagggactcaaacagggccagaaccttgagacaggaaccagtacagaggccatggaggagtgctgcttactggctgctctgccagctttcttatagaacccagaaccaccagcagccaagagatagcaccgcacacacagtgacgcagccctcccctatcaatcactaattaagaaaattcccttgtctgcatctggatcttatggagacattttttcaggtgaagttccttcctctcagatgactctaatttgctagtcagacagttgacataaaattagccagcacatagacaatctttttgttggtttgtctttgttttattttgaaacaaggtcttgttgtgtatcctccctgtgtgatccaggatggctttgaactcatgattatctatctatcttgattatctatcttgataatctatctctgattatctatcttggacctccaggggttacagatatataccactgctttttattagtccggaccccaggcaaagcacacacttccttatccaatgccaatggggggagggtttttccaacactgcattacttaaagcgccttcccagcattctggctttggacaaacgtcttaagtctaaatttctgtctttctagaatttgagacttgataggcttcagccatcccttcccttccctggggtgtcaggcaaggattctgggagggattgccttctctgagacctggagactaaacacataattaggaacaaataatgtgtgtgtgttatgtggtatatgtttgtttgtgtgtatatgtgtgtggtgtatgtgtgtttatgtatgtatattgcacatatgtatacatgtgtatatgtgtatttgtgtgtatgcatgtgtgtgcatgtatgtgtgtgtgcatgtatgtatttatgtgtctgtgttgtgtgtgtacatgtgtaggtgcatgaatgtgtgtgtgtgtgtgtgtgtgtgtgtgtgtgtgtgtgtgtgtgtgtgtataaaattcagtgtggcacatgagtgagatataagcttgggcacatgaaaagaggccagtcatgaagggcttatatggcaggttaggattatagaccaaactagtcccgagagtggacaagagaacattaaaagctctggggtaagataatcaggttcaaacgacaaaggaatgtaacaaatgatccttatattaataagagtatgcagcttgttagaaaacgctgaagtagattttgctggcggacgacaaccccagagtgcattgaaagcactaaccttgacattccacacataacacaagcaacacacacacacttcccccacctgttctgggtgtcctgtccattgaacatggagacattttagaaatacacagctcttttgagaatgttccccaaggttccttacccttccctggcccccaaactctgcgataagaatcccccaccacccccaatcaggaaaggggtgtgagcagcaggcagccaaagacttagaagtaccctgggccaagggccagggtctatttttaggacattctctcattgtctgtttatcccgcaaactcagcctaaagcgttcaggagagtgtcatttgggctggatggaggaggaaagcgaggtgctcccaagatgctcccgaggtgctcccgagaccaatgccagtagtaaagtgatcatctctagacagtgttatttcctcagcttctcctaggagctcccgaaacgaactgaaaatttattccagccctttccagcccctcccaccagttgtaggaatgtgctacttcacaaagggaagattgttgatatactattaaagttttgtttaaagtatgagttctactgtgctctgttccagcgcttcctgctctaaaagcaatactacattgacaactggaaaacagagcgccccctaacagcctccggtcatcttcctcctttgtgcctttctcccgccaagagacaatgcgtacattaaccaaaaaatttagcaaactgttttaatccagtcacaatgcaagagggacagtggttcgccttgtgtctcgttttatattttcctcgagggacaaaataggtggccccaggaattccaccggttgtaaaacgcgccacagaaatgcgagctgactaacagcaccttaaccctttacatcctgcagcctagacctgattttaaggacgtccttcccgggtcccttgtctccctctttattcctctccggcagccagatccttctcgtcaggtggctctctaatttcgctgccctctctggagcatccgagagacccagaggatggtctccgaggcgggtccagagtcccttaccggcaaccgtcacggtcgtccttaaggacctccgcccggcgccagtaaaggcgggtgttttgttcttataaggagcaaaaagtttccgtgacaacgcggaaatgagtaactctgttgcccagtaaagctgggcgggaggagtccaggaggcgggagccgccgcggtctagtcgcccgcatccctggatccccggcagcctgcagacccgggaccacgacccgcgcttggagcgaggcccactcggtatccctgcggcggccgcggccgaacgtaagtgcggggttcgactatgaggctttgctgcccccacaagctgagtgtgtgggatgaagggcgctcaggggacggaggatccccgtagatgtgcgtgggagatcgtgaccaggagctctgagtgacgtctgcgggaaccctggccgggaccgaccccgggaactcttttaatgcacgcccaggaagtgggcattatctccctcatcactctccgggtgtgatgcactggggtctctctgccctcgtctgcgccacggagcccccagtgccttcagcaatctgagaggcaggcggcttctgcttcggagcccctagccgtgccacgggtttgtgcctagagccgggaccttccatctcttaaaccgtgttgggtagccgagtctcagtcctgggagaaaggaacgggaatgacgttagtttcttcatagcttgtcttgacgcaaggaggttgcttcaggccggatgaagcccctgccacttcctctttcaagactcctagtgaagtagaccctgcacgtttttctcttgggctgtgtagtctatgccccattctcaaggcccactctgagcctccctcattctggctgacaggtgaagagactcagaagttcctaaccccgattccccgtacaaaatgggaaaatagtgacagaaccagggaagaactacatttagccttttgcccctctacctagtatgagactggtcattcttgccaaaacagaagaggccagatactggtaccatgtaagccaatgtcgggtggttttctgttgcctttcggatttcttctcttttacaaactagctctgttttgggagaggctaccagctgaacccaacacagctttgtgtggccactcgtccaggtcagcggtgagaagggtgacagaggccgctgtcattcgcctcctgcctgcctgccagcctggtatgcctaagtggccttcgttatttgctgattccgtgtgaatgtctgctgccccaggcattctgccttcagatttttccacttgtgggtaaccacgtggtggttatattcactttctgcctggatccctgaggaagatggggagccctctgctcacacatctccctttctgtgggtaactttcttagacgcagcagtttaaggttctgaaagggggcagagacctgaacttttaacctgatgccatcatcccaaaaattgttagctctccgggccaggagagaaacataaagggtgtgtgggtgaactttttaatcagagggcaagaaggtgccgcaccttctgggagataattgctcactgtctgcaagatgcctggttttatggttttcccttttgggaccctctgggattagtgtcagacgtagtcctgtttgacaaaagcatgctttgtctccatggagtcagcggtatgcacctggcattctgcagcctacaagagtgaggctgggccagcggagaacactagcccagttctcaaagccacttgtcagggacacagtgctggcaaactaaaacctgtccaggggagatgggctgagattatgtggacagtgaggaaggtacatctggtgagaaaggagggttacagcagatataacccagggatgagctgcacaggggtgtgggtgtggctgtcagctgttccaagcattgaaatggcttgctcagtctggcctcagagtccctggttagaacggagatgcagctctttagagaacagccattggagcccaaggggaaatgtgctcgaatcagtgtgagcagaggttttgtgtatgcctttgtgtatccatgtttggaggggaaaggtacccccctaataaggatctgagggtgctgcagtctgtgaagctgtagtagtctttccaaaaaaaaaaaaaaaaatcgaaatgtaattcatgctgaatgtcagtccgtcttggatgccctcatccagtcataatagaactctgaggatgctgagagcggacggtagcctccaaggccaccagtcctctgtgtgaattggaatagggtccccactcttagcaagaggatgctatttggtgccatataacacaaggacctcatcgccaagcagctgacagtcatgcatgctcctgcagcctggtcttgaacaaaacactaactgaacaatcattcgtagcagtcaattattgagagtttaacatgggctgtagagcttgctcggtggttaagagcactggctacacttccagtagctcctttaccctaactctaggtccaggaaacagacaccctcttttggcatccaaggacctaagacatgcaagtggtacccagacaaacatgcaagcaaaaaaacccatatacataaaaatttttttaaataataataatttttaaaaagaatggcaggctcttcgagctgtggaagggaggcagtcaggaaagaggcaagcccagccttgatggttgatgtgaggtttggccaagcatcaaatgaccttcttggttgctgagtggtgcaaggtgtgaggtggcagatccagtttgcatcctggagtggcagggatgagtaagtggcacctgggtgtggtgcagagggaaaaggtgacaactactggcagggtggagtttcccaagaagtaggagatgaaagagatcacacacacgctgacttgctcttccaaaccctccatcccctttgtgtcctcttcctgtccccatgaaatcctgtttatgtgcatgtgtctgtcccaatgcagtggaggaaaccatttctaacactccttctctccgctccaactcaaagattgctcagctcctataccatctgtctcagcacttaattggaaggagccctttatttttttcttttattggatattttatttatttacatttcaaatattatccctttgccccagtttcccctctagaacctcctaacccatcccccttcccctgcttcagtgagggtgttcccccacccacccactcccgcttcctggccctggcattcccctacactggggcattaagccttcccaggaccaagggcctccctttcaattgatgcccaacaaggccatcctctgctacatatacggctggagccatgggtcactccatgtgtactcttggctggtggtttagtccctgggagctctggggcatctggttggttgatattgttgtccttcttatggggttgcaaaccccttcagctccttcagtcctttctctaactcctccattgggaaccccgtgctcagtcccacggttgagtgtgagcatccaactttttatttgtcaggctctggcagagcctctccggagacagctaatcaggcccctgtcagcaagaacttgttggcatccacagtagtgtctgggtttggtgtctgtatatgggatggatccccaggaggggcggtatctgcatggcctttccttcagtctctgggaaggaacactttaaagcataagccatccaatgatgcttggaaccagcaggttgcctttaagccgggtgcatcctatcacaggccttggctgcttatagccgtgcccactaagaggctgtacctgcgtgtgccttagaagaggcctcctggtagaatttctccttttatgttttcataatgcagcttccccccaccctcgtgttacttgtttgcttagtgttttgcaagcagtaaccctcagttacacatatttgcataatgtggacatcatacaatctcagggttgtggggcttctttctctgctctatgcaaatctgtcagatgctcaggtgacccagggagccaatgatacctagtacaagacaaagaaacacagcccttacttagcactgaggccccaggagtgaaaagtaaggggaaccacttagaacccctgattaagcccagaagtaagggaggcctaccaaggacagtgtccctgtctgctgcctcaggccacctgccctgtccagctggcctctttctctctctctacctggggctactctaggttcacaattactgagccatattagcagatgccacagaatcaagatgtgacctgcacaggctttagactgggtaggcctggagttgagtctctgctctgttgctctgtaattgggcgttctcaaatggttgagcactgccttgtctactccaagtctctgtttcatgtgtaaaatcagaataacccatctcaggcatgaattggataagaagcacttagcacagtgcctggtccaggccatagtgtggctggttcaagcttcctcccagttcccatcaggctaacgctaggggatacctagatgcaggggatcagaggggaacaaggccacagggacccagactgtcccatagggacagaagctgaggacaaagctggtgcacagaaaataaaggaaagccagtttcaagcttgtcccacagcagttgcccagacaggggatcatcatggggaagtctctagaggacaaaaggtctcttgaaagtgtccacaaggccctctagggtcctcttcaatggttaacccccctgatatctttctcatagagaatatgtcttctctgtgcccatgtgccccacccggtgacatcattggaatggaggcccctcagatggcattactgttgcccaggtaacacctccaccttaaggcagacaggaaggacatataccagcatcaactgtaagacgcatgttccaggaaaggaccctagaagatataactaccacaggtgtgtttcccaggggctctagagagggcgggccttgggtggaagctgacttggtggtctgggctgttgagctagttggttgagggtcttgaggccttaggtgtgtcccaaggggaaggcacagtgatgactgctccattctctttcttctctgaggcagactgactgcttccgtagcttgaatcttcaaggaggggtgggaatcnnnnnnnnnnnnnnnnnnnncagggacccagactgtcccatagggacagaagctgaggacaaagctggtgcacagaaaataaaggaaagccagtttcaagcttgtcccacagcagttgcccagacaggggatcatcatggagaagtctctagaggacaaaaggtctcttgaaagtgtccacaagcagacaggaaggacatataccagcatcaactgtaagacgcatgttccaggaaaggaccctagaagatataactaccacaggtgtgtttcccaggggctctagagagggcgggccttgggtggaagctgacttggtggtctgggctgttgagctagttggttgagggtcttgaggccttaggtgtgtcccaaggggaaggcacagtgatgactgctccattctctttcttctctgaggcagactgactgcttccgtagcttgaatcttcaaggaggggtgtggaatcgtctgatggggtggaatagcaccagaaacgtgattttcccatggccttactccatgtccttactataagggtttttcactgatcaagtaaatatgacaatcaaggccctgtcttagggattcagtagcctcagggagctttataacccaaggcagggaagggaaggaatgtgcgagccactctctaagaggcagtcagttacttaccacccttctctcactggccttgtgggatcctacccatggtaaattagtcccatggagtcctccttttatctttgggagctcttaactggaagttaagggttttttttttttttaagatacttggtaatttgggagcggtagtagagaaggcagtcacagctgcccactgtgtcccatcaaagggacacactgaggacagtactatgcaccctctggactcacggcaattctgacacccttaattgctggcctgtggcttcggcctcatgatctaaggtgatgcctgctgctgtcccttcggacagaattcctaagcaagggctgccatgagccaactctagcaatgaaagatgcaggtgcaggcgaggtgctctcccaaagagatgtgggaaactagatgacctgatggatctgtctctgcaagagcctcagagcccaaggcctttcaacttcaaagggccttattcaagtctgtttggcgcaagtagacagaacttcatatgcttccccgtcgtccagcaggtcagtggctgaagcaatagtcccgatttttacgtgaacacagcctttttaatggttctaactgaaaattaaaataaccttagctgggtagacatttgcaaggtcacacttctacttgtgcctcccccccccaaaaaaaaaccaccacccgtcaagaccttttattatttactatttttattcctactagcagaataatctttatagaaaacacccaactttacacactgaacacctgttcccagcaaagcccgcccacgacccttcacatacatctgtttctcgtcctctcaacagcccctcaaggcacttaagatttctagataaaaggaacaggctgagacttgccctatgtccccctatgtccccaagacatgattccaacctagatctgtggtctcccagacctttctttctccacttcaggaatctgtgcctagactccgcagcccagagactaagaaagtagcatattggataccacagcttgagggtcaaaaatgagaagctgggaggcaggtcaattccaggcctgagccttcaacccctacctactctctgagcagagggaactggtttcttgtccgtttaatgatgatgctaacaactactatataacatgtaggctatacatacataggatatatacaacatgtaggctatacatacataggatatatacaacatgtaggatatacatacataggatatatacaacatgtaggatatacatacataagatatatacaacatgtaggatatacatacataagatataaacaacatgtaggatatacatacataagatatatacaacatgtaggatatacatacataagatatatacaacatgtaggatatatattgagatgctcccattggagtccctggggagagcacagaatccatgttgaccaagagatagacatcccatgagtgaagaccattcatggtttacccaggaggaggaacactacttcagagctgccctgagctaccactgtggatgcccaaagtggctgcagaagagtgccccaccagcagcatgcaacctagaggaatgaatgctgtcagcaccgtgatccttcctgttgaaagaaccatgagctcatagcacagttcccacgggagcctgttccaatagccctcttctatagaagcagtcaggggtgttacctcaagttcatgaacaggtcctttgtttgctgagacttttgttctggatctccgaggaggaggaggaggaggcaggacagcaccccaggctagaagagggaggcagaggataccaggctccctcctacatcctgaccatccatgccctgttccttccttttgctttaacccaacacatacaatccccgggccctgtcagaagatcgccattccttttctaatcgactgtgagaggctcaacaggtcacacagtctctctcagaagacgcttcgtgagtttcattcagtctctccatatccatatataaaagcagaggactccctccagaagcacacatccaatgttccacagatatgctactgagcagtatagcaccgtgggatactgatatccctcccctgacgtactgggcgagtggcctcactcctctgtgcctctgtcatcttacctgcagatgggtacaaatgccttcctcagggattgaacctgagaacgatacatagaaagcgcatggcacaaagcttaagcatccgttatcatgccttggttgcagctcctaagccctcctagtgtgtgtcgacgccagaaacttgtcccgatttctccaggagaaacacgtgcttactctgccttactaagccgttatcaaactctgtaatctacctctgtttaccttctacgtccaccagacttcctcgaagggcgtgaggtggtgaagaccttataaaactttctgtgggactcgttcttagttcttctttgtaaacactggcttgaagtgaaggcctatcaagaccaaagagaacttacagctgttttccgggctacatctgcaaaggggtttgagtcaggttggctggtacttgctgctcatcacagttagcctcgcttctctgagtgtagggcccctcccagaaagtctgtctaggtgtgactccaactgggactccccactccactctaagaacagcacacgtctgctcctgagaacaagactccatccattccctcatctattcacatgttcagcgagcattcatagcacagctgcctgtactcggctcagaatcgatttcgagagccacagtggtactggtggcccactggagtgagaagaatgccggtgagactgctacatcaccagacttcctcctctccttctgtgacctttagaagaagggggaggaggaggaggaagagaagggagagataacttagtgtgcacaggcttttgaaggaggccattcactgtcccaaaggaacaacgcagatgccattttggaagcacaacaccgagtatgactgtgcagtacctcaccagttggctataagccaaggaacaggtgatggtgtcattgtgcatggcagagtcaggacctcatccagttcttctgatcacacacaggcccctctaagcatctacaaagtattaaagctcttcctagctgaagagttttgagtgtttctaggtggcctttcgggggaggggtagaggtttgtgcgagtgaacttatgaatttgagtctgacactatccttgggtgctgatgggccagtcatcatttattgtgttcctccggacccttagggcatgccaggcacggcccaagtagagcacacatcatcagacacagccacttcgtccttcatccccgtggctggaaaatgatgtggtatgtttgcttgcccttgttgttttgctttgggtaactgataggagatacatggctgtgccgttacagataatccaaggagtaatgttgataactgttccaagctggactgattaggtcctctgtgctccagagaggagaatgtgttagctctgaccagcaggtatgggagggcagacagacagactggcagccattctgctccgccttcatcccagcacaggaacctgaggttcagcacaggcaaaggaggtgaccacaactctgggctggcctccttctcctctttgttcctctttaagaagatgaaagggctttgagatctttgtaggtatagactacccccacccgtgtgcctctctctctctctctctctctctctctccctctctctctctctctctctctctgtgtgtgtgtgtgtgtgtgtgtgtgtgtgtgtgtgttctcgaatgcagagatcactttctctccacccatcctctccctcctctcctcctctctctagccatctggggcccaaacactactttcaggtactgcctgagcctaaggagagtgggctgggaaaagcccttacggtaggggcttttctttggcggcagaaatgtcggggatatgggacatcctcctctgtgcccagaggttagaggtgctggagaattcagactggctgtcttctgagctgacttttgttctcatgctaggatcaaaaagaactggctactgagctgttgggcaccggcaattatccatcctcccccccccccagctcctctggaaggggaggggaggagcctggggaggagcctgagagggctttgttttcctttgtgtttattcctcggttctgcttaagccttctccctttctctgcgtccagcagccaactctgcttggcttgggcatcctgctttcaccctgcagcctgctctgcctgctccaccaagcggggagccttgggacgcagggtgtgcacaaaacctcaaggtgaaaaagggtgcaagtgggagccctggcgtgccctggcctcaagtcccctcccccacctggtatcttgagtgtgtgtgtgtgtgtgtgtgtgtgtgtgtgtgtgtgtgtgtgtgtgtgagagagagagagagagagagagagagagagagagagattctgcttggagtattgagccaacccagtacaaatctcagatgtaactaacagctcattgctgggactcacggtgccagtttcagctttagaatttttggaggaatcctaggggtctacagagccccacccnnnnnnnnnnnnnnnnnnnnnnnnaccccacccccgccgccactgtgcactctgggaaactcatggagagagtggtcagtgaaataggagagtctgagtctgtgcagccttgcttggaaagtgtaagctgtgcgtcttgggcactgtgggcaggtccatgtcaggaactttagagaaccatggtggcaaagaagcccctccctcccctggccctggagaagcctaacagttaagaaatgcagctgactgatgaggccagagggagggatgtgcacaggtgtgagcctggagcttgaatgacctcaagcagactgttcaacgttagcactctggcttcccacctgtgaggtaaggctgaggacgctctcccccggggctgcaatgtgggataaaacactaaggttagaggcccagggaacccacacgtgggtgtgcctgttgcatgtcagacacacctatgaggtgccccacctacaaaggcaccagacgcttgcctgcattcagagccttggtaaatacgtatagtgccccttcccttgttctttcccttcaaataagaaggaattatcccaacagtcagaggaatccaggaggctcctggaaatggtttgtggaaggagcttatagaagtcattgggtagagctttagcttacagaacctgaggcacggagtgtgagacatgcaggacagagggtgatctgaggtgacgagggaagcaagggatccctgagtggctgaggccaggctctgaacataacacctaaagctttgatctcatggagtggaaagaggactctgttgaagtggtggggagaacttcaggactggagaagcaggaaagtagagaagcagggtactggggagagcacagagcacctcaccccaaaagcctgtgctgtctcacatgccatgggtgcaaacctaaggtcagagcagagatgtctggggagtcatttgctgagggagaggaggctactttcttgttgagacttgcaccagtctcctgcgggtgttgtaacagggtatcctcagggccatacgattacctattccagaaggactgactcttccttctttctcccagctcagatgtcccttaattgacgtagcatctcccatctagatgtgtctgtctcccgttgcttttttcctccatcttatcctttctgtctctcatggatccaggatctcatctcaaactccttcatcttagcacatctgcaaagtccctttgtcccaaggaagatcgcttcagggtccggtagggtcacatcttcttgaaggctgtcattcggtccacagggtgattgctggattccaggtgacctaacggtaataaatggaagggaagagggtgtggtcagggctcagggatgccgtccttcctcctgccctgaccccatcctctgtctgtctgttcccaagagttagttatctgtgactccctgtgcgccatgtcctcagaggcacaccgtgtccttcctcggagagtaacgatttccctgccatgcttaatgtggacacactgactagcaggaaggatggaaccctcccgccaaggtccgcagtgtccaggcccctgtccttcctgtcccttgatggccctggccactctcatgaacccagttcaggcaagaggatctgcatcctggtggcttccttgaagcccctccctcttagaagatcgcttttggagatgtgatctggtatctcctttgggtccagcgcagcatcctcatgtgggcaacatagcctacgacatccaagggatcaccaccgacccagtaggcacttcccactagctccttggtgatctgctcagtcaatctaggtgtcctccagcttacatacatggatttctctggtctttgggaaccataagccttttgtaccataccctctgttagtatatacccttgggactgcagactcttcgaatccctggagaagctgtgtgaaagagagcatctaggtaaagcctcagcaccacaggcctgacacacagtcatccctcacatgccgtcaggatgacagggtggctgctaggctgagtaggagatattagagtgatattagactaggggttgggcctagccgggggaagtagtcagtagttatgccaagtcgttgctgaggagtttggaggcaggagcctaaaggaatacttcctagcgaagtgaggcagagagcagcaaagaagcccagcaccggtgccacggagctacagatgggcgcacaggccctagtgaaccattgaactatctgactggattcaggaggggtttttttgttttttgttttttgtttttgtttttgcttttttaatattttttattaggtattttcctcatttacatttccaatgctatcccaaaagtcccccataccctccccctgccactcccctacccacccactcccactttttggccctggtgttcccctgtactggcatataaagtttgcatgaccaatgggcctctctttgcagtgatggctctctaggccatcttttgatacatatgcagctagagataagagctctggggtactggctagttcatattgttgttccacctatagagttgcagttccctttagttccttgggtactttctctagctcctccattgggggccctgtgatccatccaatagctgactgtgagcatctacttctgtgtttgctaggcccggggtcctttcagcaaaatcttgctagtgtatgcaatggtgtcagcatttggaggctgattatgggatggatccctggatatggcagtagagggtccatccttttgtctcagctccaaactttgtctctgtaactccttccatgggtgttttgttcccaattctaagaaggggcaaagtgtccacacttcggtcttccttcttcttgagtttcatgtgtttcacaaattgtatcttataccttgggtattctaagtttctgggctaatatccacttatcagtgagaacatatcatttgagttcttttgtgattgtgttacctcactcaggatgatgccctccaggtccaaccatttgcctaggaatttcataaattcattctttttaatagctgcgtagtactccattgtgtaaatgtaccacattttttgtatccattcctctgttgaggggctgtttttgtttttttaattaaccagtactttaaacttggaggactctgataaaaaaaatctcaatgattggcttctttgaccattctgaagtcacagaatgtgtactgcggcccattgcctgcaggtaaagcatgtgtcatcccaatggccaatgcccccactactccgtcctccttgccagcctggcttgtttacccctggtgtcctctcttgtctcctccccaacaaccttggctttaccaccactgctccagggagagcaactgaaggcaagaagggaaagaacggagcgggagaggcagacagtagagaaggccggggccacaaggattctgggtaaatgaggtgggggggggcggaccacacccttttgcccactttctcaattgttctggttggtcttcttccttcctctttctttacttcctttctttgtctgcccctcccccctcttttgaggaggactgccatggcccagcccccaacagtgatatcccgccccatccctgtgtgggtacagatgaagaaaggtccagccagagatgctacagtagtgtagtaccttgcatctcccccggcccttgcttggacaagggccagctttatcaggcctttctcctcccccatgttctaaaatgttagtgggtggtctcatggcaggcagtgtacactgagctgaggtgactgagccctggtgctgggccctgagttagccaacagtcaagtctggcagaggcagatgactgccacatctgcatctgccatgagtatctcccaacacaggctaagtcagcaagtcagctctaagtcagctctccctgacaagctgggggctgtgtggtgtccagcccacgtagggggccttggaagctgcaggaggatgcttgatttgctgtgctggacttgtggctgagaaagcagaaccagtggctaggctgatagagtggagggcagggcagtggtccaagcttgcagccattctcagaaggggtgatggggttggcctgctcccaggggaagctagtcggctccacacccctaaagaaagtgtgcggttagagatatagaaagaaagccgggatattgaggggggggtctctacagggcaggctaccccctccttggattccaagaccccaaaccaagacagaggccaaaatgggctctgcagtcaaccgagccttcatgatgcggtcctgattctcccgggtctgggatgtgtgagagagagtaatcctgatgatatggtcagctgccacagccacgggtggccaggaggtgcctgcccccaggcagcaggacgtaatggacccactcgctcagttccccctcaacctccggaggactggagagagggcagagaaaaggccaggctcagctgcggagacgctcacttatgctgcagaccatctgtgaccatcggtcccttctgtaagacagtaataatatggctgccaacatcatgttctaaagctaaacaaacacatgcagggtgctaagcactgcccggcatgggtaggcaacatacaaaggccaagccttgtgcctggcatgggataacacttgcagagtgcttagtgtcttacctgacatgaaggaacgcttaataatgaaaatatcttccttccttccttccttccttccttccttccttccttcctttcttccttccttcctttcttttagtttttagagataggatttctctgtgtagccaacttgttctgtagaccaggcggcctcgaactcagtagatccacctgtactgcctctgcctcccgattgctgggattaaaggtcatgggccacccttgcctccattgaaaacatcttttgctattcttctgcactgaaattcctattagacgtcatcccctgggagggcccagagagaactcccattctacctcagccccctctacatcaccttccaggtccaacctatctcctctttgggcttcagtttacaaatctgtaaaatggggcttagatgagtacaactctaaattctgactttctttgtattggctttatttccctcacacagctgtgagccctatcatctggaattggaaactctgtgactaggcacacagtagggttcaacacggtcaggatagtctgctcttcttgattcctctcttgaagggtctagaacttagacagtgcggggggtggnnnnnnnnnnnnnnnnnnnntaccagcatccacctccttcactccactcagtgagaaagccatcagatgttcctcttggctagactgcctctccaggactgtggctgctattgtaattaattagccaagctaattacatctgacaggctggagaccttggcaagctccaaaatccagctgtgacactgcgggagccccaccttccttctccccagaggatacctggcttagacacctggctttggaatgggtgtccctcagacttgagcagggggcggggtggggaggtccaagaaccaccagggaagtttgctataaacacggggtgttggtctgtcccctggcattcctgatcagcaggcactgaaatgcatctgtccagcaagtcccgaggcgaggcggtgctgctcctgggagccttgcagagtcacaatcccagagggaggtactcagtcaccgacaaatggcctgagatccttcagtggctaagattagagtcatccatccaactccaggtggcagtaggatggtgacggggcagaaagagaagggcccgggcttgttacagaattctctggaagaagggaagggtgtcaatctagagccagggacctaaccccaccaccacccccaccaatatggggagggagcttcaaaggacagggataaggctcctctatgtgttttcgtggctgtagttcactggcctcttgtgccccggtgacagcgtgctttgtggctctctgactcccacgaggactgtaaggttttcccatcggggatggagtcttgcccatcattgaggatcctgagcgcccagctctctcccaacactcaggtgctttgtcgcacaggcagacgcaggcagagcagccggaattccggctagctctgacctctggtgtcacgtgactagaaagtcctttgagctttgacaaagccatctgtgaaacagggatcacagccacctgttggaaggccatggtagtcactgtggacagtgctgagcccagcctagtgagggctcgacagacaggagctatatccagtagggtttgttcaccagagccattgtgtgaatgctccagagggcagaagggaccccagtaaatagctacctcgcggttctcctctagggccttgggcttctgactaaccccacagaaagagcctggtacagtacctgtcctggccaccacattcacccagacatccagaggtcaccatctttctccagcctctgtaacccaagacctggccttttgccaggctaaacttagctatttgagccactctccctgtgggctaggctggggtggggaggaatttaacagacttcctgtctgcttcctggcaagcaagcaaaagcccactaaataacccaggtttattcccgaagccaaggcctgcctgccaacagatgtcacaagccacaggtgtgggtcagtctcaaagctgacagctttggagccagcagaggcaggcagacatccttggaatggggcgatgccaccctttggggaacggtgtttgcacatgtaagtgtgcatgcatgtgcgtgtaattttggtttccaagagcttcagatcagaacacaaaatcctccctgcctccttccccaggaccttcagggcaggggtccctaattaactggtttgggaggcagacgagtagagacttcaattgcagctctgggtggtaggcacagaatggctacaacctaatcagtatcgtggcctggctctcctacgccgtccccagggctctacagcacacatggggttagcatgggaaggaatgacatctgggttaggatccctgggcagaaggtgatggataagtgggaactgagtcagcagagagcctccccactcgcaggaaggtccgggctctgaaggattctccccatttgctggcggtggggaagggacagggtggaaggagccccgtgccaaggaacagaagtagcagtggagtgttttctgctgccaaagcatttcccagtgtgcgttcctccacaccctgagacttgggcagggctggtgagaacacaggcctgtggaggctcctacctgtgggacacctgctccatctgtgccaggcacttaccaagcacccgtatgcacttgacctcagcatccttgcaaagggagggctgctctgacctcttcagatgaggatgggagcccagaggaagtgagtgggccacttgaggtcacgctgccctgccgggggtagagctttgctcaaggccggggtccactggccatctccaaagatggacgcctttgtgtttgctgtgctgtttgcctggtatttctgacaaaattcgtctgtagcccttataggtgctgcctgtgcccttccagagccccctgcaggcaggggcacgtgtctattctcacctgtcaccgctactctttgataagagcagttgatcagtggccaggacttcactagggctctaaggaatctctccttattcaagcgaatgacaccaggaacctctcttctcgtttgacagatgcagagatgggattggaaaagccgagtcatttgtccaaggtgcccatgcttttcctaacaattctgtctcttccaagtgctcttaactcctgaacaaggagacttgagagtcgggcatcctcttgcaggcacgaagctttgcttgggtgacctagctaaagctcttgtatgggggaaagagaaccctccagtctgggaattagtgttagccacactcctctactggtggtatgttctccctcctcgggtgatacggaaactgattccttcctatgatgggagttgcatgggttcagcggtgcccaaaggccactgccttggaacctcttacggtcacctagctagctggctgctggtactccatttaaagccctgagccatgagccagcatgaaccaaccagagttctgtcctcgggccgtccgggttggtcatcctcaactgtttctgtgttgaggacaacatgaccacactgtttctgcaattacccagcatgcttttcccggctcaggagtgggaggctgccctcggacacaaccaccaccgcccccgcccccatcctaccctctactagtctgacgtgtgtactttctcttatcccttgcttcctgtgtctagaaacctgtgagttcttcagagctgagcctgaacttgcctcttccttccctggggctagatctccattcccagcccctttggatcctgctgactagcgactttgactgcgtgtaggggtggagctgtctgagtcacatttgaacagtagcttgccctggaaagcagtcagcgcaggctacgagtgtgtgtcttcccctcgctggagaatcccacatgctgataaacccctttcccccaaatactgcaagagtaagaattttttcatacaagttcaagatcagggaactctagccgaagagcctggaaattcctgtcagccagtgttggctcaccccaggagggtaggcgaagccctttgggttcttctctttgctgtccaacagtctcaagatcttcgctctcattgcagaggtccctggaaggaaagggactgggcaggtatggaaaggggtagacagttcattgccaaggctcctgctgagagatgagagaggagaggtaaggttactaatacagcagtgcctctcatccttgacctccctgtggtgcccaaacgctgaaggctgcgtatactttgtcttatcatgcataccacaagcatgcagtgctcgtggagaccaggagagggcgtcagatccccctggaacaggagtcagacagtcaagagtggcccctgtgagttcatcaaacatcagctctttgaaaaaaggagccagtgctcttcactaccgggccacctctccaactctaaccccttcaggatgattttaaaatacagattctgacggaggtgaggagtggggctgcaattctgtgtttgttttttatctctctgtgtgtgtgtgtgtgtgtgtgtgtgtgtgtgtgtgtgtgtgtgtgtctgtctgtctgtccgtctgtctgtctatgtccttgcagaatggaggagggtatcaactccctggagccagaggacaggtggtaactgggagctgtgtggtaacagtgctagaaaccaaacacaccctggctctctgcaagagcagcaactgctcttacctgctaagccctctcccgggcccctatcttgttttctggtagcctcgttgtgtgggccaggctaaccttgagtccacagcaatcctcctgcctccgtcccctacatgtgtcagcctcagctccatcccggccagtgctctgtatatcacaatctgagttgcaaagattgagaatttagcttttcttcccaaaattacttatttttagcatttttaaaaatttttttattagaaattttctttatttacatttcaaatgttatcccctttcctcgtttcccctctgaaaaccccctatcccctcctcccccttcttaccaacccacccactcccgattcctggccctggcattcccatacactggagtatagaaccttcacaggaccaagggcctctcctcccattgatgtctgacagggccatcctcagctacatatgcagctggagccatgaatcccaccatgtgttatctttggttagtggctttgtccctgggaactctgggagtactggttagttcatattgttgttcctgctatgaagctgcaaaccccttcatccccttgtgtcctttctctagctccttcattagggaccctgtgctccatccaatggatggctatgagcatccacttctgtatcccaaaattatttaagtcctaaaatcttaatgttttagagaaactgttgagaggtcaggttcagagttcaaatgctttgaactccactggtggagtgacatcaacccaatggctctgtggggatagtattatcttctttgtctaaaccaagaaacctaggctcagagaggtgagttaacacactcagcatcacacagcgtcactacccagtgacaggactacctgggaacctgcccttcttaatcaccaggttttattgcaggaaggtacatccgctaaacaaaaaccagtggaggcagaaagcagcatttggggcctcatagctctggtggctgaagaacaacttggcttagcttaaacagaaagggcatctttattgcctcgtctgattgcaaaaaccagaagcaacggtttcatacacatctgggtgtgggggtgagctttcccctgtgtcagcagcaggttccccttggtcgaagataaagagcaacccacactgtagatataaccctgttatcgacagccctagcaacaaggaacacctttcttcccattggctcacattgttcatatattcgtcacagaaccaatcggtgtgggtgtaactgtagctgtggtggaatagtcttgttgtcttgggtttggcctctatgctcccttctggatttgagctgtttatatctaccttagccaaaggtccgggagcatagaaggttggcccttggagtcaagagtgttccggcagacagaaggaaatgtctatgatacatataagccttggttcttcctctaagggtgaacaggagcacaggagatggtcactggagacagctatcggctgagtgtgagagccagaaccatcaccagctcttggggacggaggctagttcaaggatccagggcaaaaggtccttgaaggaaacataggtgtgaccagcagtgtctttctctgttcctaggacagagactgcagctatggccatggaactcttccgggtctgtctggtcgtggtgacagccatcattaaccaccctctgctgttcccacgggagaatgccacgattcccgagaacgaggaagagatcatacgcaagatgcaggagcaccaggagaagctgcgcctggagcagctacgcctggaggaggaggtgtcacgtctggaggccgagaaggaggctctgcggcaggtggaggaggagcagcagcagctagaggcccacaccgcctgggacctctggaccacactctgcatggtcctcttcctgatcatcgaggtgttgcgacagaaccatcaggagggcaccttcccggagtgcctgggtggagacgaggacgagctgtcgggactagggggcacgctgctgcagggccttcccctgcccaatagggccaccctggaccacttctacgagcactgtatccggagcaccacgggggatgccacccgcacccaggagtttgtggaaggtttcgtggatgatctgctggaagccctgaggagcacctacaacgggaaaaccgacatggaattggaggacttcatcggcgtgggcagcatgtatgagaactggcaagtggagaggccactacggtgccacttgtttatacccttcatacccccagagccctacagcttccacccagagttctggtgctccagcctttcaacgcccctggaacgtcagggctatggccagatcaaggtgacgctggctgacgggaaccctctaggctgtgtctgcggcaaggctaagcttgaggaggatatgttgtgtctcctctacggcaagaatagaggggcgtggcccagcagtgccgggtgcggtgagatggagggcttgctgtgttccagagagtcctcctatctcgatgtcatgcaggtcatgaagtggtttcagatggccctcaccagagcgtggcaccgcatcgcccacaagtatgagtttgaccttgcctttggagagctggacaccccagggtctctcaaaatcaagttccgctcggggaagtccatgcctttcatcttgactcctgtgatccagtgtaatgactcagacctgtacttcatcttacaacttcccaaggagccctgtgggggaggcccagcctccagcgctcactggctcctgtcctttgctgtctatgagcgagagttcctccggatgacaggcaaggctttgccagagggtgcctgccacctgagctgtttgcagatcgcctccttcttgctctccaagcagacccgtctgacgggtcccagtgggctgagtgactaccacctaaagactgccctgctgcatctcctgctgtcccggcaggcctctgactggaaggccagcaagctggatgtacgcctgcaggacctcttctgcttcctggagaggagcctgctggagaagaaactctatcacttcttcatgggcaaccacaaggtgcctgaggctctgggtctcccagaggttgtgcgcagagccgagcctctcaatctcttccggcccttcgtcttgcagcggactctttaccggaacacagtggactccttctatgaaatgcttaagaacgccccggcgctcattagcgagtattccctccatgtcccttcagttcgtgccagcccaccaccaaaagctgtcgtctcgtagtagtttaagatttgggggttgaggagggagagccatcccgtgcgtcgaccttcctgggccctgtgacctcacacaggaaacacagtagatctagagggagccgaggctcagtttcccaggaagccaggccctacagagtgaaggaaacaagagttacaactagacgctggtttgcctttccgccacgggggcttgttggtaaaaccattgtttgggtttgggtaccaatcgtttgtagcttagttttagatcactatgaacggccaagacagtgaccacacagtctctagggtactgagttagagagagcgcaagcactgaccagaatgcagtcctttctgtagcatagtccgttctgtgttccatagcaaagaggagctaccaggatggtgctggggatctgagacccagcactgcaccccaggcgttccaggccccagccatctgcagatgaatcttgaatggggacagatgtgggaattcacagccttggaaccgcatcgtgcacagtaatagaggtcccacagtggctgagttggctaaaagaacctgccagaaggctaggggcctggtggctaatgtctccactacagagaagtggggccttggtggtggagtgtctaaagctggccagtttctcaggcacacatcttactcaggtgcatcccctgctgctctacccttgtatggggtcccaatcacagtgggtgccatttaccacactgggtgctggcccagaagcccctctcctctctccgttgctggtcttaccagccagcagtatggcagaaggacacagggacaaagttcgacccactttgaggaaagctagagatccctgggacaagggttaggatatctctaacccatcttggggtcctggtcatagggaaaggtgagcttataagccacaggcactatgaaaacccagctctggtcctcggaccccgagcatctcccagttcctaatgccaagagggcctcacccagtgcctccagtcttttctgcacacgccatggtgacctcgtagctgacccagacttaaagaaggtggtagaggctgggctcactggggatctatatgagtcgttcaagcatagcctggttacccaaaggagcgttgtgagccccagacaagaccagagcctgaggctggactccaggacccagcagcttcttttccacttgaccttgactgtctgtttgggatttcttcgccacatctccttaggaacttttacagtgggccaaagaagaaacagtaagaaagaggtagcgcctgctagccttccagaagtgcaggcatcaaaatcaggcttcccttcgccccacacgtgcctcctgtggtctcaaagctctccagaagatagacgattttgccaccagggttaagtggtggtggagaggatctgctgggtgcacagaagccagaggcaataggatacttgagtaccggcggtgggggttaaactgagcatgcgcggtcctgcccctccgcagctccaattgtcaccctagcacccagtcatggagcctactcaatgtgcagctctgtcaacagccctaagccgcctcacccgagaggtaccttccagaggggaggcagatgtcctcattgtcacctgtgcctttcctggctcactcatatccggctgtgtttccaggagtgcccggcaaccaagaaccagcctccagaagccaagacccaacctgagcctccttcagcttccccttcgcttccagggaaagatcacgggaaggccatgggcagaacatcagtggctccttgtctgctgagcacccgggcaggacaggagactgtcccacaccagggctgctttggaagcagcagggctcttaggggttcatgctgccttgtttgtattaaaagaagaattaaattcttgtaaggagtagagtttgctttttacttcagggactcttttagagcagagctggggaccagggtagatttcctataggcaagcaaggcttacacacacacacacacacacacacacacacacacacacacacacacacacaccaccactgttttattcttacgcctttgggaaatttacttaaaataacaaaatggaacatgcttccctttgaggcagctcatgcactgcctgcaggctcccccaaagtgcctttgaaagccagctgcagggcagagtccagaactaggccttatagagcaggtctgtgcaaagacatgagaccctggaagaaatgaggagcctttgttttttgaagagtgtcttgaagccggaactctcagtcctctgaacacatgggacctttccacaaaggacaacccccctatcccgaccccattacatcaaggtcttcctctcccctcccaaagatgctggacagcactggcatctccccacttgctctgctgttggtctcaggaccacgtttgctattagtaaggataagctacatagggatatgaacttgtttgtgttgggagaagagtactatgtcctcaaaagtccgggtcagggcctggggagatagcttagtaaggcacctaccacacaaatacaagaatctgaatttaatccccagagcacacatgaatagccaacgtggtaatgagcacttgtaatctcagacagacagacagacacagacagacagataaacctccggagcttcctcgcctcactgacccataagacgtcctgtctccaaaacaaggtagaccattcccaaagagagacttggatgttgtcctatggcctacacatacacacaccctttccacactaggaagctttcattaccgtgggataactggaaacgaactactaaagaagaaaagaggtttgtatagctcaccacttagaaggctctaggttccagatcggatggacatctgtcgagggtggcatgtgggagtacactgctttgctccaggtaagagccaggctgaggctcttaacgctaacctttgagagaactaaccagagtccagttagaaacatcttgatctcctttaaggacccctaatttggagttctctcactagacttaacttcttaatgttgctataccgccatgcaagtcttccaaagcaagagcctttggcaggtgtggactggcaacaccacccaaactctagttccctggaaagagctagcacgttggttcattatccaagcggcctcccaaatcacgcagagagcttggctggttgccttgaacctgcatggtgcaccgaatccaatctgaagtgaccaggtaaagctctaagcatccctcaggtggtacacttgaggaaaatccttacttcatttctaaaaaaaacaaaaacaaaaacccaatgggctgccttcttgaaagacaggcctgagggaggctgatctggtcaatatggtcggtgtggtgccagctataccacggtttttccctgagcacagctacagtctcacaagtgagcagggcagcaggtggctgggaggcactgattcctggcaggttggtacagatctgagagcactgactgggagcctgatgcctaggagacactgctcaagacagaagtgaataggaccttgggagggaagtgcaaggtgaccttccaagttctatgaaaggcacacccaaaaaggtgggggtggctcagttgttagaagacctgcctagcatgcgtgaaggggtttgatccccaacaccacattaactgggtgtgatagtacataccccccaaagactgaaacccagtgctgctgggtccagcacacccttgtgtggccctcaccatcatgtcacagggaacagtctcccgcattccactgcaggcttcggtgacctcactacatcaaagaatccacaccctgtctgatttcccagctgagaaatccaagaaccactgatacccagggttgttagggaaggccttggagaaacttggaggtgagtgggcagccacactacagcagcccctgctgtgatccagccccgttctgctcacacagatgtgaactccagtgagtccagatcaatcccgaagtggacttgacgggggggggggcccgtgggggtatacggcagagaagagtccaagcagatccggaagaaagtatgtgtttgtatatactgagacatcatgcaaggttaagatggagaagggtctgggaggccaaactgtggacatcttgaatgctaatctaaagtaaaacctgacttcatgcggtgagcagtggtgaagcgtcgacattttagttacctggttcagctacagctgtagagcaatggattgtgtgttcagtgcggtgggaggggagagaggagagtggccagcctccgacgcaaggctggccacagctgtgcccaactgtcagtgactgtccaggctctctgaggctgtgattcagaagttgtcccagtctagtttccatcccctgggagagcttagagtctgtttggtttggccaggagtgagccccaggcagagccaagaaccactcccagggggaaatatgtgcctgaagctgcctggtccccctttctctgcaccctgctttgccctgcccagagagggaaatttttagactcaacttttcccagtgccttctaaagatagctgttcttttagctagtgtttacacagacacacatgcacgcatactcacatgcacacacaacagtaccatgatgaatgttttaagctgacaagtcaagcagcatacaagctttcatgctaacccttgagtccatgccccagaaaccaatcactcacattgtctcttgtgtctcctcccaactctctctgatttgtgcctagtacatgtgatgtgttaacatagcggcagctcgcatctgaacacagcgtactgggtcaaaacagttccacgcataagatgtttattgggagggggaaggtggcagcagaaagagaagggggaaagagagagagagagagggagggacgtaccccttatatacatggaaaatgacataatgcaggtagaggtgggaggtgaaccaagtggattctaggaatatggtgcctgttgtgttggtaacaggtctgcaggatccacctatgtgatgtcacaggtttcagaggtcccaatgccaacagcctgtatgaacgccttccttcaactcccacacacatgacagacagcacgccagtctaactttcctggacatcctgttggacactggtctgttccttagtcttttaaatggctgctcactgcctcactcttctcccttgtacctctgggcacagctggtttgcttctgcacagtatgaggctttgcttgggggggtggggggatagcatgtgccagccctctgatgtccctctgtagctccacaatgagaacagagagttaaaactgtcaacaaattatcttccagcaaaatggaaccacataaacctcagaggtgtttaaacacagtccgttcctccatgggacaaaggtcttagaagtacaaagtggggcgttacaagacgggttggaaggggaatcgggaggacttaagtcctgcctgtttctttacagcacatagttgtacttttggtttctcttggaccggttttatttaaaatagaaacagaaagtaaagacccacctcttgcctcccctttctagccacccttgactgaattcacatctgattagggatgcatcctcccagcctggtgacttacgtacttctggagggtgggctgaaaacgagttctcaggagagaaatgtttagacagagcccctaaaagactgactgtgtcctggcgtctcttccaaatggcataaataatgctgactggagcttccggaaggcagtctaaagaggatgcaggtcagtcctaatgggagatgaggaagcagccgttacagacccacattccaggaatcagggccaagccagaccacagcagatgccctaagaaccaggctttccagagtccacagcttcacccagccaagggtctaagaagagctgtccttgtttccttgggtgctttgtgacctggacagacaggatgcttgggaaccacaggcattcagacccacacaaccgttaagtgttgaggtgccctgagtacttaatggcacaaaaagactctgggaagagcaggcccttgctgccacttcatacaccgtccaagtgtagaggcccacacgtgaggctgttctctggacacccagccatattcccgctgagcccatggccattggaactagtagctggggttgttccagtcccagctgtggctcatcctagcacaacaagtctcagccttactctaagtgtggggtttgcctgttacctccgccatgaaatggggatagagatgcccctgggacatgtgaagtgcttcacttagggcccaaagaatggcctcaaagccagcacccatcatacctctcacccacatgagctcctcctcatggctgaatccccacttctgaatgccccccacatggagtctgccttccctgcaggcccccctcagcacagttagtatcggcaggaactgtttcattaatatctccccgggagccagacatgtgttagcgccttggaaacatttatgggtcttccctgggggagtctgggatgctgccccagttttttgagaccatgagacagtgtgctttgaccctctcacacttctgctctccctggctcttaagatctggaaaacaaccatggcagaacccctccagctccggggacagggtttcctcttagacaacaagggagaagagctgtaacagttgtctcatgagattgcccttgggctgggtccggtgtgcccacctatcgagttaccaaccccatcctggtctcacgggtgtgcattcagcaagcacactggttggcagtcactactgtctgtatgccctgtctacccgagaggttctaggaaagccaagtctaagtaagggatgattcttgcttgagagcttgggaaggcagaactggtgatgagctctaagacatctggacaaatcacgggactcaaagcctcagcttgtccatctgtaggatgggggcaattcttattcatcgtgcaaggttctgaagaataagtattgtagatgaagtccctagcatgccttaagcactcagtgaacaacttcattgttcctctcccatggtgagaagctagctttaggtgaagacttcctatagagcttcctaggtgaatcccagtgacctcctcccttggcttcaggccaagtgtccccttctatcactgtgcctgggacctctagggacacccacccgctcccccatgttgccttcagaccatcagcaacagagtcttgggagaacatgagactgcctatttttcacattattgcatttttttttttagttgtgagtatggggtgcacatgcgcacatggaggtcaaaggtcagacctgtgcacatgtggctacatggaggtcagagggcacgtaaggcggcttcttctattgttctccacctttaaaagaattgtcatagaggcagagggaggagggatgggatggggaggtttgcagaggggaaaccgggaagggggacaacatttgaaatgtaaataaataaaataaccaataaaaaattatcttcatatctatgggtgcttcacctgcatgtatgtctgtattctgcatgagggcagtgtcccgaaggccagaacaacgaactagatcaactgggactggggttacaggtggttgtgagctgccatgtgggtgccgggaatcgaacccaggtccttcgaaagagcagctactgctcttaacctctgagcatccctccaggttctattttttgagaccaagtctcctgttgctctggaagcacaccaatctagctagactagcttggacagcgagttcctggatgcctcctgtccctgcctccactgtactgggatcacaggtatgtgcccaccatgtccagcattgtacataaatgccaggcatctaacctcaggtccttaaactgtgtggcaaacacgtgactgagcagccaccccggccatcattcatgtttaacatttatattttcctccccaacccccataagaactcttcatgaaatattattgatttgtttcatattcttcaggctcagtcctcgtttcggccagagattggtgactccaccttgctgcgtgagttaggaaggtgacatcacgaaccagaggagaggcggggaagatggatcagtggttaagagcatttgctctcttgcaggggacctgggtgtgcacctacatgggggaaatcagccgtgtgactccagtcccagaggacctgtgccatcttctgacttcctccttgggcaccgggcacacatgtgacgcacatgcatacacagagcaacacacttatacacacattaaaaaaaaaaaaaactttaaaaaaaaagaaaatataacagcaaagaggagcaggaagtaacaagagcaaagcagtgaagggagccaggaccctggtggcctgcagaagtcacacacacccaaagggcatccggaccccagacaaggctgtgggtcatcagcctgtgaccttgcccttggttattattctctccagcctatgtttccaggttcttcaagctttgtaaattactgtgaagcctcaagaaagcaactctctaacccagagagataccacttctgtaccaacagtttggccacaggctggagcctctctagacacctgcagagttaatcagacccagcagccctggtagagaccacaggaacaattccctccttccgagctcagatcccagcaagcagtggttcacggactctacagtagctcgggtgccacagcaacggggcaccacatccggaacagatggttccacagactgcctgtcacatgcctgtcttttctggcaggcctggtcaccttgccaaataggcctgcctctgtccaaccggcatggcgtagcacctggtaactacttatgtggtggaaaaggaagcctgtgaccaacagctggcagagccagctgaaatgtagggagtagggagggttggtctgggttaagtccaaagcaggggcacgttgaagtcggaacttcacactcgctgttgcctggcctctgggcatggctggggatactgaaatgctggaagaatcttaagagacaacaacacaaaacaaccacaggcagatgaggatacactagctaaaaacagcatgggacaatccttctgtagaggaagtggtggcagcagccttctgctgaagtcacctgctggcagaccagccacctcaggcaaaccgatgtcttctccatcttaggtggtgtggtgctgcctggccaagttgatagagggctacagaaaagccaagtcagaccaccactgcagggcaaggtccagtacactgggctaacccccagaccaagctggtgcaaagatgggagatctccacgggcaaggttcgagtctccatcagttatcctccagtggtccaggattgatggacccaccaagcaaccagaagcatctgttggaaccaactgcgtatgtgacacgtatccagcggtgacctttgcctgtgagtgggatcaggggggagggtgttttggagacaggatgctggttaataaaatatgttgtgagacatcctgagccccagcaacactagtgagatcctgacgtagttagtccagggtgataaatgggtgtttcatttcctgctttggaattctttccagtcacaagaccctgggtgtctcccaggctcatggccaaagtttgaacaggaatgacacacacgcctccccatgggggcagcggcgcttctttgctaaaagaccatatttcatcatagagtatgtgtggttggattctttctttcttttttttcttttttcctttccttccttctttcttcatctcctcctctccctcctcctccctctcctcttccccctcccccctctccatcttctcaagttttcttctcaccagagaaacttttgatgagttccaacctacagtgacaaacgtctgtcaatcaggcccgtcgtaccagcgctgtggccagtagtctggaaatcaaactagccagaggccaggcagccaggggtcacactacctcccaaaatgcccttctgcttctgtgctgggcactttctagagaatcattagaggctacaggcttcaggagtcagacccgtgataattagactatattttacacatccatatttattagggacctcaaaaaaaaagaacaaatacacggaaccccaagatgacccgtgatgcagacatcagaatgaccgagagtcccgggcaatgcctggattatcgtatgattgggttacacagcccaaaatcaaaggcacaagggttgttttggaaatagagattcaagaagcccaggaagacgctcttatcagtgtgcagagcacacactgcagggtcctgcttcatggaggctatccagagccgcagcatcggggtgtgattcacgcagctgcaagacaggaaagggacagggtggggacgaggacagttatcactctgtagatgagaaagaaacaaaactatggatttctttgggaaatatggtaagcttggttattatccggtaagcctgatctttgctgaggaaaagggcttacttggaaccgggtgtccaactgttgacactgtcacagtggcttctgtgaaagtgacagggcacctgtgaactgaggcagggggatccagcatcttgatttcatggctaacagactaactgtctgacaacctctctagccaacagtcttagaccatttgcagatttttacttttaaggctttgaaaaaaagagtggcttcccaaaacattttaaaaataaatttaaagcaagcatgaacccttgaaagccaggcttttacaacatggactgggaattccagtctagggtctggcagacgacccactaaggtcagacagctggtaggctggcggccaggacacttgttagagtcttactaatctggggctctccaccctgccgtggaaggaggtgggcttataagttacctgtatgtcttgccacccagtcttgtgtctaatccaaagagctactttccaaaccctagagatgccaggcatgcctgatgtggctggctggtgtccgagtcagaagcactgcacgtggccagtgtcacctctgagctttaaatatccctgccacactttaaacatgcttagagtgtggcactggtgtgtgatacgtggctgctactttgtttatatgaagagtaacacgtgggttgctttggaaacctgattttcaaagggcacttctatttgggggggggggcggggggacatgagatgggactcagacacgtggcatgctccgagtgactcagcaggaccatgtgtgtgtgtgtgtgtggccatggagggagctacagataatttttttctgtttctgtggatgcacaggggacagtggtctctgaagcatggtggcgggagtggggggtgcaggtaatttgcactcagaatctttcttagccatagacatgtaggaagcatgagcctgtactcagtaggagaaggacacaggtatatttggacacggaaccatgcatgggtggagctcagtcctggtttttgtttcacaaacagcctgagacagtccacgtgggggcaggggggggcgcggtgggacccagagcttctcaacaattggcactcattgaatttgcagtcacataaccagatgtcttactcagccagtccatatacgtccaggcgctcaaaccagggccagacgaggtaatcaatcatggatatacagtctccgccgaagaaggtagtgttctgatattcaagaatctagaaatatacacaggaccatagccagttaatgtatactctgatttgctgacgtatgctgcagatgctaaatataagtatcatattaattacaaggaaggagaactagcttgtcagtctcctgtcttcaagagaccactttgtccctccccacggtgcctcctccaagtccctgagggcctgtcttgaccacatcctggtctctgcctttcttcaacagtgaacaaaaaaaaaaaaaaaacaaaacaaaacaaaaaaaaacatggctcattgactggagaatttggaaagagcaattcaggaagaggtggcctagctcttcccttagcctgacacggatgtccccaagtcctaggctgtctccagatcagatgagcttggagctaggatgctctgcctcaagcccgcacctgcccattccccagggatgtgaaaatgggcgccagatgctaaaacccagcagatagaaacgccacttgctgaagctgtgatctcatctcctgcatattgtttatagtcaagggggtactgcagaccccactggtctttcttttgcctttctttgagcagctttggagctagggctagctagatggagcaatgctgtttagtgggtttccttacatcacacgtcacctttaccatactttctccgtttactcaaattcttcgagtttcacgataccaacaccattgacattctaaagtaaaacaaaactcttccttctcaaatcaacccacacagttggactgtacagaaaacacccttttgacagcccagagccacagagccacaggaagggacttccgggcagccttggtcctggtgctttcttaccgcatcagaaaagtaaccgagacagaggggaaagaacggagcaaaaggctctcaactgccgtcatgttctaaaacagccaggggccatccaaactctcggcagcctgggccttcttcccatcacccacagaggtgcacaagcagccttaggcttttgcctccacggttgcagactactgccactagaccttgcttgcttactgacagaacccttaaatcctgagccaaaataagtccttcctcccaagctgcccttgccacacacttgtcacagcacggaggaaggggattggtgtacaggccagcctaacacttgtgcactacagagtgaatagcctccccacagattcctttacggcttcctcctggtgacactgggctccctggtagcctggcctccctgggacttgtctttaggatcttcaacaggagcccccttgtacgtaaacctggcaccgctcagaaacgcaacactgcttccctcttcgaatcccagacactgagacaggaagagcctgcaaagggtatctggtgtagacagtgttcaaaagaatccactttaccatgttctgaggttacagagacggatgagcggataaacgtgcctgccatgctagtgtgagggcctaatttcaaatccttaaaacccacgaaaaactagtccaagccagagagtaacaggaccatctgtgacccctgcactccgtgcacacacaggctgaggcgtctgggaaagctcgcgaggagacaacctaaggcagaggaaaggaaacagaggcccttgcctcaaacaaggtggaggtgagatcaatgcccaaggctaccctctgatcacacgtgcctgctttcacacacacacacacacacacacattatgcatacacacaataatcactaaaaatataaataagtaaacagtttaaaaacggtaatacaaatgtgttctttttgtccccagtgactttagagggagactagaggtgtgacagggagcacccagtgagtgacagacagcaacaaaggactgtttggtgtggtgaagatgcttagctccacgaagcccttcccctcacgcgagggctccccctagcgtggtaaagaaggaatatcagcagggaacacaagtggaagaagtgggggggctccccctggtggccatcgttgatgtggaacagcggccaaagctcccttctctcagttaaagaggatcaaagaaagaaacctgctgggctcttgagaaaaaagtgttacagaactgggagaatcctacttcttgggccacatgccaccccattttggtgacagaagagagatttttaaaagctaatccagacttcttcaaaccaagcattctaataagcccagtctaagaacttccacccttgggacagccacctgccttacaccgacatcatttagctcaacaccagggaatcctgggtctcagtgttcaagcagcgctgtctcctgctggacactgcacttgatggaggaggggaagagttcttacgagttggaagtcacacacacacacacacacacacacacacacacacacacatctgctaaggcacgaaggagcagtagactcaagcccatacccagaggcaggagcaaaggacttgggtctgggatcgaggtcttttgagtttgtaagaaaataagggggtggggggctcaaagttttcaattccaagtccttgccacacagaacaggccagccctggctgagctcatgccgcagtgaggagattttctgtaaggagaatcaccgatgtgttgggaagtaggacccgcccctccccatacatgaccaagttgttctatgaagatacaaaaatacaaatcagtatttagggattgatgaggctatgaaaatcctcagctgcaatcctttgaatgggctcaattctcttatgcaaaatatattttgtaagagttgggtgatagctaacggaattcttgtaaagcagtggatggtgggtgcagatccaagtgaacccctcgaacctctgagcaggcagaggcttcctgtgcccgagagcaatgggagaaagttcaacaggagacatgctccgcatttacagatgttacacctccagatgtgtgagagagacaaagtggaacagaagttaaaaacaaaaaaaccaaacacgtgtttaaaagatagtcaaataacctttagataggagaaaccctttaaatggaactctacaaactaagaagaatcttagaacggagatagacaagatcttaagacagttttccttaagcggtaaactaagccaagcagcacaaactgttggactaaaacgtctttttgtttgtaaagaagagaagataaattaaacattatcattgtggccgagcatggtagaacatgcctttaaccccagaaacagagacactgaggcaaggcgatgaagagtttgcagtcggcctggactacacagtgagaccctttctgaaaaacatgtagggaggatgggaggaagaaaagagggagaaagaagagagggaggaagggagggagggagggagggagtggaagagatgttaagattatgggtgaaatttaaactcagtaggccacaggagctcctgagtggtgcacacattactaagcaatacaaggatacaaccctccggcaaacagtgcacacaaggcatacgactgcgccctgtgggaaactctgcatgagactgcaaaggacaggaatacaaagcaggcctgcagacacagagcaagaggcagaaccatgaggtgccctgtggtcctggctccctccctgctgtttcaggcctctctccatcaagcctggtaacagctggagagggaccaagcaaagccagaacacagagcagatgtccaatggctagatcacagactatgaggggaagctcaaagccagtccagcaagctgctgcacaacacagggctggatttaacaagcactgccttgaagagactctgaatatgtccctggtagcaaaggagccccgaggggccctgccgtgctggaatcaacaaagaggagaaagccagagcccagcagagtgtaaggctgacatggtaaagtcagtaccacacagaagaaaactataaagggcgaacatcttagactaatgactcaagaatagctaagtttgaacctcagaggcaggtttgatgtgagcttagtccacagcatcccaacagcataaaaacgtgtgccagcattcaagacaggcaggcaggacagcaggtctgaccatcaaagccgaagattttatttatattatttatatagccttaagtgaattcttaatatttttaaaagtttcacggttgctgctcttttctgagtcggtatctcaccacgcaacccaggctagcccagacttgcgaccctcttacccttgtcctctatgtgccgaattttaggcccaggacactggactttgtaaagatcattttaaacacacgagtacacaggtcatgtttcagaagagaaagatcacctggggctcagggccacagaacgcaaattgagcctcttgctaggctatcacacggcatattttgcattaaaatcttgaccttgggctaggagatggccgagtgggtgcaggcatgagaacccaaaatcaaatcccaggaccagccaagctgggtgcagcccggcacagtgctactgtggtgcggtgggagaccggcatacaaagaggacaacacaagacaggctctgtgtgatggtttgtgtatgcttggcccagggagtggcactattagaggatgtggccctggtggagtaggtgtgaccttgtaggagtaggtgtgtcactgtgggtgtgggctttaagaccctcatcctagctgcctggaagacagtgttctgctagcagccttcagataaagatgtaaaactttcagctcctcctgcaccatgcctgcctggatgctgccatgttcctgccttgatgataatggactgaacctctgatcctgtaagccagcctcagttaaatgttgtctgccttggccatggtgtctggtcacagcaataaaaccctaactaagacactctgtttccaacaaatacctgagcctgtcctctgaccttcacatatccactgtggcataagcccacctaaacccccatacatgaaatacacacatacacacacacacacacacacacacacacacacacacacgctcacagaaagagagacagacaaacagacagacagacacagacacagacagagacagagacacagagagaatgaatgtcagattatttgtccatcagaaataccatctatgtttaatagcttttcagtccacacaaaatcccgcttgtaaacctcacttgaaaggttttaccgtgcctttaatcccagcactcaggtggcaaaggcaggcagatctctatgagttcaaggccagcttggtctatatagtgagttccagaacatccagggctacatagtgagagtctgtctcaaaagcaaacaagcaaacaacaaaacaaaacaaagaaacagaagaaaaaatgggaacaatgctaacgtgaactaaggggcaattctgtcaaaattattctagtcaatttgaatttcactaggatctcctagagtctatacttgaggatctagaatttgaaggaatgactcaaatggttcatgtccactggctgtttcagcgtctgacatccagtatgtcacagctaatgttcttactaacgctgtgtgggacaaaactcccttccgaaccactgagacagagctgaaccctcagcaggcctgacatggcatgaatggcagctgccagagccaatgctgtcccagttgagtcagctcgtccagggtttgtttgttccgtctttttcacttgtcttccagggagtgttatgccaggctcatcaccacccttctggttctgtattccaatctcttctggttaacactgctagctaggaaacattccctaggcctggtgtggcctgcgcatcactctcctgagctctttctcccatatctgtcccgacaccccacaaacagaacaaacctgagcttctcagagtcccagtagcatccggtttactggagacacatttcgacatcaacctggattgaaacctctctaaccaagtcccctctccaaccctattactaaggtcctggtggcctctggtgtgcaaaggagggaagaaaagatcaatctcctgccttggagtctgcagttactccacacaactctggggtcaaggggaaattccttgacactggtgaagagcctcctgaccgtgccctgtgcccaggttctctgctctcacacacaccagctctctctcctgaatgtctccagattagcactcaacataccttggttcaaaatgggcttaacagttgatctccatctaatcactgagccttctgggcgtctgttacgtttgcattcctagtttccaggcttcgttagtgagcatcccttctgagttaccaagtacgggtactgttggcctcagcaggatgccgcgcagcacaatgagccacgttcacagagcaccaccgcatcttaatgtgtggctcagaatgatggcttaattgtcccgagagggggcccaagagatgcacacctgcatcctaacttcacaggttcacgtacaagaacagcaagaacaaccgcaatgcactttcagtggtctcagaattcagtgttttgttttcggctccttaatctgacccagcactcatgaatctgagacattaactaggccggaggggattagttcaggtgacctttaagaaaaagacagtagctgcgtgtggtggctcacactttcaatcccagcacttggagggcaaagataggcaggtctctttgagttcaaggactacatggtgagttcctgtctcaaaaacagcaacaacaacaacacacacacacacacacacacacacacacacacacataacagccaccattaaatatagagacattaaagtctattcagaaaggtctcaactctttttaaagcagcacttgcctttcctgggcaaagactctcttactagatgtcttcttcagctgtgactaaagaaagtgttggtgtcggtgacaactgtgtcaccatcacccacatctcctcctgcccaagagcctagaatccagccaagccacacctaaaatcaagaccctaccatccactgcctctggggcctcaagacaaaagttaatatttctcactcgtcatcttacaaaaacactgcaactgtacatctccaagacaggaatggcgtgtgggtgaatttcatctgcttccagttgatagagtcaaatggaaggataggagtggctggccttctctgaaaggaatgaggagtctttcttttttttcctggctgtactggggaacaaactcattcataaaaagaatccatcggtttgtagaccagaggtaaagggaatcacggtcccacagacgacccctggaatgggtgggtagaaaacggcttcatgactgcgccgtgcaagagactctgccagcaaggatgccccttgtccatccgcacctaccttccttttctgagatacacagattgcccctcatccatccacacctaccttctttttctgaactacacaacatggattttatccagggtgtcccaactaaacaatacccccctgcccccggcagcctccagtgcagattggtggtcatgacctgacagctaaagtctggccaccaaggtgtaagcagttgctgggtttctgggtgagtcctttaagagggtgcacgcatgccacttttctcttccactctcttagctagagcctgagtggaagactatggcagaagtcccagctgccatcttgtgatgaaggatgggaccttgcactaaatgtggcagacagaacgaggcgcctctgtccctgctagcttcatgaggaagcatggagatagatggtcctgaactgcctccctctggcttcagtaacgtgagagaataaaccattactagacaagccttcaaccaatacctcaggcagcagagccctgcagagatacttggggaatgccaccataccaggaaaggacaaattcactgcttgtcctggaaaatttgtcaagtatcatttcagagcaggtcagggactcaggcatccgggggtcacagtcgggtgactagaaagggaccacacggaggcttagcaggaggtctgcaagcaggcgacatcaggtgactcggttagagacactacagagctcgaccacctctgatgggacagacgccccttggtacctcttccatgttgcacaactcctgacgcagggcgaccttcagatccgtacagtctcttccgcatctcagcgctatcagacattccttgcttaaaggcgggacctagtcagaagccacagttctttcttagtcgggatgtttgtgagaactgttcccactctgactgaagtgcagcgatgcttcccaactccagcacaggaggacttggcccctccttggtgagaggctggggtgtgggtgggtggggggatctctgtgcctagagactgtagcttctaatggcagctgctctagccaagggctttagcagggttctcactgacccctgcttgctcagctacttccgtactctagggtgggacactttaagtttcagtgtctctaggtgaaaaacaaccagaaacaatacccacatccaagggcagttgggagggaatcagtagtcagagcagctggaacatcctgatgatcaatacatgtcagctattaacaacattaagttgggcacatgaatatttgtgtgtgtgtgtgtgtgtgtgtgtgtgtgtgtgcacatgcatatttgggtatgtgtgtatgcatgtgcgtgtgcatgtgcgtgtgtgtgtgtgcacatgcatatttgggtatgtgtgtatgcatgtgtgtgtgcgtgtgagtgtgtgtgtgtgtacgcacccatggcatgaatgtgtgaatgccaccaaatgcgtgcggaggtctgaggacacctctcagctgtcaatcctttccttccaacccatgtgtccaggagcttaaacttgggtcaccaggcttggtggcgaacaccttattttttgagacagaatttttcagtgaacttggagcttgcagtttcaggtagactagctggccagcaagtcccaaggatccccctgcagccctcccagcaccagggttgcaggcaggcactgccaggtggctgtttatgttattttgaggatccaaagtcaggtcctcgcacttgtgtaccaaacgcttcacactgagccatctccgcagccccacactgaatcatttttctttattttcaaaggtcttaaggttcctatcaacttttctctcattcattatcattattcatgtttcctacattgctgtcatccctgccctgctgacaagacaaccttcttccaggcataagttctcgacaacagttcgtacctggagcttgagaaacactccttttaaaggatcggcaagcctggctgtctcaacactcccaattctagcctcgtgagtctctgcctcccactactaatgtccgtggccacacctgactctaatccccggttatttactcttccgaggttcacagggtcacaatcaaaccaggtcgtgattgactctggaacagactgaggttggggaaacacacacaaacaaagccacatctgtgtggctcttcagaactgtgtgtaccttacagaatagctccaataacatcttctggcgagctcgttcatacgggtcatacggaaacagctttcttcccgggtagacgtcatccaggtactcacaagcaatgacagattcatagaccagctgacactggctgttctccaagacaggaatttggccaaaaggatgctttgtatagtaccagtcaggcttgcttttcaggttaatattgatcacttcatgccttaaaaacaacaacaacaacaacaacaaaaaggaaaaacaaaagggaaagaagactcgaagtgagaagcgggaacagctatgacatcaacattcgtacttagaactatctctttgatgctggagtttggtgtaaaatatgtaacagtggtgttaggtgtttcctgcggcttctcttacctgtccctttgactgaaccccatgcctgacatagctactaaatagaaactataacaagaagaaagccagcctgagcggctctgtatacacaaacactcaagcacagcacttagagttcaaagcctgaaagcacaaatccagcagaacttggtggctcagatctgtaatcccaggtcccggcagacagagacaggaggattgtaagtcagagaacagtctgtgctacacagtgagacccccgtctgcaaaccaaagcattaacaaccacaaaaacgcaagtgtgctatttacaggtcgggacagacattggtgaatcttaacggttaatacaaagcccacatccagctatatggccaatgctgagatattagctggttccttcccctcgctgtgctcagggtccatagctgtgacgaggtgataactgtgtccatctcaacagtgtagcatcctaaccctgatcatgtgcagcgcttgggtgtgtccagcacactagcaagtggtcacttttcagtcctccctactccattattatgggacttggggctggagagatggttcagcggttaggagcactgactgctcttctagaggtcctgagttcaattcccagctaccacatggtggctcacaaccatctataatgtggccccatgcactcttctggtgtgtgtctgaagacagctacagtgtactcatacaaataaaaataaaacaatcaaaaccaggaagtcgccagttatatatttaaaagaattaaaggaaacagatggctacattcttccaagtggaggctctcaataagattaccacctcttgggctggtgagatggctcagtgggtaagagcatccgactgctcttctgaaggtccagagttcaaatcccagcaaccacatggtggctcacaaccatctgtaatgagatctgactccctcttctggaatgtctgaagacagctacagtgtacttacatataagaaataaatcttaaaaaaaaaaaaaagattaccacctcttcccatctaaggaatgtatatcgatatctagggacattttggctttcaccctgggagtgggatatacttcaaatggatggataaagggggatactgacaaataagctggggtgcacaggaacaaccccctttccttctccccagcaaagaatttacctggccccaaatgtcagtcagtggtgctaaggttgagaaactctgctctgaagaacaagctacagggctgaacgcgtagctcagttggtaaagtgcttgcctagctatgggaagcccttggctctgtccccagcatcacataggacaagcacggtgatgctctggagggagagccagaaggaccagaaatccgagatcaccctcagatacataatgtgtttgtggctagcctgggctacataagacccagtctcaaaaaaaaaaaaaaaaacaaatatttgcatccgttcctaagctgcccgcttgtccccatgtcgtactgctctggtttttctaagaccaaacaaagaacaggtaaccataggaccagaaagatgtgagcaagagggaagaatctagaaatgcatgttatacatttgcatctacacagagttaacatacccaatgtctccacattggtctctctattcactgacatgaactgaaactctgcggtcactcccaggacttcccaatcccagagccagaagctggtgggccatttgtgttctctgtttgagagacaggatctcatgtggccaaagctgacctggaagttggtatgtaagccattcaagagcagtctgatcctcctgcctctacctcccgagttctgagaccacagggatcgtcctccacacttggtcttatgtggtagctcggtgagaatcagtggttcatgaatgctgaccaagcaactcctactcagctacatccccaagcccatacctactgtgtgtcaggctctgttctagtccttaaatgaggtagaccctagtctcttgaactctttttttgttttgttttgtttttgttgttgttgttgttttgtgggttttttgttttttgttgttgttgtttttgttttgttttgttttgtttttgtttgtttgtttttttatgattgccatagcatgggggagaggggaagacatggtagaaagacagaacaaattagaaaatgttgggcaagaagaagtcaatagaagagttaattcaagttgcttatggcagaggttgagctacattgggacagctaagaggccccgagtaagctctttctaaacaaacagtggggagagccagttcatcaaacggcagcattcagtttactcggcctggtctgaaacttcgtggaaacctgatttggaaaagatgttcagcagttcgggggagcctgctcaaaaatcagtcactggagtcactcagaagtaagggaagaggggccccttctaggagccagagactttaaatatcccccagagatggcgggtgctcccctacccggggagcgcttggcctccgtgcctcacctgatgcctttggccttgagaaccaggcgtgccctgtgcgagtaggggcagaacctcatgctgtagattcggatcacaccctcagggaccggccctgggggacagcttcctacagggaagggcaagagcaagaagatggagagtctggttagcccattggggaggggacttgttctcctcaaggacattcaaggaggagtctgcgcactgagcctcaggctccagagatgttggcacatagtttgtgctcctatccagagaaagctgttccgtcgtgagtcttctcccagccagagagtccaaggctctaagaggatttaccttttcccaagcatcttgacaaatctccggacatcaatctccagttatctatgcggtaccggaaagctcacagttgccgccttgtgggcctctgctgcttactgcgctccctccagacccaaactgaatttctcaacagtcgacagcactctggtggggcagagaggaagtgaactgggacccctgtataacctagcccctcacagataccgccccagatatggaagtccaaaccaagccccagaaagtacttctggctttagacacacagggaagactgaacattgaaaccccaacttggatttcaaagaaatcgaatacaaatttaccaggctaatgttaacttttcttttccatcgtaaatcctagtcttgggtagagaaataaccattccttctgtatagcttgttcaccacactcagtctttttaaaccagtcacattttctcttggttcggcaaatggaacaacagccttagaaaatgctgagcccttgtatcacttgggaagtaaatgccaatcttggcaccacaccacacgcctctccctgggcctccctcatcccctttgtgagatttctaccctctgagaaactgacagtgagtaagacgaccaagacatctggaggccaagaactgtttgagccctccagcctcaagttctgacaaaggttgtttgagtttccaaggacatgtaggtaagaaacacagcggccaccccacacgagggagaggcaggagtggctgagaagctgagattctcgcctccacaggtgaaaaggggaattcgttaaattttccaggcctgagatggagtggaaacggccaccaacaggtttttgtttatagagtaacaagaaaggaaagaaaagcattaagagtcccattcacatatgtctgaattatttcagttcccaaacttctgtgtcatgtaatcgatactactccttcacaaaagtgtccccagaaaaaaacgaaattatttgcccaaaccaaacacctaattgagggaaagaactttgaaagttcaaagacttttaaaaggtccactgtctgggctgcaatgatggagagtttatgtccagaaaaacggagcacacaatggcagcttcatttttgaatctaaacgttttttttttttttttttttttactaaaatagcaaagtcttatcacatgtcttgcaagatggacaaccctgggcctttggaattctcacccctccagaatgtcttggctagtaatgataagatcatttcccctacagaataggaaatcttttgaaatcctcagaataatgactcaactacagttttagtctggaactccatccgtgatcccgtgggagttgcgctaatagcaaggtgtgtcaatagttactctgtgtgaattaggaaactgtagggatgtttgaatccatgcttggattgaatccatgcttgaattcagtgcacagggatcgccagaaacctggtgcggatgggttcttgccttgctgtgctgagggagcaggcagctcactttccactgcagcagatgcaggtctcacaggcaactactcccctggaactaactctgatagagacggacaggctggatggtaagactgaaacaaggaacacaagaaccatgccctgttaggtaaggagacagcttctgagaagacagaagtaccttttgttaggtctcaaacccgggacaaacagcagaggtgcccgtggacaccaggtttccccagcagtcctcctggctggcacacccaccccctaccctaatcttctccagcccagggactatgctgggctgcacttcccccagctgctttccctatatgacccagccatttggggtaccccagccttcttacccgtttgaacctcttagcctctgctcctggctctcctctctccttccaccctctcctcacagggcccaactcagtcagctgattctgtctgctctgcactctcccagatgtttctgcctctgactgtgcctgcaaactcccctatatctatagtgaaaccctccacctcaggagcagtcatgcccacctttttatttcttgtctttcattcacctttcacataaatacagcagataaccgccgaggagaccacacccaggttctaaagagaaaataaaaatgagtcattactgaccagctggtgcttgactggtcctgtttaacccttaaactggcctgtacgtatgcatcctacaggatggattatcccaatggaaagatgaataaagatgaatatgaatatacacacacacatattcaatatatatacatattcaatagcctctaacttttagagatgctttaggttcacaacaatataaaacagaacatacagaggtacctcacagtctccctacctccacatacagcctcctatctctccagagaggcacctatgctacagtagatgaacatatattgacacagcactcccggtccacaattcacaaaaaccactcggtactggtcaacttgatctctacatcacatgttatgatttatattttggtatttttttcagctgcttaaaacgacagtcctgaaaagcattcttagcactttgagctgcataaaattcagccagcagcctgagttagccaggtggttttgatttggtcattcatagctgtttatgttgcaatggctgagatagcaacagtcaggaagggaattctacttgcaaactgggaggttctattgtgccagaagggcaaacatttccagctttcccctcacgattcactccttctaaaggaatcgaaatctgagaacagcaaatgtcatttgtaacaggtttgcctgagcaagctgttgtggtatgtggtatggtcctaaaacttgaagtctgtggcaaggggatcacaaatttgatgccaattagggctacagagtgaccactgtctcaagataaaaagtatgtctgtaatatgggaggtcacgttttgagatacaagtctatttggagaagttaggacaaaggtagaacatattctccacctatgggaggcagtacaatgtcaggagtctcaaaatgggccatggaaccagatgggttgtgagacctgccttggtccttgggcacaatgcttagcctctctgccctccatcttccttgtttaagatgacaaccaccagtgtgtatatgatggttttgactatggagtgaaattgtgcggagttctatctcagtgaccctcaaaattaaagagaaatactaatgagtaagaaggcatttttatagcatgatgccttcccattctgcacccatgaagagacacacattgcaattcagcttgccgggcatatgagaattagaatctaactcaccacactatttcccccgttaacagtttaatgctggctgagtgtgctgaatgcttcaggctacatttcagtaatgtgattttttttaatctctcgaaagatcacaacagttttcccagaaggattttaatcatgacctttaagcttgttctctgcttcctcttaaaatttcagtaggtaactcctaagtggtttttttttttttgcaaatgttccatctatgctatcccgtgtttgcatctctgttatattgaccaactcaagcannnnnnnnnnnnnnnnnnnnctctctgttatattgaccaactcaagcacaaaacaattttaataaggtcatggaaatctattagaaataatttttcagacatctgaaatataatcatatccactgtttctctgtgtgtgaaggtacacacacacacacacacacacagacactcaaggtgtgagcttggatggcagaggccagaggtcttttgagatgggggtctcaccttcttacctggaacttgctgattcggttgagctggccccaaagccccagaaacccacctcagcttcctccatggcactgggattacaaacccgggccaccacaccaggtcttgtttgtgcgtctggggttggaagtcaggttcttgtgtttgttcaacaagcactttacccactaagtcatctccccagtcccagagctgcttttctaaaaatagaggaatctctggtcatggtgattaatgatgtatgtatttacagaatggaaataatttcttcactcgatttcagtttgttttaaggaaaggggggcctttctttcttcctttgtctttttttttttttttaatgtaattctggctgtcctggaacttactctgtagaccaggctggcctcaaacttagagacccacctgcctctgcctctgcctctgcctcccaagtgctggaattaaatgtgtgcacttttatgccagcttgagttgtttgtttgtttgtttgttcggcttaaaaaaaactttttggtcacaagtctaatattagcagatgctagattatgattgtatttgtctctttgaatgcccacttgacatgaaagatcacattactgggtgtccactattgttcactgaactccttgggccagatgagggaaagggttctactctcacagctgcctttattcagggcttgcaaggagcaaggaccatagggaagctcatgtcccaatggcgttaacgttgggacatatgaaatgaggtgactgaagtgaccaaaggaggaccttcccatccaggtcaggaaaactgggtcagaggagaccttcttttaaagtgcttgttttcttatccctgtgtctttaatgacatgtgtgacacatttatacaccctgataataatatttgaatagtcaaaaagcaaaatttcaagagtctgacatcaaagtttgtaaacgcgtgcaaaagcagcaacatcgcctgccgaaaccaaaccatgatagggataggacagggacgtgcccagaattattgccaggaccttttttggatatcaagttccacggatgctcaacaactttatataaaatgacgaagcatttgcaactcacctacccacacactcctagacacatcaaaccacctctagatgacttagaatagccaacacaaggtaaacgttgttacactgcattgcttaggggatactgacatgagaagtctgaatatactcagttcggatgtaatttttcttttctagtctaattaaattggaatgatgtggaatccattgataacagatgatattattctgtcttggcttaatctctaaatgtaagagctcttaggaaaaggaactttatagatatataaacttatctaaagagcagtcttttttacaacaaacataggctacatttgaatcgctccaccttttagtagctgggttactttgggctaataatcaaaagctccaacaaccctgattttctaacacactggcgttctaatctgtaatgcggaggtaagagtaccatgtggtttagggaagtgttattaggatcagtatggcaagcatctaatacttagcatgtgtctgtcatctagcaaggacttaacattagctgttattgtgattactattatttgaacgtagcagggacgattttcgtagccttcaaaagacaggcagtctcagaaacgaaattctcctgcctgtctgtgtcatcaactagttaagccgaactgaaggtacaaaactccagatctgtggaactctgcgtgcctgtcttcgtccaaactggaaaattaatttcaatgacaggtttctggcttaaagaaaactcaataatctaaaactattgactattctttcttccttacgatttctttaccctattgctatattctaggctcccttacacatttttagtgaaattttttataaaaagaaaaagaaagaaacattagctatggttaaacatttgggttttcttttaaaatgtaactgcaaaattaaaagttggcgatcctattctgaaaagcccagattttacaagtcccccaaagttcagaattgacctcaaaatccttttcccttccgacacagcgcaggtgaggccgaaccccccagtggcggtggcagaaaaagcatctcagagcaaccttcgggcggctatggctccaacccggagttgggacgcccggcggccgacgcggaggcgggcccgccccttctcacggtgctaccccgcaattggccgccgagccctgcgctccagccaatacctggctcgtctggaagagcgagccaataggcgaccgcgttatagcagcttgctcgagaaacgagggtcaggccggaaatctatggctacctaaagaggaagtcggtagcaggcggttcctctcagccgctggtctcacatcctactgggaatccgcgaggaaccgccagggcctgcccgggggctgggggccggcggcacagatggctccgctcggagtaggacgctagttgtcccgtttgtgaagtcagccaatccctggctccccagggtgcggggccccccatcaccgtgaagctaaaccctaaatgcggcgctgagctttgccagttttggcgcccttaacgaatcacccccgtggttgtcgcaggcaagccagaaaacaactacagaaaacctggcggtcggtgggttgccattcttaagggcattcattgtcctccagatccttctgccaacatcttaagacctcacttaacatctggaccagactcaccatccctagaatggagtgaggttcccagactacctgtcttatggaagtgatagaagtattaagattaacctttcccattggagatttcatccattacttattcagtcttatatactgaactggctggtgtgattttaacggtattgcatgtggcacacctatagaagacagaactatatctgccttgtttggaaggaaggatttgaaagggctagaagtaggagctagtgagatcgtttggtggttgtttgctgctcttccagaagggagattcgtttcctatcaccccacagcctctgccggtatcaccagctccaaggggtcccgtgcacacacacaaacacacacacacacacacacacattttttaagaaattaggaactgagagctcaagcaagaggctaccccagtcatgttgacctgaggtggtttggactcagttttcgatgctcacaagaggaataagagatttaatgatggaaagtatggggaaatcacagttttcagacatgagtaatcaaaaacttgacatttttcttgatatccaaatctagatgtctgtatcaaaccagaggtgatggccttggggatggcagtgaagactgttaggaccattagatcggattgttctgaaatagaaatacaggagtggggccctgggggacaccgcttaggccagaaggtcaaattatgagaaaggagccagtgagaatactggataaaataagcatgatattcaatcagtgaggggaaacagcatttgctgagggctcttgcccttcagagcccataatcacaggcctcggggctgtcctgtaggtagagatttaagtactcgcggtaggtcttggcatcaattttgtgagaggatgccacagggtcttgctgcatggccgccatccagagcttgagtttgggggtgtgggctagacacctgtgggaagacaagatgagagctgtgagccacaggagctagaccggcatcccagagtctcacccaccactgcagtctatccccctaaactcttaaaaattgatcttgaaacgcaactctttaaaatgcaagccgtagactaaaaggctttagctttgagtgacattggggtctttgtttctcagaagaggaagccgagttgagagttgcgtggtcagtcagcagaacttcaaactgagagactgacagacaacagccttaaatgccaactttctataggaaacgggaatagaggtagccccagattgccatgagttctaggacgtagaagtaagccaacatggctgactgcaaactcaaagcatgagttttaaaggcagtgtggaactcttacaagtaggcgggaagtaataaagatgtgttaatactaaggtctcaacaaacagggaaataaagaacaccatttggttaattaaacttgtactgatggagggtacatatgcctaaaattatctacttgtactgatggagggtacatatgcctagaattatctacacccgtgaggatttttagcctgcagagggtaaaatttaagaccctgatatcatagacagatgatatcctgtcctcccctggggctgaacatgggaatgaatgggtgacctgaccggttgtgtgtacccccaggactttcctttcttgctgactcaattcatgccagtgacatcaatatttatctaggttcagaaaaattccatatgtcataatacagccctcaccctaaactatgcacaaaatattcaaatgtcttactccttgagctccaatgcttccagtcgctgaaaccaaggccaagtaagataatcaaccatagaaggagaatccccaccaaggaagctcttgtaattatccatgccctgattgttaaaggaaaaataagacatcattaaaaacaacagaggcaaattaggtagagaatgtcaagtctcttgttatcctgatatggtcaacttggattttaatatgatccaaaaccctccataacccagcagttgtaattggaaatctgacagatagtgtgccactggttctcaaccgtcctaatgatgcgaccctttaacacagttcctaatgttgtggtgaccccaaccatagagttattttcatttctacttcgtatctgtaactttgtgactattgtgaatcacgatgtaaatatctgggttttccaatggtcttaggtgacctctgtgaaagggtcatttgactcccaaaggagtcacaacccacaggttgagactgccataatatacagacatgttgggaatacaaaggtccttgtgctcataggaatgttaaaacaggcagggttgtcttctcaaaggaaaagatgtataacctgttctgcccagaaggctgggaatggaggcagctagtagcctaggtaacccctgtgttctctgtagggccaagccatacctggctttccaaaagcttccacagccaggcctgggggtggctaacagtctagctgacctctgtgttatctgcatggccaatgggctcctccacactcccacaacaaggacaggaggtggctgatagcccagatgacctctccactctccgtatgaccaagaccacaccagaccctccccgaggcccttaagatgatacatgtagcctatctccagagcccatcttcacggacatgtacctggagaagagttccactggaacgatgcctttgtgcacagaggactggagggtgtttaaaaatgcctaaaacaaactgcccgatgtctgactctaggtgtttgaagccaccactccagagtcatgttgaaccagatttccttcttatttcatgcaacatgttactctaatgagaccctcgtggtcagagatccccaaactgatggaatagctcaaccgtgaccatgttacttatccagagtagagtaaagaagtcttgatacaatcaaaccttagaacaccggactgcaaacaggaaggaacgacacataacgtaaatgaaccttataaccctaaagtggagtgcaagaagccattaaaacctgcacagtacacagctgcatttgtataaggtaggaacaacctaaacttagcacttggctcttaacacacgcgctcggtactacgatgtgttgtttttttgttttttgtttttttttaaattgtcaagatgtactttcatgcgtggggtgcttctctgcatgtaagtttttagttggaaacatagttaaaacatcctaggaagccgggcggtggtggcacatgcctttagtcccagcactcgggaggcagaggcaggcagatttctgagttcgaggccagcctggtctacagagtgagttccaggacagccagggaaaccctgtctcgaaaaaaaaaaaaaaaaaaagaaatcctaggagtagacaggattgacagttaaacaggtgacgattatttggataaccctaaaacccaatggaatgtttctgaaatggaaggtgaattgctacgaaggtttcacctaagaggaaagccgggagtattattaggttaattaaacctgaaggaggggcacatatgactaaaattcattatctacttatgacacagccaaaggattttaaaagaccagagtcaaaccaactttcccgtcataaacagcctctggttttccttggagatccttgtaatagtatgcactgtggatagattgttcatgtctttctgattattgtaatagtatccactgtggatagattgttcatgtctttctgattattgtaatagtatgcactgtggatagattgttcatgtctttctgattattgtaatagcatgcactgtggatagattgttcatgtctttctgattattgtaatagcatgcactgtggatagattgttcatgtctttctgattattgtaatagcatgcactgtggatagattgtctttctgattattgtaatagcatgcactgtggatagattgttcatgtctttctgattattgtaatagcatgcactgtggatagattgttcatgtctttctgattgtttgtcttctctccactaaaataagaacctgattccaacttccacgctgtcccacagaaaagcaggaattagcaaatttgatttaataacaaacatataactccccaaagaattaccagtaaagaaactgaactatacactactgtaggcacaaatcaaaatgccccattaaagagaagttattttaggagattagaaaataactaatgccggacccaaataaagatgtcagaatgctaaattatgagttaaacccatgagtacatacagagaaatcttttactaattaagcctataatacagaagaaagtccactgagaccaagctgccatcccagtgacactaagacagctcagtaccagaaaaatctacctgtagaccacttcggggaatcataaagtcggcctggcatgagtcacagggttttcaggttagagtctgtggtttcccaagcgcttgtgagcctttcagttcctgagaaactgaggcattctctcgcgcagtggggcagagcattcaggcctctttgtggttctctgtattcccttggtagtcaaggaagtgtggaaacttgactggacaattgctcttagacaatgatctggtgtacccggcatagcttgcaaatgtcattgtatcctggcaactacaaccgtattgatcctggcaattgccattatattctgttcctgataaaggaataaaaaaaaatctgattgctcgcaataaaaattgccacagcttaagttttgctgtggacccatatcaggtgtccttggcctggtaaataaacagggacacttagagaccacaagcatcaggctaaagggaactggctctgtgcacgttccgtcaatgtaacaggcaccaggaacactgagcgtttacagtgtaagaattagcagagtaagacgggagagatggatggcttgggcttaagggcatgacctgcttctctagaggaacacatgaggtggctcagaaatgcctgcaactcccgctccaggggatccaacacctatggccacacccacccttgcatacacatcattaaaagtaacaaaaataaaatcttaaaaatagcaacttagtaacaagaatagagtgaaaaaatacatatatactggaaggaactccatgcttagaatgggatgccaggacacacccatggaaggaagtgcctctgtttctccatgactactttggtaacagaatatctcaacacggcatagaaggaaagaagcagtatctatattttaaatatacaaacacagactgaaaacaagaatagaaatggggacaataaaaaatgggaaacgcaggtgttattttcatgttgacatgctaagtacttcaagtccataagccatgtgtagtcaggcatgcctgtaacactagcgttcacttggctgaggcaggaggatcacgagtttaaggccagtatgggctgaacagtgggtttgaggctagcctgggacacctgtctcaaaaaactaaaactaaagtcaatgatggtacttttaggtgtcttgatttctatcgtgcgtagaagagcttacagaaatctgttgtgatttatttctgactgcatactattgctaattgtcagtgatttggagggtgagtttgtaaaggcacaaagaaatgcagatatagatcgtcatttcttactgtgaaagtcaagagaagcaagtacctcctctagctttttgaattcgttctccaacgcttcccttaggttcggagagtcttcctttctcttcgacctaacaaagcttgcaatcaaaggcggcacctgaagggagaacaagtgtttagtttatcagggtgaggctaatgccctgccctgccaacacacacataacaaacatactagaatccctccagagtgcttgaccaaggggagacggaatcacagtgtttacaggatccacggcctggcatttcaaacctcttttgtagactaggatgtggggctgctccaggatgtcatttgcagataatggaacccacttatcaagtttgaaccagaaatctcataaatggacactgagtggcctagaattgaacaaacaggcctagaactatgggaattttctaaaatcatactgagaaatagactagccaagaggcaccagctgctgccagtaccagcgagcactaacgggcatttgtactgccgcacgctgcttttgcattgctcccccagaatttaatcttgcagccactgccaccacctctataacaggcaagagacaccctcaccttctgcctcggccacctgggtcctggtgttacaggcatgccctgaccacactcatgtgtgtgtgtgtgtgtgtgtgtgtgtgtgtgtagctacacgcacaggggtgtgcaggtataatagacccttggtgtctaagcacatacccgttggccgtctctttactaatactgatttgaatgaatccactctgacactaattaagatgcaggcacattccccagggacctcagtgcactgtccctgctaaagactggcagtgacaattaagagctgacactctaggaaccagtgtcagagtcggctctaggcaatccgtgttagatctgtccacaggtgaacgaacccactagaagtaaaacagggaggctgccatgacgcttcccaagctaatcgcacaccccaggcagtgagcgaccaaccagcaggggaaactcagtcctcacgttcttggggcaacaggtcaagaaggcaggcagttctgagggcagagggccaacagcctcaatgaggacaagcttagcggggaaacagagctggagttctgagcagcctggccatgtttcaggaaggcagcaggtccaagcataaatatcaaaaatgtctaatcttagtgaaaacgagagaagacatgcagtgagaactgggagagaagggagaacgtgtggcagacttaaaaaaaaattttttttcaccaggggtgggtcaggaaaaagagccaggagggctgggctgactgcaaggcaagcaggaacagagcgtgccagggcatggtgaatgtagttaaggttcccagtgccagaaccatcacaaaggcagcgctgagtcagcctagaacaaaaggagggttttggtttgggtttgggtttttttcaaacataccttagagaatgactcaagggtcatcttctgacgtgccttcttgtacgggtcatctggaaataacttcttctctgggtaggcctcatccaggtactcacaagtgatgacagattcggtgaccaagtgaccctggctgttctccagaaccggcaccagcccaaggggattcttctcaaagaaccactcgggcttattcttcaggttgatattgatgacttcgtgcctgaaagatacaaggcgactgaagagagcgaggcagtttctgtctccctgaattaatgtggcccgattccaccaatccacttagtggaggagccttggatggaggagaagagttctgaccacactgcacccgaaggttaagaccctgggtcagatgccctcctgcaggcgagcagccaatgttcacttttctgtttatctgacttgctttccttagcatctccatgatccacctttgtcacacacttcagactttccttctcttgaacagtggaataccatgtattgagcattttcattacccactcatttgtcaatggccattggcagcgcaccatggtgaacagtgtcgaactaaacatgggagggctggtgtcttctgcatcctgacaggaggcaaccaactgggttgtgcgccatgtccactcaatatattggaatcagcctgacaaagcctcatttcattttgattcagttcaaaaggagttgaattgactcaactgaatacattttgctaatatgaattttgaaatccttgtttacaaggatattttttaatcctaaaaaaaactcataaaatgaaccatgttgaatccacatgttttggtatgttttctttaaaaaggtttctaaatcataaaaagtatgagactgaacaaacagtctaagggcacttgctgctcttgcagaggattgggttcagttcccaagacccacgtcagaggtcataactccagtttctggggacccaatgccctcttttgctctgtggcatcccgcaagcacataaactcatgcacaggtgcacacacatgaacataaaaataatttttaaaaagtatacaaaataaatttaaaaaagaaagaatccattggagtccggctaaatgcagattgtaactgtgtatgccttgtatcctgcagagactgtaggagacaggaaagcattctaatccttaaagcgatgtccaaagaactcaaatcaggcacagtgtccactaggagagaccactcaaaagtaagccatcccaacacgtctgatttcccgggtcttcacccacaacaaatcagatttagcttatggatttcaatgcataatccctcacaagaacaaatagccagtgtgaacactggtgtgtgtgtgtgtgtgtgtgtgtgtgtgtgtgtatgcaagcatgttaaaaggtttacagaataatgaacatacaaaccacctgtcatgggaaagacaaaagcccttgccatagaatagtgtccatctctgagaattatattttgaaaatggaaggcaagtcctgggctctggagatcaagaagacaagtgaatgctggaagcgtggcattttgagccaacactcagcacagctgagcccacaggctggaggatgctccttacacagagtatgcaacacacatgccctgtgtaaggtgctactgctccaggcaaagtttcctggtttaaaatcggtctgtgaataacgagtagtaatagacactatctgaaggaacccctctccccgtaagggcccccacccctgttatggtaaagtaatttcaatgttgcttgggaaatcctggtgcgaaatataattcttttccacactgagttgcagtaggaaacacatcacacaaggcattgtgccctgttcttggactctctcgttgtattagaacaataaatatcttttatttttttttcaattcagtttgagtttctttgttagagtgaaagttccaactaatatagaaaaattgctttttaagaaaaaaaaatacgttcttgtgttcaaaaccaaatctcctatccaaatgaaattaaaatcgttacaaagtgacaattaactttcaaatacttccttaggttacatattttaacatttagggaaaagaactgcctgcctagccaattctccccatggactaaaagtcgtttacgaattgtaactgcatacatgaactttttcttaagggtgagcttccaaacagaaggtgtctaataattgttcaaaagatcccccaagacattggaagggaaatggtccaacgaacatggtatcgggaaaagccaagagactcaccaactgtagataacccgtaggtcaaagactgtttggatatggaggctttgcaaaggcttgactctgacacttccttgtgtttacaacctaaatgactgtgcacacggctcagaactctgctaggcgggtgacctttgtgcaacagcgaagcaagcctctagttcaccaagaatcccaggacccgagctgagacagccaccccagggttccgcaatctagtgtaaaccaccaacctcaccgtgggggggtggggaggggaaacacgctttttttgagccccagactgcttaaacaggctgccctagagccctggagtccatgacaattctccccttgaaaagagggtgagcaactaaagtctcctacaaaaggctgagaatatttccccctgaccacaaagccaacgccgcgaggggttgaagcccagccgccagcggctccggagccatcgccctcgtcctcaccggattcccttggccttcaggaccatcagcgtcctctgagcgaaggggcagaacctcatgctgtagacgcggatctggccctccgggaccgggccggggggcgcgcttcctgcaggagagaggagacagtcacggcccggatcgcacagggatcccgggcatccccggtacacggtgcgtccccgacaccagtagcctcacccttccccaggctcctggaggattctcccgacatcgctgagccgctgtgcaggccgagagccacgcgggttccgctcccgtttgcgggcgactctggaagcacgaggtcttgtacactgtcctagaactcagccccgcccagaccgcgcctcctggcccggagccgcccccgcctttaaagggaaagcatcggccgctgcgatcctggatcctgatgctgtgtgacgttaaccggtgggctcccaggttcgctgcggaggtagtgcaaggaggaacaaaaccacagagacacacaccccgcctccacacaaggggtcttgtggtttcttgtgtcatgtgatgaccacctggagccggccaaagcagagatgctcagaaagagccaccccatccctccaggccgaaggtttcctgtctgccttcacacaggactctggccctgacctccatacctcccacacccactccactggtatgtgagctctagctctgcccccaaatttccaacattccagaggggtctaggaggtggtctagccacctggacggtcttttcttctgtcagtactagcttactataagctgccatccctatagtcacctacagaggcacatttcggcatatagaaaagagcacacatctggatgttattagcctccggacgcagttgtgctttcaaaattccatccataaaacatttgtctggaagcctagaaagagcacacgctggtttaagcacagtgggctgagaaaatttagccttttgagtccataagaaaaaaaaaaaaaatctggccagagggcttgcgaaaactgctgtcttcttattcaggcatgaggagagtttgcactccaggattcgcaaagctcatggataaaagctactaactccggggctatttatgaaagagcatgcctgggttttgtttccagctctattattggagaagcagagaatgcccttggagccagctccagttttgatcctggcttctccctgtgctcactagaactacggaacaaagtgccaaagtgacttaaatgactcatacgtctaacaattgcggccaggaaatggcagcaccctagcaggcagggcttgctgtggatgagctagcaaacatgattttttcaaataaagaaaggaaaatatacagttacagaaaaccactgtgctacgttactggtggccattatagtagggatcatgcctaagtcctagcagctgagaacatagccctcaaacatctgggcatatatctctattggccacagtcaaactgccacaggactatatattttgttgtagctgtaaccttcaataattaacctgaagagattaatctaagtcgactatattgcaagaagacgaaaaaattaaaaaccctagtgacaagaaatagtttttaacctactacgtaatgtccaccttcactgcccagatgtgtccacctgatgcagcaaccttctgtaacttttcagaagaatgatgggtaatttcatactgtccaatttataatctatattgacaggatcaaattcaggttgttgaaggtcttattaactgcctcgcagatggtgttttaataaaaaacttttatttctatatgttacgaatagctaaaatatctgactattagcttttataacatctcattccagctatcagagaatgttccagataagctccagtcattccaataaacctgaagacaccatgaattctgggagtaaaagaactgggaagatagatcatttcataagaaaattatccccaaacagcagccaccatcctttggcaaccaaattgtccacacaagtaataaagactccttcaaggtcatcgtgtagaaacagactgagccaaaccacagcttgaccaagccatagcctggccagcactgtttaatagattgcctctcaccactcgccccaaattcttcctctctttaaatctacaaccatgtcagcatggcttaaaggatgaaacacttaaatggccattttgattaaaaccttttcatacatgtttacgattactttcatttctttctttgggtcagagttgggcctctggcctaagactttggttacataaacttttctgtttgatttcattaagtctgtaactgtccatagcagggaaaacagacttcattagagttttcatggaaagatactggctaaatagttgaatgaacaagctagaaaggcccagagtctggtcagtgaatatatatctacatctacatctacatctacatctacatctacatctacatctacatctacatctacatctacatctacatctacatcatctacatctacatctacatatatatatatatctcacaataagaagccatgcagggacaaatggttcacaaataaaggagcttaaattaaatggagaggagagtaaaatgacttagttgggtgccacaaaccaggcctagtcgccccccccctcaatccatgggaatcaggggttcggacagatgggcatagagtcggcgagaattgacacgagagagtgtgttggatctgaatgtaatttgtcaaattgagcattaaactttttatacagaagaaaatagggaagttaggtgacacactggcaaggtacaatgaggttaccggattcttacacaaaacagaggaatgcaaacacgaaggactggcaagaaccagctggaataaaatacaatgttaacaactgggatcaaaagcagccccatctaaggtccgcttacaggggccaacgcttcatgcccttgccataattcctactctagtctattgtataatccaccttccccctaggccattgtgaattcctgtgtatgggtgtaactcagctatctatagttctgagtatctactctggttccttccttcttcctagttaatggtaaattcctgtgcagggcagtgactcagctatccatgcccagggtcagctcaaggactgactgcctaggactggtgaagaatctaacttagctatatgtcaaaaattcaatccttagaagaacttataataaagcaatattaagggaaagcacacagatccatttaccaactaaagcaaggatattggagcattccttatgcaggatgccacggttccgggagactaagtttctgtgaactttttgcctcaggaccacacccaggctttttggcctgtcaggtgggtcactactggagtggatgtagcagttgggcttattcatataatggacagttaataggcattcataaactaccaactcaaatgcatccagaaatataactggtcataaaaggaaggagcaataggaggcatgttatgattgcatgtcacctttcagatgtgcaaagtgaaagacattggcaactgcagcacacacgcatgtgacagaattaaaaacaaacaaacaaaaacattatgaccagcgtttaggagagtgtgtccctcctacacgaaggaagggaacaggggaggggggagggcctgttcatgttgtccaagggatgattcaagggtttcgtccactttcagttcaactgaaagatggcttctagccaacgtccctgctgtgacacaggatgaagtggagttggggtgtgggggcgcaagaaaacttcctgtgcaattttttactatgtaattcagagaagaaattaacatggtcttttctttttctttttgagacagggtctctctgcatagtcctgtctacactagaactcacttcatagcccagtctggctaccagttcacagagatccacctgtctctgccttccagagggctgagataaaggtgtgcaccgagcccagctaagaaactggattctttagaatagacaagcacctttccctgccactgctgaggcctgtgatctaccaccatggccgaggaaagcattgctgctagaggtgtgacgggtgtcaatactccaaggggttctgaagaccgccatcgtccatgatggcccagcacgtagcacccagtataaagctgccaatgcctaaatagaaaagtgtcacacccatctgcgtgcttgcatccaattgtgatgagcccacgtatgtcaagttggtggaggcacttatgctgagtaccaaatcaacttaaggctaatcactgcagggaactagggaaatgggtgggcctctgtcaagctggtggaaagggaaaaatggttggttgcagctgtgtagtggttgaggattacagcaaagaatctcaggccaaggacattaccaaagaatactttacatgcaagtgaaagaccatgacaggatgtaaaaggtcacagaagccctgaaattggcaaaatagatttcattgctagcaaaactagtttcactgatttagaaaaatagaggtgcacaatgctctggccgctccttgaacctgtgtgtctgccaatgttctgaccattccttgaacctaggtgtgtgcccactgctgcacctcactgccaggtgtttgtgatattggttgctaagatagagtcagaaaatctccccagcaaccacagccggggccaatccggagttgctacacctgcattagactctttccttgtttccctcccatacccatttcttgagaaatcaatcattttaaattgtttagatctggaaatcccctacttccctcttctccttccccccctgagggcctataaaaactgagacccctttctcctcggggtcgactcctctacccctgtgtgggatatgagtcatccccagagctctagctttccccgaataaagcctcatgtggtttgcatcaagcttggtctctcgtgagttcttaggggtctgctattgtcccgagacttgagtgagggtctccctttggaggtctttcattagattttctgactctatctagtccaaaggaactcagaaacatgaaagacccacgaggactagacatcggcaaaaagtcagttctaatgactaaaatgggaagagagagagagagagagagagagagagagagagagagagaaggtaggtgttactgtccttaagcttctatgagaagttaagacaaattgagataaattgggaacccagtatgggggtggggggggagaaaacaaccaaatctctgtggctttgactggtgacccactaaactcatgctgtccacagcagcactatcacaagataatagagtaggtaccacagccagaacgctgatgccctacctacaccttcggactaaaccaaggtgaaaccagtggggtttcagatggctgcacaaatggtaaacaaagagaaggaagtgttagcaaggagcctttcccctgagacttcctcaagtctttgtccagaatcacctgcaatgccagagagtgtcagagcaggatcaccgcattcccttgtgactgactttccccagtgacttatgagtgcactgcttttgagggtcatgccactaagcaatacattattggattctcaccaggcttgctttaaaataacacttttgatgtgtgccttaatggttgccctggttactctgcagaaacttgaaggcttttgctcaaatcactgactctttcctagagcatgcacagctacccggcaggcaggcgttgagaatgagatgaaaggcctgccatcttcacattgtgtctgttccatttgcatccactgaggaggcactgattagctctgactgtggtctgatcatctgaagatgctttgttcaagactacagtacagagtgaagctgccatattgcctgtcagagcaaacatgcatttttttcctcctccggtctggggtatctcagcacctgctctccctcagcctattacaaggctcaaagaaaaccaggagaccaaggtacttatgcagcatactgacatttttaatactctgacttcatattttctcaaacaggagagtttgaatatgcttggcctatgggaactatcactagtaggaggccttgctggagtaggtgtggccttgttggaggaagtctgtcgctgtgtgggtgggctttgatgtcctatacttaagctctgcccagggtggaaaggaagtcctctcctggtggcatgtggaagagagtctccttctgtatgtcttcggatcaagatatagaactctccactccctttccagcaccttggctggccactgccatgcttgccaccatgatgataatggactgagcctctgaacctgtaagccagccccaattacatgctgtcctttataagagttgtattggtcatggtgtctcttcgcagcaatgaaaccctaactaagttttttgttttgtttgccctttcccatgaatatccatagacatcattggctactcaccacaatggaagtgctactgtcagagatgtagctcactgtcctacactgagtagagccctccaccccagtccagtccaaaaggccacttgtgcagagggtatatcattgctaagttactctgnnnnnnnnnnnnnnnnnnnnattgattagctctgaccgtggtctgatcatctgaagatgctttgttcaagactacagtacagagtgaagctgccatattgcctgtcagagcaaacatgcatttttttcctcctctgaacctgtaagccagccccaattacatgctgtcctttataagagttgtattggtcatgctgtctcttcacagcaatgaaaccctaactaagttttttgttttgtttgccctttcccatgaatatccatagacatcattggctactcaccacaatggaagtgctactgtcagagatgtagctcactgtcctacactgagtagagccctccaccccagtccagtccaaaaggccacttgtgcagaggttatatcattgctaagttactctgacccaccatcacccaagctgttcatcaatagagcattcttcttttgccataggccactctgtcctggtgatgtcggcagcaggagactcagtcattttctctgtccaaaagtcctatatttatacaacaaagatcttaaccttactcctttggggtctaccaaggaagaaattttgtgttttttgttccaagtgactcagtcagtgcctgaatggatggaaggtgctcaaatacttttgaaggagatcaaggagaaaggacagtataagagaaaagtgaaaattgtcagtcaaaatggagtcacttgtatcagctaatgcaagtttaagcaaagaaagtaaattaggccaggagggtcttatgcccatgcttccttgatgacagctaccgtaactaactatagatcacaaccttgtataaaggctgctgtgacctcatacagaagccactgccacaggacatctgtccagctcttgactgtccaacctcagactgtgactgctaggtttcaacctgctctaagttactccatattgtatatagagcagttgctttcagtctgtgccttgccctgaatgactccagattagaaaataattccaattctggggctgaattactgtctttctcttgttcgtgtgacccgtccagcaggtccagttattcgagggtctcgaggggacctcctcctaagaaccaaatggggggtagagagggacgagggccttgtgcgaataacgacacagaaaccgttctggaatgcatcaaagcccccaaatgtatttgccaggcccgaggtttaaatgcacaagcaaaaggggaagtgcctttcagcaggaaggatggggcagtagaattgcacaaggaaacggggaagtacagatacttatcagcgggatggatggggcaatacaaggaaaaggagaagtatttatcagtggggggggacaatagaattgcacattcttaggcagttacacggggaagcaggaacttggaggtatcagggtatcttgaggtcaggacatccagcgctgacttagggctagaacaatctgtggttgttctcagagcggtgtgtcggtggctcgcttttgaccctcttttcttcttggggggagaggcccaattcagagatcaggacaatagcgttgctttaatagctcccaacatctcccccgttttaatatttttataaagacatattgtataataaatttgtagccacgtttttatggactgccaaaacgtctgtttgctcaccgggtgattttctaaaaccacgaaggacacaggactagtcatctatgaggcttcagtcaagggttccagtctgttgggtataacctgggctagccaagggatttaggaacgaagcaagctccgtgggtagaggtagaggtccgatccccagtgtgtaatgttaggggccatgtacgggattgactctcaggcccacagatcttttcccagagtaaccccgacctgctctcgtgccgtttttcatgggggaaggaccctagggcactcaaccttcatgcaatcagacatgcctctcagagactgtctaacagctttcagactaatctctgtgcagtacttagtcttacaactctcacgggcgatggcctcaagttccaattttacgatgtgtctagcctgggatgactgtttagtttccaatgtggcgagagtgtatattaccatgtcggaagcacagactacggcaatctataaatgatttgtggcatgagactgatggccaaatttagggggaggggaatgatcttacttaagcactttatggaaattgagtctctctccccaagaatagggtgatgaagcggtatccacgtctgcctcttctccagtaacctgcttgttatcaccaacgtccagccaatggtaatgaactgaaacaaatgcgcttgaaagagatgaatcaatttgagatttaacaaatcgggccaatttctgaaatgcccaaggactgaaggaaatcaataataggagtcccaataggggccccaaaagggagggcaacaaggtcgaaagccagggggaggttgaaaaccagttttggtagtctaccttccaaaactaggccattataaatacttgtgtatgggtgtaactcagctatctacagttctaagtatctactctggttcctctttaggtcttaaactttcttcttcagagatgatcgtaaattcctgtgtaaggcagtgacctagcttttattcaaagtgatagcgtaatgccagaggtaattctgaatgtcactgaataggcaacactctctcagaattaaaagcccatggtcagctcaaggactttctaggatgctatcttttgcctctaaatttttatttatataatatgttgctctgacaaagctatggaaatattcctatgcttatcattaacaaaaatttgcagtatgtagctgctgatctaaggctgtggtagataccttttcaaagtttgcattcccagttttttaaaccaaggatcgttgcctaactctaataggcagcaaaacataagcaggtctctaacaaaaacataacagtagattccttatctaaattaggatcgacacaattagttaattgacaagaattacaatgaatataaaaagacttgccaagattggcgatcttaactcttaaaattatctaacaataagcatataggtaaggtacacaaactttcatagctataaggagctggcctgaatggcaaaaaacagtgtctctgacgaaagcatctttgtacattctctgtaccagtctctctttctcacgagacagcttttttacttgtttttattttaagttggcaccaggttggcaccccttgctgcagcccatggtggagatacgaagtttctttatctgtttgtaagtggctgctctccgatttctcctcttttgtgcactcaacacagctttctggtcaccactgtcagggcactcacaggtcacaggtcagcctgtcacattggaagctagtatgttcttgtagcattctgtggaaaaaacagaaacattcccccctttccccatattaagtatctgaacaggatcatggcaagtcccaacaagtggatcctttttatctgccctagacattactatatccggtttttaaaaacaaaaatgtgatccaaataatgtgcacggggatataatttcccccccccttctttgtttttaaagaaggtatagtttttaaagttttacaataccttgtctttgagaattataaaatatctcagtaacatgtgtaacattaaattgttgacaaaacatcttttggaggttttgaaaataaaaattttgaagcaaataaatttttctttcttagattttctgtaactaaaatcctaaatattaaaaatatgttgtctctgaatcttatggagcaacaactattctccagagctctaaacttctctttagaggcattagctaataaaatactttttacttagaaaacaatatacactgaaagatttaaannnnnnnnnnnnnnnnnnnnaaagcaaaactcttggaatttaagcattttttaaacatctgaatagatctgcaacaaagctaaaaagaaattcccttgaacataggtgaaacttttcttagactctgtttgcaaaataaaagaaggttacaagcttctctggggctgccttaacttaaacgtagaatattttttaatctgagcatcttggccctcctgcaataaggaccggttttagaggaacaatttaactgtctatgcctctaatttttgatactctttcttaaggatgattactcttataattatcttaattacaatatacaggtgaattaaagatcttaaatttgaaatcaaactgcaagctgtagtcaatggaacactggcaattttaaccacaatttttaagtttccgttgcaatattagaatatatctacaacttttggaaagcaagacccaattttaaacaatttattctctttaaagtcaatactagaaacatcactattacgttacgaagtttggctggcaattcatgaatgcatgacagtgtaaattttaatgttccattaaggagacattgttttaaaatcttatctctataagtctactttttaggataagaattacataaaatattatctcaatttaaaagtatctttaggggactagttttctgggctggtttatgccaggtgcttttgtttgaaaatgactctagccctgagttactacttaagctaactttgtaaccagtgttatacctttttaatcatacccaaataacttataagccaattttctatgaccaagatatgcagatcatatttatacctttaagaccaatcaaaaaacaaatgaagtggcttcacgaatcttataaatttagatcaattaaagacttttactttttatagctatacttataagataaaaacacactttgtcatttgctaaacacaataatcacaaaattgcagagaattttttaggaaaaaacaactatcagcttgtttgccttagaactaagaggttgtagattctttttctttaaaaaccagtttttcagcaggacctctcttgctgtgcttgatttttagctaaagggaggggcctctctcagcctccgttttgcaaactgagaatgattcagcaggtaaagtttttaaccattttttttcttttctttttaacatgaaacataaaacagccagtcattcagacaacgaaaccattattcagacaacgaaacaaaaacatacatgaattgacatgtgattggtgcaccaaccatagacaatagaaagagggtagagagtttctcctgtaggggccagagagaataaaacagggcgttccccgatttctctctgtccctgggagagttttaaaatccattttcctttattccttcctttcctttcctgtttgtaagaggtagcttgttaaaccaagattaaaatccaaaattttctaagtttttggcaagcatctaaaacgtctaatttatttaatctgagggcaaatttttgagaaaaacacacaatctctatacactaaatgtctcaaatagcctaaaagtttaccatgctaaaacttttttgaagccactatcagtccacacttagttaaatattttaaagccatctgtaaaaatgctctctattttttgcaacctacaaaaacaccattgacaaaatgaattatatagttttaggaaatgatttcttaacttccaataaaacctaatctatgaattttttgacctttacgaagtctctttaaaacccatttttatttactctaaatatgttattgcaaatctctagcaagggcctcgaagcatgcctgggcccaacacacaacttcttaccccagagagttctgtcaaggcaagctgaactgactcaaggggaagctgccgagcgtctgaaagcagggtaaaatgttcaaataaggctatgccctcataaaagggcgggaagcagaaaagcacatccaacaatcttcagattctgacgcattatctctttgtgtcttatacaacaaggctaaagcagaagcattcaatatagaccacagtaaatcagtggaagaggggggcctccccgcagggagagtgggctgaaacagggtcgtagcacaccctggggcaggaacagggggccgggtgcctggaagtcctatggatgctttatgattgttagggatggttttaaaggtcaggccattgtcatagttatcttgatacaatcttaggccccaggtgagaaggcgagaactttctcaagcctctaagttcctcctcttagcagtaaattttatgatcagtggatcacaccatcccttagtgggatgtaagggccaggctataggccaatgtgttgaggaaattactgtggcatctgccccggtatccaggagcccttgaaactgtttgtcctctagaaacaaagtcggcatgggccgtgaatcagttattttctgtgcccagtagacttctgaggatcccagggaggaaggtcctcgctcctctttcatataagggaaatggccgaatagtgggagtggtaaggcttgggctatgcgctctctagccctaagggtaaaagtctggacacttggccgatgatgagaaaaaatgtcttttggggagggggctcaaattcacctgtgttaactgctgttaattgaggcatataataatcaggggtgccccaggcggcatctccacccaatgtgaggacacagatgtctacttctaacttgggccaatggggctcggcaccaatcttggagctggagttagagcagccccaatggccaggttaatagacttagaaacttgttgagaaaacacatctacctcattacaaagcttgatcataccatttatatctaaactcttggtttcacctcccagggcagccctacatgctgaattggcgttttcaagagcaagttgtcggactaacagaccctcactttcctcaggtcccaaaattctctcagctgcttcctgcaatctggcaacaaactgcgcataggactcttggggcctttgtataatcttggttaggggcatagttagcgcccttgctgcagggacagcacgccaagctctcagggccgcttgtgctgtctgggcgaggacaacaggggagagccctaattgttttatgtctgcagggaaattgccttaaccacagattttgtcagcagtccaggaggctgtcttccacaaactctgactttcaagttaaatattggcctctagtgaggacagactgaataactttattccattcattgggtatcaagtagccttctgctaaaccttctaatagagatactgtgcgcggcggcttagttttgattttgtgagacggcgattgggagttttctaaaaaaatcttcagtaagggctaggaggcaagcaccttctctgcccacttctgcctgtttaaggagatctcttatgattccccaattgctaaaaagggacatcttttccttgttttatcaaagcattaacatctttgcctactttattctaagttaaagggtgtatttcagaaccattcaataccagccatggacatctctcgtccgtccacaaaacaaaaatattttattaaattcccctttttaaaaactcttacccctctctccttaagagaaccttttatctcttgactaaattccccatggttaatgggacaacaactgaatacctaggcttacctcccaacgtccgtactcgacactcgaacgaagtgtcgatggactgtcccactgtttctctgtctgcgcggtacctctttaatccttaatccgttgtccggagggcagtcgtacctcgtgctccacgttgggcgccacttgacccgtccagcaggtccagttattcgagggtctcgaggggacctcctcctaagaaccaaatggggggtagagagggacgagggccttgtgcgaaaaacgacacggaaactgttctggaatgcatcaaagcccccaaatgtatttgccaggcccgaggtttaaatgcacaagcaaaaggggaagtgcctttcagcaggaaggatggggcagtagaattgcacaaggaaacggggaagtacagatactgatcagcgggagggatggggcagtacaagcaaaaggagaagtatttatcagtgggaggggggacaatagaattgcacattcttaggcagttacacggggaagcaggaacttggcggtatcagggtatcttgaggtcaggacatccggcgctgacttagggctggaacaatctgtggttgttctcagagcggtgtgtcggtggctcgcttttgaccctcttttcttcttggggggagaggcccaattcagagatcaggacaatagtgttgccttaatagctcccaacattcgtgaaatatcaactgtgagacatagactgatgaataatcacaccgactattaccatctagaaacataacaaattaaatcagaaataaatggacacacaggtatgtccaaaccatgtcagaaaaacctaagcaatgaatctcttggcatctcttggatcatatgaaaggtgggcgctcatcattgagttaggaggcatcaaaccatcacggggtcagcaagcacagaacttcttgctccgttcatgggatttcagctctgcattgatcccttcctgacttggtccactcaagctgccatttgttagagcccaatgagttttgcttggcgttctgtgctgtcaaagccttgtgtccgaacaggtcagtgcctgggctccctgtgttggtacctgtttttactttgcttcagggcatctctttgtgtctataccaattccactcttgccttcggtgaggcccctttgagatcttcagcctctctaactttttcttagtcatcccaaaacacacatattttataacatacattgtgtgtgcatgtatacaatataatgtgtaacttgagagctcacaatcgtacttagaatgaaactgttattgccaatggccaagtaatagttggttaattaaagccagccgaattgatgtaacttgtgggctcactgttctaaaataaattctaacatatagaaaggcacaaatgtgatcatttatgtttctgaagtagctcattcactgacgtcgtctgtgaagccagggatgaagcacagctctacacctccacactgtctctgaaagtagcctgagcaattcacctaactgggagtggagagtgtccaggctcaggtaaagatgcggatcgagggcttacatgcacgcgcgcgcgcacacacacacacacacacacacaccgcacatgtacatggatacacgtggccatgtacacacagacatgcatatatgtacccttgcatgcatacccaggaattgcaggacaaaccaataggaagtagattctagagcttgttaagaataagcccagtgtggccgcagataccttaagtcgaagcactcagaaagcagaagcaggctaatctctataagtctgaggcaaatgaaaaaggcatacccccttggcatgggcttctcagagaagagtttattaatacatttttatcatagattttttttttaagtacagggctccagaggaagaaagatccccaggaaaaagaataaaacagactagtggggggggggggtggattctcaagatatcccagttgagtgtcttagcattaagcttatatacaatttcggcagctctcaagtattatctcaaaagactgctagtgtgtgtgtgtgtgtgtgtgtgtgtgtgtgtgtgtgagagagagagagagagagagagagagagagagagagagagagattctaggaggctccttaaatggagttaaaatgatgaggtatgaccaggagccactgagattacacaaggaggttaagacaagaccttgttcagtgaaggaaaattctgatgaaagatctagaaaacttcaggtctacgacttggaaaggaataaaacgtcaagcaaatgttaatcatattggtgtaagtgttgcagctctgaagtgaaaggtttccacttcaaaagtgttccagtttgctccagctgctgcaggggagcttttcccaatgggaatgtaacagttctgctactcgggagggaggggacgatttccaaagtgttacagttctgctctaatgaaagtgttagagctctgctcaggtaggggtaagtttcccccagccaaagctctatactgagaggtatcctggcaacccggagccaaggggtaccaccaagtcacaccacacagcaagcctcacacaagagattaactgagaggtaaaacctcgatggacgatggacagtggctgcttttgctcaggcaatttgagcagaaggcggggcttatataagatttctggaggtgcagagctttccaggatagagattcccagggtggtgattggtgagatatcaattcctgagcttgaatgaactcagggattggtgggtgtccttattatgtaattggtgggttttatcctgcattcggaacgtttggttctcagctgccagactctgattagctggctctcccttctcctgactccatagtttcacgtctttctgctctacctcagcatcattcttgttattaaacactgatgctgtggattattgcttcaaaggtcttcctcttttttctctctctctttaaaatccccctttctttaacctacttgaacacatccatagttcattactgtagggtaaaaagggcaatagaaagaacactatgaccctgacttgaccccaagaccaaggccaagaaaaagaatcccaccaatccctaagcttgccacaatatcagacaaaaaaaaaaaaattccaccaatcccaggccaccctggaaagcccagcagccatgaaaccctacataaaaaccctaccttatgctcagttgacagctgcttctagtccaagcattgcatccaccctcctgggtttcccctcccaataaatctcttgggtgaggtttgttgtaaagtgtgacaaggtggtattgcttggttcccaattgccaggatacctttcctatcaaagctgtaacattttcattggtgaagccctgccctgccactgtaacagttacagtgatggagtgaacattccctagaccaggctcagccatttccaacatattatttcctttctttctttttctttctttctttctttctttctttctttctttctttctttctttctttcatcctgtttctcttcttcttcttcttcttcttcttcttcttcttcttcttcttcttcttcttcttttctcctcctcctcctcctcctcctcctcctcctcctcctcttcttcttcttcttgtatagaatagagtttattcaggccatgggaaggggagttaatagagtagtaaaggcagagagagagggagagagagagaggaggaggagggggaggaggagggggaggaggaggagggaaggaggagggggaggaggagaaggagggataggctggtgggagcggggagggaatggggagcccaacttttttttttttttttttggccaggtgggaaggaaggaactggaaaaggggaagagaaactcagggaagaaaaaggattagacaggacagaggcaaggggctaggagagaagagcatagcctatcacccaccagattacttcagtctgcctccttgcgctcacagaggagacacctgaagggttgttaggcagccattgtgcccctcaccctttggattctgacttggctttctgctcactgggttccgagcaggcttaaccggtgcagggaaataaatgaaatatttccggcgtatagataggagtagcatggcagcatgcagaattaataaccgtcttgacacttattaatactgaaactatttgctgaggcagaagcactccagcatccacgacccagggtcccaccgctcggcttcgctcgccgctcgcccataggcggcgcccgccagccaatgggcgcggggttcccggtctccaggatacaggtgtaaacagtggcatcttcgcgggcttcttagcctgacccggccgggccaaggagtaacggccgcagccccgggtgcgctgggagtcggcatgtcgcaagacccggagcgcgacgacgtcactgcctctgccactgcctctgcctcagcctcagcccctgcctctgcctctgcccactactccggatcctccctgtcggtgaggtgcggcatcgcggccgcaaggggctggaggggggaaaccctgccaggacccctgcccctcgaatcctccaagcaaactcgctctgcttctcactccccannnnnnnnnnnnnnnnnnnnnnnnnnnnnnnnnnnnnnnnnnnnnnnnnnnnnnggctccgaccctgtgcagcctcttcagttggacccctcggtcggtctcctgaccaaatgaccaaccggccctcagtttcccacctcaccacattgctctcctgctaagggaccctcacttgtgtgcccggtattcctctcccccaccttctgtttttgcatcctcttcctgcctcggtggtactcaaccccagagctcctgcaaacccattcagccctcctcttcatcagcgtcctcttaggcgattccctcccttctaactccttccttctcactccggattcctgtgcgcagttgctgggccttagacatctggaagagctaacttttctgtccctccacgttctgaaggatggcttacagttcagcgtcccctgtcactgctgttctgtgtcatgggaggagatgggggacagactcggaaaacatgtgcccttcactctctttcctccactttcaaacatatctttaatatttaaataaaatggaattttccttatctcagactttccttccaccatatacctaccacacaatcctctcctaaaatggacctctcacgttctaactcctttgccctcgtgtcttccctgtccttatgtggatttttaggtctaaaacagagccgtgcattcttcatgtgtgtaaactataagcaagtcacgtacgtggcttacaactatagagtgtgctgtcttactcaaagcggttttaaatttgtttagttgatttttttaagtgattttgagtttagtttttcaaaaaacagtcaagagaaaagaaccctggatacactgttttctacaatttcctttcaacctagtgagccatgtcacaggccagagacctattgatctttgcatttcttttatatatagagagagatttatttatttattattatgtatatgtgtatatgcgtatatacgtacactgttgctgtcttcagacacaacagaagagggcatcagatctcattaccgatggttgtgagccaccatttggctgctgggaattgaactcagaacctctggaagagcagtcagtgctcttaactgctgagtcatctctccagcctttgcattgttctagtccatcggctcacagtggtttctcagtgagtccctgtgttcctctgaaagactggagcagagagggagttaaaaatgaagcggatgtgtttcaaagactgggatggctttctaggtgctgtgttggaaaggaagtgagcgcggatcatactgatgctgatctatcttttctcaaagatgggtgcaaggattccctagtcagaacgtccactttgtcaatgaccagaccatctgctacccttctgggaactttgtaatattcattaacctggaaaccaagaagaagactgtactccagtgcattaatgggattgtgggcgtcatggcaactaatgtgcccagtgaagtcgtggctttctctgaccgaagatttaaacctgttatctacatatacagcttcccatcgctgaccagaaaaaacaagttaaaaggtatctgggacaccctccccctccccctttaagtcagccgtttgacttaaaggtggtgtgcttcccgtcaacactggcattacctcagaaattacctaaaagggcagaatcatcctttcgtggtagcacacacctgtggtacctcaccccccacccccttcaccccggaactgaaggatttttgttttgtttgtttttcaagatagggtttctctgtgtagccctgggtatcctggaactgactctgtagaccaagctggccttgaactcagagatttccccctgcctctgcttcctgagtgctgggactaaagggacgcaccaccaccacctggctactgaaatttgttttttatgtgaacaaatctagttcttaggaatgaaggtgttttgtattgtgaaaggttgttttggacagaagtagacaagctgaccactaaaggtttattaaccccataagccacagccatctgacttaaaggtggtgtgcttcctgccaacactggccttacctcagaaattacctaaaagggcagaatcatcctttcgtggtagcacacacctgtggacccagaaacttagaagctgaaaagggaggctcacttgagccggtaagctggaaactagcctgggcaaatccaaaagaaacagctacaccctcaaaaaacacacaacctgattccccgcccgccccacctaacaaacccacaccttagtttgaacatttctccggtggctgacttgcattttaaaccctgagaaacacaggggttggagaactggcctcttatgcaacaatgtttgttcttttcctggtgactgattggaactggaattcttacacaaaccgatgctcaaatgactacaggcaagactgaacctccctgtccttaaccacaaatggagctaaatatagcatctaatgctaagttttgtgttgataggggaggcatatgcatgcacacacacacacatacacacacacacacacacacacacacgcatgcacacatacacacacacacacatgcacacatacacacacacacacatgtacacacacacacacacgcatgcacacacacgcatgcacacatacacacacatgtacacatacacacacacacgcatgcacacatatacacacacatgtacacacacacgcatgcacacacacacatgcacacatgcacacacacacatacacacacacgcatgcacacacacatacacacacacatacacatacacacacacacatgcacacacacacacacacgcatgcacaccaagcactcattccaggttatctattatttatattactgttgaaccactcacagatgcagctaactttcatggacggagtagctagacacctccagatgcctctagctaatgatccctgcccaggtttaagacgacctaaatctgagagtggtgattggttacacacacctgtatccagacttggggaaggcgaggaaggnnnnnnnnnnnnnnnnnnnnnnnnnnnnnnnnnnnnnnnnnnnnnnnnnnnnnnnnnnnnnnnnnnnnnnnnnnnnnnnnnnnnnnnnnnnnnnnnnnnnnnnnnnnnnnnnnnnnnnnnnnnnnnnnnnnnnnnnnnnnnnnnnnnnnnnnnnnnnnnnnnnnnnnnnnnnnnnnnnnnnnnnnnnnnnnnnnnnnnnnnnnnnnnnnnnnnnnnnnnnnnnnnnnnnnnnnnnnnnnnnnnnnnnnnnnnnnnnnnnnnnnnnnnnnnnnnnnnnnnnnnnnnnnnnnnnnnnnnnnnnnnnnnnnnnnnnnnnnnnnnnnnnnnnnnnnnnnnnnnnnnnnnnnnnnnnnnnnnnnnnnnnnnnnnnnnnnnnnnnnnnnnnnnnnnnnnnnntcctaaattgggaactctctgtgtggattgcaaccccgcttcatgcttaagatgccctcaacttagcttcgtggctccagccctgggcaagcaatcagaaattaattcaaaccagtagacaacatccatactgaataccaaatccctagaaggatcacagtaaaaactgaaataaatcatcaaggaactctattatcagtgtcctctattatcaaccagaaggcctaaccaatatgataaaatatttaacaacaatgtatagctgtggaacagaacactataggtgatacattcatctgctgggacttactgaggaaggcttagtaagatagtggttgcagaataaacacccatacatgtagggtaaatgtaacacacacacacacacacatacacacatacacacacaattgcttacccaggactggagccataaagctaagctgagggcatcttaaacataggactggattatatgaattaacatacacacactgctatataatgtatatttaaatatataattctgtagagagggattccaggatagaaaagatgattgttatagataaacatatttccaatatttgtcacagagagccattcatgggctcactgttttggagagtagggggatttaaatgattccagagtgtctctagaataagtacgagaaggaggtagtaaggccagagggtctttgtaacatctcaacactcaggcattaggagaatagtgtttccagatcactagaggcataaggaagactagatccagaaaattgtgaactatgatgaagaaactcacagtccaaaggatagagattattcaacagtgatgttatacatttttgagtatctgaactaatttgtcaagattgacatcctgttcatcataacacgtatcacacgaaaatgggattcaacatgagcaagcctactggaaaaatagtagaaaatatggcaagataccatagcttggagaagaatgtaggaccctatttataaggattggtatatttactaacaaatgctaaactacaaacaccagggcacacacacacacaaaataccatggaaaagaatgaggaaaatatattttaaaaatataatcaatcgtcctcacagcacttatgaaccttaaaggactagcatcccagacagatcagaagccgtaagtgatcaattatattaaaactgtctgtcaataattgcttttgaaaagcttagggctggcaagatggctcggcagataaaagttcttgctttccaagccggagttcaaatcccagaacccgtgtaaaaccggaaggagagaaagtggcgccacacgggctcctccaacaaacacatgcttgcccgcccacacaaacgcaagcgcgagagtaccgcagttgatcatttgtagcatggttcagtccaggggctgtttctccggggcaggctcacagtgtgtttggagccgtggagacattgatagcctctcgctggctggcagtgagatccagcgagctgagaaactgatagagtccttctggggccactatgagaatcagatgcaaaggaaatgtagcggcctgaaatatggctataggtccattttcaaaggagttgcataattggaaagacaaagcagccaaaacccctagtatatgaacagtggtaagtatgctaaaaaaaattaaaattaaaaataaaaaaattaaacattttttaaaaacatgaagcattattattgcaagcattataaatcaaaattttgtaaaaaacgttaggaacatgataaaatgattcatgtgatgtaaacaagaaaccaataggacagaacacttcgtgtgatctaaactgtacctttaaaatgaggcatattgcatatgctattcaatcaacacttatcacaactataagtagcaaagttatatacacaggaagtatatttgcatgtacttttacatgtaaacacacagaaggaagagactgatcgtggtagtgcacacctgtaagcctggcactggggaggaagaggcaggaggatttgatgtcaaggctatcctcagctacctagtgaatccaaggccagcctgggctctatgagttctgtctaaaaggaaaagaaaaaaaaaaaagagcaggaagaaatttactaaatttgatgttagaaatagagatatactttttctctctctaggtttttaaaaactctcttcaaaaatcatatatttgaaattttgaatttataataatataacaattagaaacaatattaatgttgacgataaggaaagtgtctgaaggatatgaaattgttgtattaaggtctcatcccacggaaaatttatcttttattttttgcatcacattctcaataaacgcatactgttttctttgtcagtccatgctaaataaacccaatgacaaagtcacattttagggatatactctggccaccctcacgtaaaaagtgcagggctgaagagatgcttcggcagttagactcacacacagctcctgccgaggagatgatcccagaacccacaatttcacagtcacccataactccagctgaaggatatctagcgccctcttccggtctctgcaggcatctgcacacatgcggcatacagtccaacacacacacacacacacacacacacacacacacacacacacacacagaatgagacagaatgtaaaaacagaagcagtcattaaaatactcagagcaagcgcacagtctcaaatacccaggctgagcttaggcctgtgcccccacactagagagcaaaatcagctgtccctcacccggcctccccaagacccacctactagacatctcattgcaaaggcctttaaagtgaataaagaaaattgttctaaggactggaaacaaaaaactgagttgaaggccagatatggcctaagggtttataaatctgtatttatgtctatttgatatattagttagaattattacaacctcccaagacacttggcacttgagaactgttctaatcccaatgtctcatatttatagacatgtggggccattcattccaaatcaggctgggacactagtgtcctttgctcagtaccacaccagagtctacagacagttacctagtcatcttaacaggaagggctctgggaggaggaaggctgggatcctagcacttgtgagacagaggcaggggactgcaaatttagagctaacctcaacgacaagggaaggttctgtttgtaacagaacggggcaaaaacacctctcagacaaggcccagggaatcgcttaccccctgggaaagtactttagaggtgtatgccagtcactagggaaagggaagctgtgagaccgtgagctcatctggatgtgacagtcctggattgtgtcttttaggtgacatcctcctggactacactctactttgcttcagttactgtggcacctacctggccagttactcgtctctcccagagtttgagctggccctctggtaagtcccagcaccctggagtgctctcttctccacccaaccaccccctgacccctggtttcaccggaatcttcccccgctggattttaccaaaggggatccacatggaaaacgccaaacaggggatgatgggaaggttaactttcctggccgtatgatttagtgacatctttatgctcaggtatgaagtgtgtcaggacagcaactgcagcagctgtgttaccaccgtcccttcttagtgacacgtgcagtgtttgcatgaagtttcatctctccccaaaagcaaatgactcttcttgagttattagcatgctttctgtctgtgttgaacgtaggatggtctgtgtgttcaagctcagtttgaagtgagcggttcacggctggcactagagcagtattcttggacctgagcattctactgcattggccagctgggccgagaaacctgcgggttagacacagaaacctgcgggttagatgagatgtttgtgtctgtgctgggcctttacgtgtggccagttttgtgggtgcattctttgccatcattgacataaacctcattggggagtcgggatttgtttttctcagtggaaaatgctagatgttcctggggcaattgaggccactctgaacaccagctaagattaaaaatctaatattcccctcttagagagccaagtttcacttaggacttatttaccactttttttttttctttactattttatttaagagggtattttatctgcctgtggattctgggaatcaaacctagatcccctgaaggcacattcagtgctcttaactgctgagccatcaaaagctgagcatagtagggtggttggcacctataacccccagcacctgagaagctgagacaggaagattgtggtgacttcaaaagtctagccttggctatgaagttttgggccaacctgggcacctgctctaaagtataaaaccctggggagggaagagaagggaggtggggggaggaggaagaggaagaagggagcactctactgaagaagactcatgatgtacttcactggtaaaatgttttccaatctcacttgatgctctctctctctctctctctctctctctctctctctctctctctctcacacacacacacacacacacacacacacacacacacacacagctttactgagctataactcatgtatactgaactgtccgtctatgaagtatacagtttaaactttggctggtacaagggcccttgaagccattgtcataatcaggacagcaaatgacaccccttacacccacagtttccttgtaccttccaacctcaatgtggttcctggccacacccactcttaacccatcgccacccccgtcagcccctggtgcgttcgttcctgtcactcaggatctgtttgccgtttctccacatttcacattacaggtacttactgtacacgtacctctgctctgtctgcttatgtgcaccttcaagggtttggaaatctgccaatgctgtgtccctcagcagtgccaacgctgtgtccctcagcagtttcctttgcttttccacgagacgagtatgtgtgcagttgcatgttagctatccagagtgtctctctctctctctctctctctctctctctctctctctctctctctctctctctcttaaataaggattgcgatctttttaggatagatgtctttgtgatccaaagaacctgcacacatgaaggggaagagggacaaaaccactcacaggcagccatttgagcctgatcgaaagaggagggcagttaaggacctgtaggtgaggcacaagaataatgatgtctctataagtctctatgacgaggcactggagcaagctcttctccgaggctatacatatagtcccagctgctccaaagttaatatagagtatatgtttgtccttatcactggggcctacaaaaagttttatttctttggagtgtcaaacatgggtcaaagcaagggacagaatctacttctgtcagggaaagctggctggaaaatgcttcccagactcatcttggaaacagcttgcacccgtgttctctctccatgtttgaaccattttattcttaagttgcttgttcagttgctgggtagagtttaagcctggagtgactgagatcttaggcacataggagcgtgtatcagggggtaccccatctgtcttagggtgttactgctgtgagcagaccccatggccaaggcagctcttataaggacaacattgaattggggctggcttacagatccagaggttcagtccattatcatcaaggcaggagcatggcagcatccaggcaggcatggtgcaggaggagctgagagttctacatcttcatctgaaggctgctagcagaatactgacttccaggcagctaggatgagggtcttaaagcccacatccacagtgacatacctactccaacaaggctacaccttctaatagtgccactccctgggctgagcatatacaaaccatcacgctacctaacctaagagtgaaggaggggtcagggaagggtaaccctcatattggttttctttctttcttcctttcttccttccttccttccttccttccttcctttctttctttctttctttctttctttctttctttctttctttttttttttttttggtttttcgagacagggtttttctgtgtagccctggctgtcctggaactcactctgtagaccaggctggcctggaactcagagatccacctgcctctgcctcccaagtgctgggattaaaggcgtgcaccaccactgcccggctcatactggttttctgagatcaccataacaaatacctcaaatcgagatccacaaggagtactcagaaacagcatttcaagatttagacactaatgtgatgaagtttccgttcctggggtttgagtgtgttaaatccagatcaaacaagaaggacaaaataacataagaagtagaaattcattgtctcaagttctagagaccagaattctaagttctggatgcaagggagcttggtcccttctgagggctgtgagtgaatctgttctgtgcctggtcaattcccacagccttgatggtcacttctgatgttcttaggcccgtagacgcaccaccctgatacctgtcttcattcacacacggcattttcccatgtgtctgtttcataacgctccccttttaggaaggcatcaatgatcttaaattaggggccaaccctaatgagtgcagtttgactttatttaaaaaaaaaaatcctatttccaaataaggtcgtattctgaagatcaggacattactatatgaatgcttgcctcgccctttaacccgtagcaatacctaaagtataagtaagataggttgggatcagccttaagaaggtgagtatagtaagcagaagagtgccgtgtgcaaaggtcccaaggtcaaagaacatacatcagggtgtgtgtgtgtgtgtgtgtgtgtgtgtgtgtgtttgtgtgtgtgtgtgtgtgtgtgtgtgtgtatgtgtgtgtgtgtatgtgtgtgtgtatacgtgtgtgtgtatgtgtgtatgtgtgtgtgtgtatgtgtgtgtgtatgtgtgtgtatgtgtgtgtatgtgcgtatatgtgtgtgtatgtgtgtgtgtatgtgtgtgtgtatgtgtgtgtgtatgtgtgtgtgtatgtgtgtgtgtatgtgtgtgtatatgtgtgtgtgtgtatgtgtgtgtgtgtatgtgtgtgtatgtgtgtgtgtatgtgtgtgtatgtatgtatatgtgtgtgtgtgtgtatgtgtgtgtgtatgtgtgtgtatatgtgtgtgtgtatgtgtgtgtatgtgtgtgtgtgtgtgtgtgtgtgtgttctccattcctccagcaaagaacctagctggcaggatttgaggttactttctcaaatgggcaaatcaagtaggggatttttaaattattttttttaatgtcggtaaatgatctaacacagggcacccagatccacacgaggtactcagaaacaacattacgagatttagacactaatgtgatgaagtttctgttcctcgggtttgaatgcgttaaatccagatcaaacaagaaggacaaaataaccctggtacaatggagcaatacttaaacatataaattgtttcattccttagagagattcgtttaaatatagtcacttaaaagtttggtgtttatgtcataggttatgaaattatatcacaacctatgtcctggttgatgcgagctgtctgaaaattagatattttttccagacataaaaattaaacaaaacttaagttttcatcaattgccgtttccgctgaaggaactgggaagccagtgccatcttgtgcaagaaatcaaatcccggcatggatgtgagccagatgtccttcaaccccatgaactggcaccaaatgtgtttatcaagttcaagtgcgatgagcgtgtggaccattgagagaagtaaccaggagcaccatttcaggataaggtaggggcctttgctgctccataaccgtatggggatcttcactggtgttcgcagccatcgtcaagccactgttgatgagtttagtggcctcgtgagatatctacacacagccacacacacacacacacacacacacacacacacacgtacagcctaccataagtcataacagcttcctgaatttgaactgagcttggggggtttgcttacctgtcaacttccctttgactcccccaagtcctctgagagcttgttccaacacgtttaattctgcaaaattttgatttgctcaaattgatgtttctaagtgtgaccactacataaaaaggggacccagtgaccctttcgctcttcgtttctttgctgctctagtgaagtccattaaaccaagaatctgttagatatgggaagcaaacagcacagcatacagtcagccatgtttacccaagccagccgttcccagggagcagaaccatgggagtttcccatttaaaagagaaacgtgtcaaagggaagatctggaacaaatagtgatggttgataatggatgtctgtagcaaagactgtagcaaagtcccaaagtgccactgacgaccaagagatgttggaaagacatactcttgaaatgcaacttttgaaaacccaccttaggcaacatgtgaagccagaaagaaaggaaaaggcgggggagaggggggaagggtgcaacctgttcaaaccagaagcatctaagtgttctgactagcacgttttttttccttcaagatcatttttcataagcacccaggggtagacagctcggtctccagtccctttgcacaacactgtctcttaacagagtgggtgatgcctctaccaggtctacatcaggataggcacctgctttatcacacccaccctttctccctttgagttctttgaaagttccactgcaacattgttgctgaatgtttctgaacattgttggtgtgactgttccatagacaaagcgagagacccgagagaggactttcaggacttagatgcacttagccgtacctccaggctgcgtaccctgcttatgagaccattctccgaaactgccttccctttcatagaacacaagctctgattcaatgccacagattctccaaactcacaattcttatatttttttaaacatactttttattgactctttgggaacttcaccttgtgtattctactcccagaccttccatatccaccctccattcatgtaggcccgccctgcccaagtaaataaaataatacagattagtaaggagataaaccatctctacggagtgcagcactctgcttatgtcactctgcacctctgtctgtcccacgagtggcattggaagttgcggtatgccttgcactacacccttctgccaaaacagcccaaacagctttacttgagaatatccgttgcaatgagtcattaggctacttcaaggtctctggcttcttgctacaccatcaacctcatagaggctctcagatatgctgctgtttccctgagtggtggcgagccaagactggtcccagatggcagttttcccttggtggggtggggctaactcccctgagcccatgtgaccagttggcgccaacatgtggtggctggtggggggcagagccatctcagtgagacatcaatatggctttgggctgcattcacaaacccaggacatcctcagaccctttagtgactgtacgtatggaccactgacatcaacatagaccccggctgcaaccagaccacaaacctagactcggctctcagtgacatcaggcaccaaggacatcaccacagtctcagggctgtcatgtcaggctgttcccactgccatcatgtcttcggtttcatctctcttcgtagcacacaaaccgcttagcttcttttcctcttctatctctccatcacctacttgctcgcttctaggttggaagctgcccaaggtatctcagcgtttgtgcctcgcctgcccacaaacccacctttataacctagataaatgataaacttgaaggtgggtttttgtcagactatatatgtggggtttttttttcccttcagctcacaatttttttaaaaaaattttgattgtgttgccaacattcaaaatttgagatgtttctcacaaatatccagataatattttagaaccaaaaggtcttgcatgtcagcaactctcttggctggaactgagtgttacctgtcaccattacaagaggaagacacacttctgctggttacagcctgccccagctccccacagcatttacagtttccacttcacacattaactttgggtcttctcaagatttcccatgcccttaattctccactacacatgagttgtcactttacggcatgtatttcaaaagctgttgctgggcccttatcttcttgtgtgtgtgtgtgagtgtgtgtgtgtgtgtgtgtgtgtgtgtgtgtgtgtgtgtgtgatggcagagcacctcctctccatctcccactgatacacagaccctccacctatttgatgggatctctgttaccccatttgttctgatgtgtcctttctctacaggtctgtcaagctacccctagaagacgcgaccttcctaaacgagcccgacatgcttttccccaccactctgccaaaggatctcatttatgggcccatattgccactgtcggccattgccgggctggtaggcgaagaggcagagactttcagggtaattatcttgcttgctccaaggcaagtgtcttggaagtgggatctcatttgattataagacatctgggaatggaggaccattctgctctttactgtgtcgcctgagaagcaaagaccctcacatacaggggtctggatacttggggagattgtggcaggtacctggtacccacatgcctgggtctggacacttaggaagatggtgtcaggcaggtgtgatcctgattttggacagactgatgcggagggactcggaagcaagagatgcagtgtgagagctggcaagtagatccccttccccctacaggagcgaagaggcagcgatggagatatagatgttaatgcggttctcaggggtagcacctgggagcaaaggggaggggctggtgcataagcagacagcgtctgagggaggaggacaggggtggggcagaagcacactgagaacagtaggaggggaaagagcagtcggcaagaagcccccatctctgtctgagcacaagcaaatgcaggggagtggaacgtggtggagggatttttgaaatgacagaatttgccaacagcctcacactggtttcccccaccactgctgcttgatgctctcttctttctacacatttacatcaagctccttccaggtagctgatgccctctggtgaccaagcaggaatgttcctgtcagaggaaacaggctaacaataaagcaaagaaagacattaactcggagtgggggtggggtagcctctttcttgagacttgaagcacaaggagccattcctggtagaagaagagaaggaggaggaggaggnnnnnnnnnnnnnnnnnnnnnnnnnnnnnnnnnnnnnnnnnnnnnnnnnnnnnnnnnnnnnnnnnnnnnnnnnnnnnnnnnnnnnnnnnnnnnnnnnnnnnnnnnnnnnnnnnnnnnnnnnnnnnnnnnnnnnnnnnnnnnnnnnnnnnnnnnnnnnnnnnnnnnnnnnnnnnnnnnnnnnnnnnnnnnnnnnnnnnnnnnnnnnngaagaagggggaggggcagggtatatttcaagtgcagggaacagcatgcccagaggccccgcccgggtgagataccttggcatgtttgagggacggagaacagagctgtgtggttggagtggtaaatgcaaatacagaatggtggtcaggagggaaatggagagaggaagtcacagggcagggcattcgggacgaatgaagaccaagaccagaagtcctctggaccaccgggacctgttatgatgatgtcttgtggaaccaagctgcggacaaaggtggtgggcaagtgcccaagtgaaacagcactgtagaaaatgaagctatctcactgtgaatatgcgtaaagtgacacaccgtaaaagactagagggtcataaaatgtctgtggagaacaagagaaaagatccgtgttcacagtacgtcctctaatgaaccacagtaattcacttctgtaaataagggaacatgattaattcttgtccagaccaggttctagccatgggaagtgcaccaccccatctcagccacaagggggcagcaaagtaaaaaacaaggcgctcagccagttattnnnnnnnnnnnnnnnnnnnnnnnnnnnnnnnnnnnnnnnnnnnnnnnnnnnnnnnnnnnnnnnnnnnnnnnnnnnnnnnnnnnnnnnnnnnnnnnnnnnnnnnnnnnnnnnnnnnnnnnnnnnnnnnnnnnnnnnnnnnnnnnnnnnnnnnnnnnnnnnnnnnnntcctccctccttccctcccccctccagtaaatctgtaggcgtcctaatagttcacacttcccactcaataatgggtccaacataaaacgtttaaaatccaggcaactgtcttttgcctttggaagatgctatggaatcttttaaacctcacttaaatgcctccatgtcattgtggccatggagttggcacagcggatgaagccctgggtgccgcagtgtgcctccaatgtcagaccagcatgggggttgggtccaatggggagcttcagcttcagtgagagtcccggcctaagcagcaaaggtgaaatggaaaaagacgcctgctctcaacctccagcctctgagagtggacaccgacctgcaccccacacacatacacaggcgcacgcaccgcaccacacacacacacagagaaaggatgcttagacatggagttgctgtgttaaacaaggttcacgaataaactgcatagcttcttcagtgggctctgctctgtgcatctttaccgctttgtaaaagcagaaatgtgatgctgtgaattataactctatgtcatacatccatattacttggggtttagctcagaagtctaatttcccagtcatttgccctttcattttaacacacaaacacacacacacacacacacacacacacacacacactggaaaacagataaagcactgactagtgattgtccaacgaatagaatacaggcagagcttgtctcccaaattcctcgatttcattccttttcttgaatgccatttctttgttttcttgaatttttttgaatttttattccatgtgcaagagtattttgtctgcacgtacatctgtgtgccattagggcatctacatggagacccaaagagggtgtcagatgcccccgcactggagtaacagatgtttgtgagctgccatgtgggtgttgggaattgaactcagctcctctgcaagagcagcctgtgcttttaatcttaactgatgagtgctctctccagcctacagaacctcatttctcgagacctgggtacgaatgtcaaagaaaccaatgatgacttgttctatgtaagagtctctaacattggcaagatggggactcttacaagatcacagtcattaaataatctcattattttttatgtagctaccaccagattggcgcaccgtagacctttaaataggcccaatacacattatgcaagttacttagggtgttagaaaactatccagccgggcagtggtggcacatacctttaatcccagcacttgggaggtggaggcaggagggtttctgagtttgaggctagcctgcagagtgagttccaggacggccagagctacacagagaaatcctgtctcaaaaaaacaaaaaaaacaaaacaaaacaaacaaacaaaaataagaaagagagagagaaaactatccagttttgctctgtgtgtgtgtgtgtgtgtgtgtgtgtgtgtgtgtgtgtgtgtgtgtataaaatcaaaagcagatgttatctgggcagaaactggactcaacataatgaatttaagctcaagggtccagtttctgtgttccgtccactgttctttttcttttagacaagattgcctaaataagaaactctttgatgaactcaaatatttctcagcatgtttgtattgtcctaacctttaatgcagtacaaagctgggatccagttttccatctttgggctcaaggcgatcagaatgtctgacatctgatcccagggacctggaaatggaggctgagttggtaaatgttttgagatccaattacaacacaccccatttcttctaaaactaaaaatagaaaatcaagacatctgctcattcaacccagatccccccacatctattttgttgttgttgttgtttgtttgtttttcaagacagggtttctctgtgtagccctggctgtcctggaactcactctgtagaccaggctggcctcgaactcagaaatccgcctgcctctgcctcccaagggctgggattaaaggcgtgtgccaccacatctggctacccacatctattcttaaataacaccaagtgcattattaaaaacaagaatatggaatcaatcctacaaaaaatgaagaagaaaaactccaattgtagtttaactttctacagccaagcgctttccaggtctgagtcctccgcttccacttcacacatagactcactggtattggggaccaggctggtggcatttgttggcgtttgttttgcacagttttagggttagtttttgtttgtttgcttgcttgcttgcttgcttggattttttcaaactgggtgtaatacaagcatcgggtagacagaggcaggtggatcaaaagttccagggtaacctgggctacacagtgagatcctatctctaaataaataaatatgttaggtacacttagctgtgacaaagagtctttttgtaatgtatagtctgtcagatgccaccagaaccacactagaaggtttagatattgtacttcagtgagtgtctctttgcctgggcagatcccgcagaaaagccattcattggtgaccatctaatccctctggttggttagtggtaccattgtttttaatttggagtggattggtgagtagtgactattgaggtttttttttttcctaattgtccaatctatgaagacataaaataggttagccacaccgttaaagtcacctccccctttgaaatagcatcatattgcatatcgcaacttcttcttctgaccactgcgctgatcacatttcaaggtccacctgaacatctaacctctcttttcactctcctcccatggctttatcatcacggctcctgtaacccacatgcctgtcccagccatcacctctctgcttcctgattctgccacccccctgattcctctctacgtgactgccccactgaggagaaagcagactggccacactggctgccgtagaaccggtagctaacacaggtttcttggaatgggcaagatcagcaacttatgtcagctgagagcctggtagggatcgttcataaatttaaaagagcagtgtgttgtctcttgtcagacagttgagcgtttattgggagggtggctggcacaccacaagccatttacaacagaagatcgctgggcatgtggttggcagtccttcccagcagctgcgccggctcccacctcacttctcttcaacatgcttcttagcacatgacatcctccatattcaacgttgcaacttactatctaactctcactctctttccccctcattggtaggaaaactccgtaagggaaggggcttttctgccactcacctccacatgtggatattcagaacactgtctggaaagggcccaatactcacggaaactcagtgaatgagtgcccaagtaaaagcagggcacagacacagatttttttccctttgttttttttggagacagggtttcctctgtgtagtgctggctgccctagaactcactctgtagaccaggctggcctcgaactcagaaatccacctgcctctgcctcccaagtgctgggattaaaggcgtgcgccaccacccagcaacataaacataaaactctctagacatgctaggaaagtggcccctagtttgttaacaaagtttatgtccctgggtgccagaaggaaacaaggtccaattcttaatcatgtagaactacaagaagcacaacaatacacaaatagtcacacacacatgtgcgcacatacacaaacatgcacacacacacatgtgcatatccacacatgtatgtgcacttctgtatacatgtgtgcgcatacacacatcagcatatacaagcacatacatatatgtacttgcaggtacgcacacatgtgcactcattagcacgcgcactctagtacatttcagtagttacttagaaggagtgggattggaggtagaatgcttgtttagcatgcaatagcttcctgcactgcaaaaggaaggaaaaagaaagagggggaacatgggggagaggggaaaagggagggggaaaggaggagagagtgggggggggggaagagagagaatattctagtatcctgaattcaaaatcgagcactgcaggcaacatttctgacatatttgtcaaggccaccttgagcttcagggaggagagtgtgtggtctgttcaagacttcctaggaagaggctctagggtttggtgctgtgctgacaaaggacagcctctccttgctcaacacaagtgctaaaggccctgggagaagactcaatatcaccatctaagacaagcctgaacaaattatggtccctttttgtggcccaaatctaagaatggtttttacactttcaagggtcatgcaaaagaaaacaaggagtatactcaacccacgtggcccacagaacctgagagacacccccattccaccccacccccacctccacccccacctccacctccacctccacccccacctttaagcttttgtggaaaaaaacttgctttaaactcgatccaaactggttttggagcccaaagtcaacttatgcttacgttatgattcctcgatggactcgaaggcacatggaatgatcacggaccaaatgagaggggccgcagcatcaggctaaaggtcatctctttgcctttgaaagccaactgagcagaggcccccaagctaacctttgcaagtgacccttgcaagaccagaagacaatttaacgacaatgctaacgacaatcttttctgaaagggggttttttgtgaccaattaaggactctaggtgccaaaagtgggcactaagaaatagttaacagagtactaatcaattgtattagcaggagagccttggttgttcacagtgagtaaagtatagagagcaaggggggaagagataggactctgatgttgaaaatgaaaaatcgatgcattccccccactcccacccccacccccactccccggcagctcgctctggttggtttctttgtgacggttcttttggtgggtgtttctgtggcccttaaccatgattgtcgtcctaacacatggatgctcttccctcccaaagccgaaagatgacatatatcctctgcttcacccaactatgcactgctggactccgtcaagcgacctgtacgttgggtgtgaagagggtcatcttctgatgattaacacagaaaccctgaaggtgaccgtgctccagaaggcggaggagtttccacttccgggtaagagactgccctgcctccgagtccggaagcacagttgttgggttagcattgcacatccttcaagatggtggattgggggggggggtccctgattttccccctttcttagagacatcctggggcctccttaagnnnnnnnnnnnnnnnnnnnnnnnnnnnnnnnnnnnncaagtcctgcggatacacttgtggctactcactgcttactaagagttagccggctcctagtgtgaggataccaaaagatacaactctatatattcgtgtcataaaatcctcgggacaccacaaggagatacacctgtagcttcaccacacacgagatttacagggcaccctcgtcttcaagagccagtaaaatgtctcagcaagttagggggcgtgccagcaagcccaccaatcagggcttaatcctcatggggtgttgtcctctgacttcccccgcacatggaccctcccctcccaccacacataacctccaaacaaacaagctcagattcttgtgagctgtggggctgacaccagagtccagggaataaggccttggactcccaagttctgatctccgatccggtaatcttcacccaggttttttttgcaacaaacctgacccgttctttcttatttttttaaaagatttattttatgagtacactataactgtcttcggatacaccagaagagggcatcggattccattacaggtggttgtgagccaccatgtggttgctgggaattgaactcaagaactctggaggagcagacagtgctcttaaccactgagccatctctccagtctcagacctgaccctttctgacatgaatctacatccaatccaaagcaagcagctggctaccttcaaattgctcatgcttagcacccaactcagggtctcttctgtctcgaggtcccgcctcctgcctctgacatcatttcccatcagccccagagtgagtctgctaagaagtgtttctacctggtcgttcagggatctgcctcctggctcattcccttgcctctctcctctccatctcacccagggtctggctcacacgtcactccctcttgcaaattttcacaacttcagtatctttcacgaagtccctctcccaatcacagactctcacatccttgacaaagctttgccccacagccctccatgttgtggctgggcctccagccctccagcccagttcctctctgtagagtatctacagcgctgttacctggacgctttctaagagcaaaccttttagagatcttcaaaacaggtataagcagtccctcttccaggcctagattcttaagactccagtagtaactgtgttgtagtggggaccgctggacagtaacaaggaaaggacacatttcccagccgccaacatcagatacattctgcgcagcagacaaacattttggcgggtgccatcagagcccatgcagttgccgtatttccctacacaaactggtagcatggatctcctccccaaagaccaatatcttaataataacaaatgttcttgcagaattttttccctactgataaaaatttatgagccatttgatgtagattatatacatttgataaaaatttatgagccatttgataaaaatttatgagccatttgatgtagattatatacatttataaagtgtatatccatcttcagtacacagcccagcggtggtacggctttgatggtgcaggtctgtggcaccagccttttccagtctctgatggggcatttctgcataggcgtgtaacatgaggccgccggtgcagctcgtctcccttttatatactcatccccgggtgcagctcctgctgagccgtgctgctcttttgattacatcacctactttctcttgtttgttctttccccaaagatggagccccgctcatcaacccactcacgctggtgtaccaaaaggacggcatactcgcttctggaattgtaatgtattctacttcttagaatccctcacttcataaaaaaaaaaaaaaagcacacacactctctctgctgccacttacatatatgagccatattttgtcatgtctggttctttttcagactagcaattaaaatttaagtttccctgttgaaagccatgataaaaagtttactcgggaaactttccattacgtgcacacacaaaaaagttaggcaatgaccgagcatgtcgtgttgttgcaaatgaacaaaagtggcctttagaagcttgctgctgtccctcctacccagggaattacacgcagggatctgcagcccagcccagtgtccatttctacgatctgaattagcttgtcagaaatgcgcttgggtcttttgtctgttagagctgataatgacgcccagtattattcatctccatttacttgagcagttggggtcagccacaggttgtaccgggcaccatgcaaagtgtattattaaccctcacaactttgtcaggtagaaacctcgtgacagtcaccggagggtgaacccggggcctcacaccccggggtactatgcttttaccctcgagaatacatttccaggaagttttaaatgggggcagaccacgtgtctccaatgggggcagaccacgtgtctcctcgcggttgcgattggtgccgtcaaggtcaagattacatcgatatctcaagtctaggtgaagctgtccctcccgagtccgctgtcagctttgtctgtcagtctcagtgccaggggtctctctgaggccagggaggcagcgacatcgggatgaaagatttcatcattaggatgaacaaggcagaagccaccgtgagcctctgagctaaccctccacttgtattttccttcctggagttgtcgagagaaaagcccctcccacgtcctccgtttagtctgcatttgtgacctttaagattcttagctgtgttggtgagggatggagaatgatcaccagctttgagaaagcaccttgccgtatgaagtcgcatctctcaaatgcctggcttagctccagtggggttccaattagcacatgatggccaccccaccccacctctgcctcttaactattgtagaaataagtcacattcctcttgagactcgttcgattaggttatttatcagcatccagttggccagcccatttttattgaacacctgccatgttctagcaccgtatcgggggctggaaaggagaacatggcgtaaataaaaagcacgactctactttggtgtcacatgggtggttaaaaaacgaacatagtaggactaatgcccttttatttttttaaatattatttatctaatgtatatttgtacaatgtagctgtcttcagattcatcaaaagagggcatcagatttcattacagatggctgtgagccaccatgtggctactgggaattgaactcaggacctctggaagagtagtcagcgctcttaaccgttgagccacctctccagcctactaatgcacttttaaacgaggacagttaacactcaagccctataaactctgcctcctttgtcctgctttctgcataatgaaatacatggttaaaagtagtctgagttaaaggtaactgcattctggatgtaacccgagatggcgctctcacacaggggcaggcagacttggctgaagtcaagcgtggtctataccgactctggtctgtctcgctgtgtctgcaggatggtgtgatatactccttcatcatcaaggattcaaagtaccaagtgaagacctttctcgagtttgatgggccggtgacacatctggtgttctcccccagttacaaaatgttactgattcaaacagacaaggtacattagtgatttctggatgcccaatctttaggcaccgtcagtgcatgatgggaaaaaagaaaggggcgtgtgtgggcaaggattctcctcacatcagcactctctctgctgcacatgggaagcaccttgaacaaaggctcaaattaaaagtagaggcttggctatgtatacacaccaacagaggagagcgtgagttcaaatccagggtcctctatgccccacccccccgggggggttcgccttccatgtctcttggctctgtttcccctttgctgcctctatttccttgcaatttttccttctggtatttacagccttctgctactcttgcttatatttctgtcctattggtaactttggaagaaagtcaccaactgtaaaataaaagcgttctgaaatagatgtggtgggttgttgcgggaaatatctagagctagcctctgcaccagatgatttagactctcggcccaataactcgccacatggcttccacgaggccatctttcagatgtccccccccccccccccagtnnnnnnnnnnnnnnnnnnnnnnnnnnnnnnnnnnnnnnnnnnnnnnnnnnnnnnnnnnnnnnnnnnnnnnnnnnnnnnnnnnnnnnnnnnnnnnnnnnnnnnnnnnnnnnnnnnnnnnnnnnnnnnnnnnnnnnnnnnnnnnnnnnnnnnnnnnnnnnnnnnnnnnnnnnnnnnnnnnnnnnnnnnnnnnnnnnnnnnnnnnnnnnnnnnnnnnnnnnnnnnnnnnnnnnnnnnnnnnnnnnnnnnnnnnnnnnnnnnnnnnnnnnnnnnnnnnnnnnnnnnnnnnnnnnnnnnnnnnnnnnnnnnnnnnnnnnnnnnnnnnnnnnnnnnnnnnnnnnnnnnnnnnnnnnnnnnnnnnnnnnnnnnnnnnnnnnnnnnnnnnnnnnnnnnnnnnnnnnnnnnnnnnnnnnnnnnnnnnnnnnnnnnnnnnnnnnnnnnnnnnnnnnnnnnnnnnnnnnnnnnnnnnnnnnnnnnnnnnnnnnnnnnnnnnnnnnnnnnnnnnnnnnnnnnnnnnnnnnnnnnnnnnnnnnnnnnnnnnnnnnnnnnnnnnnnnnnnnnnnnnnnnnnnnnnnnnnnnnnnnnnnnnnnnnnnnnnnnnnnnnnnnnnnnnnnnnnnnnnnnnnnnnnnnnnnnnnnnnnnnnnnnnnnnnnnnnnnnnnnnnnnnnnnnnnnnnnnnnnnnnnnnnnnnnnnnnnnnnnnnnnnnnnnnnnnnnnnnnnnnnnnnnnnnnnnnnnnnnnnnnnnnnnnnnnnnnnnnnnnnnnnnnnnnnnnnnnnnnnnnnnnnnnnnnnnnnnnnnnnnnnnnnnnnnnnnnnnnnnnnnnnnnnnnnnnnnnnnnnnnnnnnnnnnnnnnnnnnnnnnnnnnnnnnnnnnnnnnnnnnnnnnnnnnnnnnnnnnnnnnnnnnnnnnnnnnnnnnnnnnnnnnnnnnnnnnnnnnnnnnnnnnnnnnnnnnnnnnnnnnnnnnnnnnnnnnnnnnnnnnnnnnnnnnnnnnnnnnnnnnnnnnnnnnnnnnnnnnnnnnnnnnnnnnnnnnnnnnnnnnnnnnnnnnnnnnnnnnnnnnnnnnnnnnnnnnnnnnnnnnnnnnnnnnnnnnnnnnnnnnnnnnnnnnnnnnnnnnnnnnnnnnnnnnnnnnnnnnnnnnnnnnnnnnnnnnnnnnnnnnnnnnnnnnnnnnnnnnnnnnnnnnnnnnnnnnnnnnnnnnnnnnnnnnnnnnnnnnnnnnnnnnnnnnnnnnnnnnnnnnnnnnnnnnnnnnnnnnnnnnnnnnnnnnnnnnnnnnnnnnnnnnnnnnnnnnnnnnnnnnnnnnnnnnnnnnnnnnnnnnnnnnnnnnnnnnnnnnnnnnnnnnnnnnnnnnnnnnnnnnnnnnnnnnnnnnnnnnnnnnnnnnnnnnnnnnnnnnnnnnnnnnnnnnnnnnnnnnnnnnnnnnnnnnnnnnnnnnnnnnnnnnnnnnnnnnnnnnnnnnnnnnnnnnnnnnnnnnnnnnnnnnnnnnnnnnnnnnnnnnnnnnnnnnnnnnnnnnnnnnnnnnnnnnnnnnnnnnnnnnnnnnnnnnnnnnnnnnnnnnnnnnnnnnnnnnnnnnnnnnnnnnnnnnnnnnnnnnnnnnnnnnnnnnnnnnnnnnnnnnnnnnnnnnnnnnnnnnnnnnnnnnnnnnnnnnnnnnnnnnnnnnnnnnnnnnnnnnnnnnnnnnnnnnnnnnnnnnnnnnnnnnnnnnnnnnnnnnnnnnnnnnnnnnnnnnnnnnnnnnnnnnnnnnnnnnnnnnnnnnnnnnnnnnnnnnnnnnnnnnnnnnnnnnnnnnnnnnnnnnnnnnnnnnnnnnnnnnnnnnnnnnnnnnnnnnnnnnnnnnnnnnnnnnnnnnnnnnnnnnnnnnnnnnnnnnnnnnnnnnnnnnnnnnnnnnnnnnnnnnnnnnnnnnnnnnnnnnnnnnnnnnnnnnnnnnnnnnnnnnnnnnnnnnnnnnnnnnnnnnnnnnnnnnnnnnnnnnnnnnnnnnnnnnnnnnnnnnnnnnnnnnnnnnnnnnnnnnnnnnnnnnnnnnnnnnnnnnnnnnnnnnnnnnnnnnnnnnnnnnnnnnnnnnnnnnnnnnnnnnnnnnnnnnnnnnnnnnnnnnnnnnnnnnnnnnnnnnnnnnnnnnnnnnnnnnnnnnnnnnnnnnnnnnnnnnnnnnnnnnnnnnnnnnnnnnnnnnnnnnnnnnnnnnnnnnnnnnnnnnnnnnnnnnnnnnnnnnnnnnnnnnnnnnnnnnnnnnnnnnnnnnnnnnnnnnnnnnnnnnnnnnnnnnnnnnnnnnnnnnnnnnnnnnnnnnnnnnnnnnnnnnnnnnnnnnnnnnnnnnnnnnnnnnnnnnnnnnnnnnnnnnnnnnnnnnnnnnnnnnnnnnnnnnnnnnnnnnnnnnnnnnnnnnnnnnnnnnnnnnnnnnnnnnnnnnnnnnnnnnnnnnnnnnnnnnnnnnnnnnnnnnnnnnnnnnnnnnnnnnnnnnnnnnnnnnnnnnnnnnnnnnnnnnnnnnnnnnnnnnnnnnnnnnnnnnnnnnnnnnnnnnnnnnnnnnnnnnnnnnnnnnnnnnnnnnnnnnnnnnnnnnnnnnnnnnnnnnnnnnnnnnnnnnnnnnnnnnnnnnnnnnnnnnnnnnnnnnnnnnnnnnnnnnnnnnnnnnnnnnnnnnnnnnnnnnnnnnnnnnnnnnnnnnnnnnnnnnnnnnnnnnnnnnnnnnnnnnnnnnnnnnnnnnnnnnnnnnnnnnnnnnnnnnnnnnnnnnnnnnnnnnnnnnnnnnnnnnnnnnnnnnnnnnnnnnnnnnnnnnnnnnnnnnnnnnnnnnnnnnnnnnnnnnnnnnnnnnnnnnnnnnnnnnnnnnnnnnnnnnnnnnnnnnnnnnnnnnnnnnnnnnnnnnnnnnnnnnnnnnnnnnnnnnnnnnnnnnnnnnnnnnnnnnnnnnnnnnnnnnnnnnnnnnnnnnnnnnnnnnnnnnnnnnnnnnnnnnnnnnnnnnnnnnnnnnnnnnnnnnnnnnnnnnnnnnnnnnnnnnnnnnnnnnnnnnnnnnnnnnnnnnnnnnnnnnnnnnnnnnnnnnnnnnnnnnnnnnnnnnnnnnnnnnnnnnnnnnnnnnnnnnnnnnnnnnnnnnnnnnnnnnnnnnnnnnnnnnnnnnnnnnnnnnnnnnnnnnnnnnnnnnnnnnnnnnnnnnnnnnnnnnnnnnnnnnnnnnnnnnnnnnnnnnnnnnnnnnnnnnnnnnnnnnnnnnnnnnnnnnnnnnnnnnnnnnnnnnnnnnnnnnnnnnnnnnnnnnnnnnnnnnnnnnnnnnnnnnnnnnnnnnnnnnnnnnnnnnnnnnnnnnnnnnnnnnnnnnnnnnnnnnnnnnnnnnnnnnnnnnnnnnnnnnnnnnnnnnnnnnnnnnnnnnnnnnnnnnnnnnnnnnnnnnnnnnnnnnnnnnnnnnnnnnnnnnnnnnnnnnnnnnnnnnnnnnnnnnnnnnnnnnnnnnnnnnnnnnnnnnnnnnnnnnnnnnnnnnnnnnnnnnnnnnnnnnnnnnnnnnnnnnnnnnnnnnnnnnnnnnnnnnnnnnnnnnnnnnnnnnnnnnnnnnnnnnnnnnnnnnnnnnnnnnnnnnnnnnnnnnnnnnnnnnnnnnnnnnnnnnnnnnnnnnnnnnnnnnnnnnnnnnnnnnnnnnnnnnnnnnnnnnnnnnnnnnnnnnnnnnnnnnnnnnnnnnnnnnnnnnnnnnnnnnnnnnnnnnnnnnnnnnnnnnnnnnnnnnnnnnnnnnnnnnnnnnnnnnnnnnnnnnnnnnnnnnnnnnnnnnnnnnnnnnnnnnnnnnnnnnnnnnnnnnnnnnnnnnnnnnnnnnnnnnnnnnnnnnnnnnnnnnnnnnnnnnnnnnnnnnnnnnnnnnnnnnnnnnnnnnnnnnnnnnnnnnnnnnnnnnnnnnnnnnnnnnnnnnnnnnnnnnnnnnnnnnnnnnnnnnnnnnnnnnnnnnnnnnnnnnnnnnnnnnnnnnnnnnnnnnnnnnnnnnnnnnnnnnnnnnnnnnnnnnnnnnnnnnnnnnnnnnnnnnnnnnnnnnnnnnnnnnnnnnnnnnnnnnnnnnnnnnnnnnnnnnnnnnnnnnnnnnnnnnnnnnnnnnnnnnnnnnnnnnnnnnnnnnnnnnnnnnnnnnnnnnnnnnnnnnnnnnnnnnnnnnnnnnnnnnnnnnnnnnnnnnnnnnnnnnnnnnnnnnnnnnnnnnnnnnnnnnnnnnnnnnnnnnnnnnnnnnnnnnnnnnnnnnnnnnnnnnnnnnnnnnnnnnnnnnnnnnnnnnnnnnnnnnnnnnnnnnnnnnnnnnnnnnnnnnnnnnnnnnnnnnnnnnnnnnnnnnnnnnnnnnnnnnnnnnnnnnnnnnnnnnnnnnnnnnnnnnnnnnnnnnnnnnnnnnnnnnnnnnnnnnnnnnnnnnnnnnnnnnnnnnnnnnnnnnnnnnnnnnnnnnnnnnnnnnnnnnnnnnnnnnnnnnnnnnnnnnnnnnnnnnnnnnnnnnnnnnnnnnnnnnnnnnnnnnnnnnnnnnnnnnnnnnnnnnnnnnnnnnnnnnnnnnnnnnnnnnnnnnnnnnnnnnnnnnnnnnnnnnnnnnnnnnnnnnnnnnnnnnnnnnnnnnnnnnnnnnnnnnnnnnnnnnnnnnnnnnnnnnnnnnnnnnnnnnnnnnnnnnnnnnnnnnnnnnnnnnnnnnnnnnnnnnnnnnnnnnnnnnnnnnnnnnnnnnnnnnnnnnnnnnnnnnnnnnnnnnnnnnnnnnnnnnnnnnnnnnnnnnnnnnnnnnnnnnnnnnnnnnnnnnnnnnnnnnnnnnnnnnnnnnnnnnnnnnnnnnnnnnnnnnnnnnnnnnnnnnnnnnnnnnnnnnnnnnnnnnnnnnnnnnnnnnnnnnnnnnnnnnnnnnnnnnnnnnnnnnnnnnnnnnnnnnnnnnnnnnnnnnnnnnnnnnnnnnnnnnnnnnnnnnnnnnnnnnnnnnnnnnnnnnnnnnnnnnnnnnnnnnnnnnnnnnnnnnnnnnnnnnnnnnnnnnnnnnnnnnnnnnnnnnnnnnnnnnnnnnnnnnnnnnnnnnnnnnnnnnnnnnnnnnnnnnnnnnnnnnnnnnnnnnnnnnnnnnnnnnnnnnnnnnnnnnnnnnnnnnnnnnnnnnnnnnnnnnnnnnnnnnnnnnnnnnnnnnnnnnnnnnnnnnnnnnnnnnnnnnnnnnnnnnnnnnnnnnnnnnnnnnnnnnnnnnnnnnnnnnnnnnnnnnnnnnnnnnnnnnnnnnnnnnnnnnnnnnnnnnnnnnnnnnnnnnnnnnnnnnnnnnnnnnnnnnnnnnnnnnnnnnnnnnnnnnnnnnnnnnnnnnnnnnnnnnnnnnnnnnnnnnnnnnnnnnnnnnnnnnnnnnnnnnnnnnnnnnnnnnnnnnnnnnnnnnnnnnnnnnnnnnnnnnnnnnnnnnnnnnnnnnnnnnnnnnnnnnnnnnnnnnnnnnnnnnnnnnnnnnnnnnnnnnnnnnnnnnnnnnnnnnnnnnnnnnnnnnnnnnnnnnnnnnnnnnnnnnnnnnnnnnnnnnnnnnnnnnnnnnnnnnnnnnnnnnnnnnnnnnnnnnnnnnnnnnnnnnnnnnnnnnnnnnnnnnnnnnnnnnnnnnnnnnnnnnnnnnnnnnnnnnnnnnnnnnnnnnnnnnnnnnnnnnnnnnnnnnnnnnnnnnnnnnnnnnnnnnnnnnnnnnnnnnnnnnnnnnnnnnnnnnnnnnnnnnnnnnnnnnnnnnnnnnnnnnnnnnnnnnnnnnnnnnnnnnnnnnnnnnnnnnnnnnnnnnnnnnnnnnnnnnnnnnnnnnnnnnnnnnnnnnnnnnnnnnnnnnnnnnnnnnnnnnnnnnnnnnnnnnnnnnnnnnnnnnnnnnnnnnnnnnnnnnnnnnnnnnnnnnnnnnnnnnnnnnnnnnnnnnnnnnnnnnnnnnnnnnnnnnnnnnnnnnnnnnnnnnnnnnnnnnnnnnnnnnnnnnnnnnnnnnnnnnnnnnnnnnnnnnnnnnnnnnnnnnnnnnnnnnnnnnnnnnnnnnnnnnnnnnnnnnnnnnnnnnnnnnnnnnnnnnnnnnnnnnnnnnnnnnnnnnnnnnnnnnnnnnnnnnnnnnnnnnnnnnnnnnnnnnnnnnnnnnnnnnnnnnnnnnnnnnnnnnnnnnnnnnnnnnnnnnnnnnnnnnnnnnnnnnnnnnnnnnnnnnnnnnnnnnnnnnnnnnnnnnnnnnnnnnnnnnnnnnnnnnnnnnnnnnnnnnnnnnnnnnnnnnnnnnnnnnnnnnnnnnnnnnnnnnnnnnnnnnnnnnnnnnnnnnnnnnnnnnnnnnnnnnnnnnnnnnnnnnnnnnnnnnnnnnnnnnnnnnnnnnnnnnnnnnnnnnnnnnnnnnnnnnnnnnnnnnnnnnnnnnnnnnnnnnnnnnnnnnnnnnnnnnnnnnnnnnnnnnnnnnnnnnnnnnnnnnnnnnnnnnnnnnnnnnnnnnnnnnnnnnnnnnnnnnnnnnnnnnnnnnnnnnnnnnnnnnnnnnnnnnnnnnnnnnnnnnnnnnnnnnnnnnnnnnnnnnnnnnnnnnnnnnnnnnnnnnnnnnnnnnnnnnnnnnnnnnnnnnnnnnnnnnnnnnnnnnnnnnnnnnnnnnnnnnnnnnnnnnnnnnnnnnnnnnnnnnnnnnnnnnnnnnnnnnnnnnnnnnnnnnnnnnnnnnnnnnnnnnnnnnnnnnnnnnnnnnnnnnnnnnnnnnnnnnnnnnnnnnnnnnnnnnnnnnnnnnnnnnnnnnnnnnnnnnnnnnnnnnnnnnnnnnnnnnnnnnnnnnnnnnnnnnnnnnnnnnnnnnnnnnnnnnnnnnnnnnnnnnnnnnnnnnnnnnnnnnnnnnnnnnnnnnnnnnnnnnnnnnnnnnnnnnnnnnnnnnnnnnnnnnnnnnnnnnnnnnnnnnnnnnnnnnnnnnnnnnnnnnnnnnnnnnnnnnnnnnnnnnnnnnnnnnnnnnnnnnnnnnnnnnnnnnnnnnnnnnnnnnnnnnnnnnnnnnnnnnnnnnnnnnnnnnnnnnnnnnnnnnnnnnnnnnnnnnnnnnnnnnnnnnnnnnnnnnnnnnnnnnnnnnnnnnnnnnnnnnnnnnnnnnnnnnnnnnnnnnnnnnnnnnnnnnnnnnnnnnnnnnnnnnnnnnnnnnnnnnnnnnnnnnnnnnnnnnnnnnnnnnnnnnnnnnnnnnnnnnnnnnnnnnnnnnnnnnnnnnnnnnnnnnnnnnnnnnnnnnnnnnnnnnnnnnnnnnnnnnnnnnnnnnnnnnnnnnnnnnnnnnnnnnnnnnnnnnnnnnnnnnnnnnnnnnnnnnnnnnnnnnnnnnnnnnnnnnnnnnnnnnnnnnnnnnnnnnnnnnnnnnnnnnnnnnnnnnnnnnnnnnnnnnnnnnnnnnnnnnnnnnnnnnnnnnnnnnnnnnnnnnnnnnnnnnnnnnnnnnnnnnnnnnnnnnnnnnnnnnnnnnnnnnnnnnnnnnnnnnnnnnnnnnnnnnnnnnnnnnnnnnnnnnnnnnnnnnnnnnnnnnnnnnnnnnnnnnnnnnnnnnnnnnnnnnnnnnnnnnnnnnnnnnnnnnnnnnnnnnnnnnnnnnnnnnnnnnnnnnnnnnnnnnnnnnnnnnnnnnnnnnnnnnnnnnnnnnnnnnnnnnnnnnnnnnnnnnnnnnnnnnnnnnnnnnnnnnnnnnnnnnnnnnnnnnnnnnnnnnnnnnnnnnnnnnnnnnnnnnnnnnnnnnnnnnnnnnnnnnnnnnnnnnnnnnnnnnnnnnnnnnnnnnnnnnnnnnnnnnnnnnnnnnnnnnnnnnnnnnnnnnnnnnnnnnnnnnnnnnnnnnnnnnnnnnnnnnnnnnnnnnnnnnnnnnnnnnnnnnnnnnnnnnnnnnnnnnnnnnnnnnnnnnnnnnnnnnnnnnnnnnnnnnnnnnnnnnnnnnnnnnnnnnnnnnnnnnnnnnnnnnnnnnnnnnnnnnnnnnnnnnnnnnnnnnnnnnnnnnnnnnnnnnnnnnnnnnnnnnnnnnnnnnnnnnnnnnnnnnnnnnnnnnnnnnnnnnnnnnnnnnnnnnnnnnnnnnnnnnnnnnnnnnnnnnnnnnnnnnnnnnnnnnnnnnnnnnnnnnnnnnnnnnnnnnnnnnnnnnnnnnnnnnnnnnnnnnnnnnnnnnnnnnnnnnnnnnnnnnnnnnnnnnnnnnnnnnnnnnnnnnnnnnnnnnnnnnnnnnnnnnnnnnnnnnnnnnnnnnnnnnnnnnnnnnnnnnnnnnnnnnnnnnnnnnnnnnnnnnnnnnnnnnnnnnnnnnnnnnnnnnnnnnnnnnnnnnnnnnnnnnnnnnnnnnnnnnnnnnnnnnnnnnnnnnnnnnnnnnnnnnnnnnnnnnnnnnnnnnnnnnnnnnnnnnnnnnnnnnnnnnnnnnnnnnnnnnnnnnnnnnnnnnnnnnnnnnnnnnnnnnnnnnnnnnnnnnnnnnnnnnnnnnnnnnnnnnnnnnnnnnnnnnnnnnnnnnnnnnnnnnnnnnnnnnnnnnnnnnnnnnnnnnnnnnnnnnnnnnnnnnnnnnnnnnnnnnnnnnnnnnnnnnnnnnnnnnnnnnnnnnnnnnnnnnnnnnnnnnnnnnnnnnnnnnnnnnnnnnnnnnnnnnnnnnnnnnnnnnnnnnnnnnnnnnnnnnnnnnnnnnnnnnnnnnnnnnnnnnnnnnnnnnnnnnnnnnnnnnnnnnnnnnnnnnnnnnnnnnnnnnnnnnnnnnnnnnnnnnnnnnnnnnnnnnnnnnnnnnnnnnnnnnnnnnnnnnnnnnnnnnnnnnnnnnnnnnnnnnnnnnnnnnnnnnnnnnnnnnnnnnnnnnnnnnnnnnnnnnnnnnnnnnnnnnnnnnnnnnnnnnnnnnnnnnnnnnnnnnnnnnnnnnnnnnnnnnnnnnnnnnnnnnnnnnnnnnnnnnnnnnnnnnnnnnnnnnnnnnnnnnnnnnnnnnnnnnnnnnnnnnnnnnnnnnnnnnnnnnnnnnnnnnnnnnnnnnnnnnnnnnnnnnnnnnnnnnnnnnnnnnnnnnnnnnnnnnnnnnnnnnnnnnnnnnnnnnnnnnnnnnnnnnnnnnnnnnnnnnnnnnnnnnnnnnnnnnnnnnnnnnnnnnnnnnnnnnnnnnnnnnnnnnnnnnnnnnnnnnnnnnnnnnnnnnnnnnnnnnnnnnnnnnnnnnnnnnnnnnnnnnnnnnnnnnnnnnnnnnnnnnnnnnnnnnnnnnnnnnnnnnnnnnnnnnnnnnnnnnnnnnnnnnnnnnnnnnnnnnnnnnnnnnnnnnnnnnnnnnnnnnnnnnnnnnnnnnnnnnnnnnnnnnnnnnnnnnnnnnnnnnnnnnnnnnnnnnnnnnnnnnnnnnnnnnnnnnnnnnnnnnnnnnnnnnnnnnnnnnnnnnnnnnnnnnnnnnnnnnnnnnnnnnnnnnnnnnnnnnnnnnnnnnnnnnnnnnnnnnnnnnnnnnnnnnnnnnnnnnnnnnnnnnnnnnnnnnnnnnnnnnnnnnnnnnnnnnnnnnnnnnnnnnnnnnnnnnnnnnnnnnnnnnnnnnnnnnnnnnnnnnnnnnnnnnnnnnnnnnnnnnnnnnnnnnnnnnnnnnnnnnnnnnnnnnnnnnnnnnnnnnnnnnnnnnnnnnnnnnnnnnnnnnnnnnnnnnnnnnnnnnnnnnnnnnnnnnnnnnnnnnnnnnnnnnnnnnnnnnnnnnnnnnnnnnnnnnnnnnnnnnnnnnnnnnnnnnnnnnnnnnnnnnnnnnnnnnnnnnnnnnnnnnnnnnnnnnnnnnnnnnnnnnnnnnnnnnnnnnnnnnnnnnnnnnnnnnnnnnnnnnnnnnnnnnnnnnnnnnnnnnnnnnnnnnnnnnnnnnnnnnnnnnnnnnnnnnnnnnnnnnnnnnnnnnnnnnnnnnnnnnnnnnnnnnnnnnnnnnnnnnnnnnnnnnnnnnnnnnnnnnnnnnnnnnnnnnnnnnnnnnnnnnnnnnnnnnnnnnnnnnnnnnnnnnnnnnnnnnnnnnnnnnnnnnnnnnnnnnnnnnnnnnnnnnnnnnnnnnnnnnnnnnnnnnnnnnnnnnnnnnnnnnnnnnnnnnnnnnnnnnnnnnnnnnnnnnnnnnnnnnnnnnnnnnnnnnnnnnnnnnnnnnnnnnnnnnnnnnnnnnnnnnnnnnnnnnnnnnnnnnnnnnnnnnnnnnnnnnnnnnnnnnnnnnnnnnnnnnnnnnnnnnnnnnnnnnnnnnnnnnnnnnnnnnnnnnnnnnnnnnnnnnnnnnnnnnnnnnnnnnnnnnnnnnnnnnnnnnnnnnnnnnnnnnnnnnnnnnnnnnnnnnnnnnnnnnnnnnnnnnnnnnnnnnnnnnnnnnnnnnnnnnnnnnnnnnnnnnnnnnnnnnnnnnnnnnnnnnnnnnnnnnnnnnnnnnnnnnnnnnnnnnnnnnnnnnnnnnnnnnnnnnnnnnnnnnnnnnnnnnnnnnnnnnnnnnnnnnnnnnnnnnnnnnnnnnnnnnnnnnnnnnnnnnnnnnnnnnnnnnnnnnnnnnnnnnnnnnnnnnnnnnnnnnnnnnnnnnnnnnnnnnnnnnnnnnnnnnnnnnnnnnnnnnnnnnnnnnnnnnnnnnnnnnnnnnnnnnnnnnnnnnnnnnnnnnnnnnnnnnnnnnnnnnnnnnnnnnnnnnnnnnnnnnnnnnnnnnnnnnnnnnnnnnnnnnnnnnnnnnnnnnnnnnnnnnnnnnnnnnnnnnnnnnnnnnnnnnnnnnnnnnnnnnnnnnnnnnnnnnnnnnnnnnnnnnnnnnnnnnnnnnnnnnnnnnnnnnnnnnnnnnnnnnnnnnnnnnnnnnnnnnnnnnnnnnnnnnnnnnnnnnnnnnnnnnnnnnnnnnnnnnnnnnnnnnnnnnnnnnnnnnnnnnnnnnnnnnnnnnnnnnnnnnnnnnnnnnnnnnnnnnnnnnnnnnnnnnnnnnnnnnnnnnnnnnnnnnnnnnnnnnnnnnnnnnnnnnnnnnnnnnnnnnnnnnnnnnnnnnnnnnnnnnnnnnnnnnnnnnnnnnnnnnnnnnnnnnnnnnnnnnnnnnnnnnnnnnnnnnnnnnnnnnnnnnnnnnnnnnnnnnnnnnnnnnnnnnnnnnnnnnnnnnnnnnnnnnnnnnnnnnnnnnnnnnnnnnnnnnnnnnnnnnnnnnnnnnnnnnnnnnnnnnnnnnnnnnnnnnnnnnnnnnnnnnnnnnnnnnnnnnnnnnnnnnnnnnnnnnnnnnnnnnnnnnnnnnnnnnnnnnnnnnnnnnnnnnnnnnnnnnnnnnnnnnnnnnnnnnnnnnnnnnnnnnnnnnnnnnnnnnnnnnnnnnnnnnnnnnnnnnnnnnnnnnnnnnnnnnnnnnnnnnnnnnnnnnnnnnnnnnnnnnnnnnnnnnnnnnnnnnnnnnnnnnnnnnnnnnnnnnnnnnnnnnnnnnnnnnnnnnnnnnnnnnnnnnnnnnnnnnnnnnnnnnnnnnnnnnnnnnnnnnnnnnnnnnnnnnnnnnnnnnnnnnnnnnnnnnnnnnnnnnnnnnnnnnnnnnnnnnnnnnnnnnnnnnnnnnnnnnnnnnnnnnnnnnnnnnnnnnnnnnnnnnnnnnnnnnnnnnnnnnnnnnnnnnnnnnnnnnnnnnnnnnnnnnnnnnnnnnnnnnnnnnnnnnnnnnnnnnnnnnnnnnnnnnnnnnnnnnnnnnnnnnnnnnnnnnnnnnnnnnnnnnnnnnnnnnnnnnnnnnnnnnnnnnnnnnnnnnnnnnnnnnnnnnnnnnnnnnnnnnnnnnnnnnnnnnnnnnnnnnnnnnnnnnnnnnnnnnnnnnnnnnnnnnnnnnnnnnnnnnnnnnnnnnnnnnnnnnnnnnnnnnnnnnnnnnnnnnnnnnnnnnnnnnnnnnnnnnnnnnnnnnnnnnnnnnnnnnnnnnnnnnnnnnnnnnnnnnnnnnnnnnnnnnnnnnnnnnnnnnnnnnnnnnnnnnnnnnnnnnnnnnnnnnnnnnnnnnnnnnnnnnnnnnnnnnnnnnnnnnnnnnnnnnnnnnnnnnnnnnnnnnnnnnnnnnnnnnnnnnnnnnnnnnnnnnnnnnnnnnnnnnnnnnnnnnnnnnnnnnnnnnnnnnnnnnnnnnnnnnnnnnnnnnnnnnnnnnnnnnnnnnnnnnnnnnnnnnnnnnnnnnnnnnnnnnnnnnnnnnnnnnnnnnnnnnnnnnnnnnnnnnnnnnnnnnnnnnnnnnnnnnnnnnnnnnnnnnnnnnnnnnnnnnnnnnnnnnnnnnnnnnnnnnnnnnnnnnnnnnnnnnnnnnnnnnnnnnnnnnnnnnnnnnnnnnnnnnnnnnnnnnnnnnnnnnnnnnnnnnnnnnnnnnnnnnnnnnnnnnnnnnnnnnnnnnnnnnnnnnnnnnnnnnnnnnnnnnnnnnnnnnnnnnnnnnnnnnnnnnnnnnnnnnnnnnnnnnnnnnnnnnnnnnnnnnnnnnnnnnnnnnnnnnnnnnnnnnnnnnnnnnnnnnnnnnnnnnnnnnnnnnnnnnnnnnnnnnnnnnnnnnnnnnnnnnnnnnnnnnnnnnnnnnnnnnnnnnnnnnnnnnnnnnnnnnnnnnnnnnnnnnnnnnnnnnnnnnnnnnnnnnnnnnnnnnnnnnnnnnnnnnnnnnnnnnnnnnnnnnnnnnnnnnnnnnnnnnnnnnnnnnnnnnnnnnnnnnnnnnnnnnnnnnnnnnnnnnnnnnnnnnnnnnnnnnnnnnnnnnnnnnnnnnnnnnnnnnnnnnnnnnnnnnnnnnnnnnnnnnnnnnnnnnnnnnnnnnnnnnnnnnnnnnnnnnnnnnnnnnnnnnnnnnnnnnnnnnnnnnnnnnnnnnnnnnnnnnnnnnnnnnnnnnnnnnnnnnnnnnnnnnnnnnnnnnnnnnnnnnnnnnnnnnnnnnnnnnnnnnnnnnnnnnnnnnnnnnnnnnnnnnnnnnnnnnnnnnnnnnnnnnnnnnnnnnnnnnnnnnnnnnnnnnnnnnnnnnnnnnnnnnnnnnnnnnnnnnnnnnnnnnnnnnnnnnnnnnnnnnnnnnnnnnnnnnnnnnnnnnnnnnnnnnnnnnnnnnnnnnnnnnnnnnnnnnnnnnnnnnnnnnnnnnnnnnnnnnnnnnnnnnnnnnnnnnnnnnnnnnnnnnnnnnnnnnnnnnnnnnnnnnnnnnnnnnnnnnnnnnnnnnnnnnnnnnnnnnnnnnnnnnnnnnnnnnnnnnnnnnnnnnnnnnnnnnnnnnnnnnnnnnnnnnnnnnnnnnnnnnnnnnnnnnnnnnnnnnnnnnnnnnnnnnnnnnnnnnnnnnnnnnnnnnnnnnnnnnnnnnnnnnnnnnnnnnnnnnnnnnnnnnnnnnnnnnnnnnnnnnnnnnnnnnnnnnnnnnnnnnnnnnnnnnnnnnnnnnnnnnnnnnnnnnnnnnnnnnnnnnnnnnnnnnnnnnnnnnnnnnnnnnnnnnnnnnnnnnnnnnnnnnnnnnnnnnnnnnnnnnnnnnnnnnnnnnnnnnnnnnnnnnnnnnnnnnnnnnnnnnnnnnnnnnnnnnnnnnnnnnnnnnnnnnnnnnnnnnnnnnnnnnnnnnnnnnnnnnnnnnnnnnnnnnnnnnnnnnnnnnnnnnnnnnnnnnnnnnnnnnnnnnnnnnnnnnnnnnnnnnnnnnnnnnnnnnnnnnnnnnnnnnnnnnnnnnnnnnnnnnnnnnnnnnnnnnnnnnnnnnnnnnnnnnnnnnnnnnnnnnnnnnnnnnnnnnnnnnnnnnnnnnnnnnnnnnnnnnnnnnnnnnnnnnnnnnnnnnnnnnnnnnnnnnnnnnnnnnnnnnnnnnnnnnnnnnnnnnnnnnnnnnnnnnnnnnnnnnnnnnnnnnnnnnnnnnnnnnnnnnnnnnnnnnnnnnnnnnnnnnnnnnnnnnnnnnnnnnnnnnnnnnnnnnnnnnnnnnnnnnnnnnnnnnnnnnnnnnnnnnnnnnnnnnnnnnnnnnnnnnnnnnnnnnnnnnnnnnnnnnnnnnnnnnnnnnnnnnnnnnnnnnnnnnnnnnnnnnnnnnnnnnnnnnnnnnnnnnnnnnnnnnnnnnnnnnnnnnnnnnnnnnnnnnnnnnnnnnnnnnnnnnnnnnnnnnnnnnnnnnnnnnnnnnnnnnnnnnnnnnnnnnnnnnnnnnnnnnnnnnnnnnnnnnnnnnnnnnnnnnnnnnnnnnnnnnnnnnnnnnnnnnnnnnnnnnnnnnnnnnnnnnnnnnnnnnnnnnnnnnnnnnnnnnnnnnnnnnnnnnnnnnnnnnnnnnnnnnnnnnnnnnnnnnnnnnnnnnnnnnnnnnnnnnnnnnnnnnnnnnnnnnnnnnnnnnnnnnnnnnnnnnnnnnnnnnnnnnnnnnnnnnnnnnnnnnnnnnnnnnnnnnnnnnnnnnnnnnnnnnnnnnnnnnnnnnnnnnnnnnnnnnnnnnnnnnnnnnnnnnnnnnnnnnnnnnnnnnnnnnnnnnnnnnnnnnnnnnnnnnnnnnnnnnnnnnnnnnnnnnnnnnnnnnnnnnnnnnnnnnnnnnnnnnnnnnnnnnnnnnnnnnnnnnnnnnnnnnnnnnnnnnnnnnnnnnnnnnnnnnnnnnnnnnnnnnnnnnnnnnnnnnnnnnnnnnnnnnnnnnnnnnnnnnnnnnnnnnnnnnnnnnnnnnnnnnnnnnnnnnnnnnnnnnnnnnnnnnnnnnnnnnnnnnnnnnnnnnnnnnnnnnnnnnnnnnnnnnnnnnnnnnnnnnnnnnnnnnnnnnnnnnnnnnnnnnnnnnnnnnnnnnnnnnnnnnnnnnnnnnnnnnnnnnnnnnnnnnnnnnnnnnnnnnnnnnnnnnnnnnnnnnnnnnnnnnnnnnnnnnnnnnnnnnnnnnnnnnnnnnnnnnnnnnnnnnnnnnnnnnnnnnnnnnnnnnnnnnnnnnnnnnnnnnnnnnnnnnnnnnnnnnnnnnnnnnnnnnnnnnnnnnnnnnnnnnnnnnnnnnnnnnnnnnnnnnnnnnnnnnnnnnnnnnnnnnnnnnnnnnnnnnnnnnnnnnnnnnnnnnnnnnnnnnnnnnnnnnnnnnnnnnnnnnnnnnnnnnnnnnnnnnnnnnnnnnnnnnnnnnnnnnnnnnnnnnnnnnnnnnnnnnnnnnnnnnnnnnnnnnnnnnnnnnnnnnnnnnnnnnnnnnnnnnnnnnnnnnnnnnnnnnnnnnnnnnnnnnnnnnnnnnnnnnnnnnnnnnnnnnnnnnnnnnnnnnnnnnnnnnnnnnnnnnnnnnnnnnnnnnnnnnnnnnnnnnnnnnnnnnnnnnnnnnnnnnnnnnnnnnnnnnnnnnnnnnnnnnnnnnnnnnnnnnnnnnnnnnnnnnnnnnnnnnnnnnnnnnnnnnnnnnnnnnnnnnnnnnnnnnnnnnnnnnnnnnnnnnnnnnnnnnnnnnnnnnnnnnnnnnnnnnnnnnnnnnnnnnnnnnnnnnnnnnnnnnnnnnnnnnnnnnnnnnnnnnnnnnnnnnnnnnnnnnnnnnnnnnnnnnnnnnnnnnnnnnnnnnnnnnnnnnnnnnnnnnnnnnnnnnnnnnnnnnnnnnnnnnnnnnnnnnnnnnnnnnnnnnnnnnnnnnnnnnnnnnnnnnnnnnnnnnnnnnnnnnnnnnnnnnnnnnnnnnnnnnnnnnnnnnnnnnnnnnnnnnnnnnnnnnnnnnnnnnnnnnnnnnnnnnnnnnnnnnnnnnnnnnnnnnnnnnnnnnnnnnnnnnnnnnnnnnnnnnnnnnnnnnnnnnnnnnnnnnnnnnnnnnnnnnnnnnnnnnnnnnnnnnnnnnnnnnnnnnnnnnnnnnnnnnnnnnnnnnnnnnnnnnnnnnnnnnnnnnnnnnnnnnnnnnnnnnnnnnnnnnnnnnnnnnnnnnnnnnnnnnnnnnnnnnnnnnnnnnnnnnnnnnnnnnnnnnnnnnnnnnnnnnnnnnnnnnnnnnnnnnnnnnnnnnnnnnnnnnnnnnnnnnnnnnnnnnnnnnnnnnnnnnnnnnnnnnnnnnnnnnnnnnnnnnnnnnnnnnnnnnnnnnnnnnnnnnnnnnnnnnnnnnnnnnnnnnnnnnnnnnnnnnnnnnnnnnnnnnnnnnnnnnnnnnnnnnnnnnnnnnnnnnnnnnnnnnnnnnnnnnnnnnnnnnnnnnnnnnnnnnnnnnnnnnnnnnnnnnnnnnnnnnnnnnnnnnnnnnnnnnnnnnnnnnnnnnnnnnnnnnnnnnnnnnnnnnnnnnnnnnnnnnnnnnnnnnnnnnnnnnnnnnnnnnnnnnnnnnnnnnnnnnnnnnnnnnnnnnnnnnnnnnnnnnnnnnnnnnnnnnnnnnnnnnnnnnnnnnnnnnnnnnnnnnnnnnnnnnnnnnnnnnnnnnnnnnnnnnnnnnnnnnnnnnnnnnnnnnnnnnnnnnnnnnnnnnnnnnnnnnnnnnnnnnnnnnnnnnnnnnnnnnnnnnnnnnnnnnnnnnnnnnnnnnnnnnnnnnnnnnnnnnnnnnnnnnnnnnnnnnnnnnnnnnnnnnnnnnnnnnnnnnnnnnnnnnnnnnnnnnnnnnnnnnnnnnnnnnnnnnnnnnnnnnnnnnnnnnnnnnnnnnnnnnnnnnnnnnnnnnnnnnnnnnnnnnnnnnnnnnnnnnnnnnnnnnnnnnnnnnnnnnnnnnnnnnnnnnnnnnnnnnnnnnnnnnnnnnnnnnnnnnnnnnnnnnnnnnnnnnnnnnnnnnnnnnnnnnnnnnnnnnnnnnnnnnnnnnnnnnnnnnnnnnnnnnnnnnnnnnnnnnnnnnnnnnnnnnnnnnnnnnnnnnnnnnnnnnnnnnnnnnnnnnnnnnnnnnnnnnnnnnnnnnnnnnnnnnnnnnnnnnnnnnnnnnnnnnnnnnnnnnnnnnnnnnnnnnnnnnnnnnnnnnnnnnnnnnnnnnnnnnnnnnnnnnnnnnnnnnnnnnnnnnnnnnnnnnnnnnnnnnnnnnnnnnnnnnnnnnnnnnnnnnnnnnnnnnnnnnnnnnnnnnnnnnnnnnnnnnnnnnnnnnnnnnnnnnnnnnnnnnnnnnnnnnnnnnnnnnnnnnnnnnnnnnnnnnnnnnnnnnnnnnnnnnnnnnnnnnnnnnnnnnnnnnnnnnnnnnnnnnnnnnnnnnnnnnnnnnnnnnnnnnnnnnnnnnnnnnnnnnnnnnnnnnnnnnnnnnnnnnnnnnnnnnnnnnnnnnnnnnnnnnnnnnnnnnnnnnnnnnnnnnnnnnnnnnnnnnnnnnnnnnnnnnnnnnnnnnnnnnnnnnnnnnnnnnnnnnnnnnnnnnnnnnnnnnnnnnnnnnnnnnnnnnnnnnnnnnnnnnnnnnnnnnnnnnnnnnnnnnnnnnnnnnnnnnnnnnnnnnnnnnnnnnnnnnnnnnnnnnnnnnnnnnnnnnnnnnnnnnnnnnnnnnnnnnnnnnnnnnnnnnnnnnnnnnnnnnnnnnnnnnnnnnnnnnnnnnnnnnnnnnnnnnnnnnnnnnnnnnnnnnnnnnnnnnnnnnnnnnnnnnnnnnnnnnnnnnnnnnnnnnnnnnnnnnnnnnnnnnnnnnnnnnnnnnnnnnnnnnnnnnnnnnnnnnnnnnnnnnnnnnnnnnnnnnnnnnnnnnnnnnnnnnnnnnnnnnnnnnnnnnnnnnnnnnnnnnnnnnnnnnnnnnnnnnnnnnnnnnnnnnnnnnnnnnnnnnnnnnnnnnnnnnnnnnnnnnnnnnnnnnnnnnnnnnnnnnnnnnnnnnnnnnnnnnnnnnnnnnnnnnnnnnnnnnnnnnnnnnnnnnnnnnnnnnnnnnnnnnnnnnnnnnnnnnnnnnnnnnnnnnnnnnnnnnnnnnnnnnnnnnnnnnnnnnnnnnnnnnnnnnnnnnnnnnnnnnnnnnnnnnnnnnnnnnnnnnnnnnnnnnnnnnnnnnnnnnnnnnnnnnnnnnnnnnnnnnnnnnnnnnnnnnnnnnnnnnnnnnnnnnnnnnnnnnnnnnnnnnnnnnnnnnnnnnnnnnnnnnnnnnnnnnnnnnnnnnnnnnnnnnnnnnnnnnnnnnnnnnnnnnnnnnnnnnnnnnnnnnnnnnnnnnnnnnnnnnnnnnnnnnnnnnnnnnnnnnnnnnnnnnnnnnnnnnnnnnnnnnnnnnnnnnnnnnnnnnnnnnnnnnnnnnnnnnnnnnnnnnnnnnnnnnnnnnnnnnnnnnnnnnnnnnnnnnnnnnnnnnnnnnnnnnnnnnnnnnnnnnnnnnnnnnnnnnnnnnnnnnnnnnnnnnnnnnnnnnnnnnnnnnnnnnnnnnnnnnnnnnnnnnnnnnnnnnnnnnnnnnnnnnnnnnnnnnnnnnnnnnnnnnnnnnnnnnnnnnnnnnnnnnnnnnnnnnnnnnnnnnnnnnnnnnnnnnnnnnnnnnnnnnnnnnnnnnnnnnnnnnnnnnnnnnnnnnnnnnnnnnnnnnnnnnnnnnnnnnnnnnnnnnnnnnnnnnnnnnnnnnnnnnnnnnnnnnnnnnnnnnnnnnnnnnnnnnnnnnnnnnnnnnnnnnnnnnnnnnnnnnnnnnnnnnnnnnnnnnnnnnnnnnnnnnnnnnnnnnnnnnnnnnnnnnnnnnnnnnnnnnnnnnnnnnnnnnnnnnnnnnnnnnnnnnnnnnnnnnnnnnnnnnnnnnnnnnnnnnnnnnnnnnnnnnnnnnnnnnnnnnnnnnnnnnnnnnnnnnnnnnnnnnnnnnnnnnnnnnnnnnnnnnnnnnnnnnnnnnnnnnnnnnnnnnnnnnnnnnnnnnnnnnnnnnnnnnnnnnnnnnnnnnnnnnnnnnnnnnnnnnnnnnnnnnnnnnnnnnnnnnnnnnnnnnnnnnnnnnnnnnnnnnnnnnnnnnnnnnnnnnnnnnnnnnnnnnnnnnnnnnnnnnnnnnnnnnnnnnnnnnnnnnnnnnnnnnnnnnnnnnnnnnnnnnnnnnnnnnnnnnnnnnnnnnnnnnnnnnnnnnnnnnnnnnnnnnnnnnnnnnnnnnnnnnnnnnnnnnnnnnnnnnnnnnnnnnnnnnnnnnnnnnnnnnnnnnnnnnnnnnnnnnnnnnnnnnnnnnnnnnnnnnnnnnnnnnnnnnnnnnnnnnnnnnnnnnnnnnnnnnnnnnnnnnnnnnnnnnnnnnnnnnnnnnnnnnnnnnnnnnnnnnnnnnnnnnnnnnnnnnnnnnnnnnnnnnnnnnnnnnnnnnnnnnnnnnnnnnnnnnnnnnnnnnnnnnnnnnnnnnnnnnnnnnnnnnnnnnnnnnnnnnnnnnnnnnnnnnnnnnnnnnnnnnnnnnnnnnnnnnnnnnnnnnnnnnnnnnnnnnnnnnnnnnnnnnnnnnnnnnnnnnnnnnnnnnnnnnnnnnnnnnnnnnnnnnnnnnnnnnnnnnnnnnnnnnnnnnnnnnnnnnnnnnnnnnnnnnnnnnnnnnnnnnnnnnnnnnnnnnnnnnnnnnnnnnnnnnnnnnnnnnnnnnnnnnnnnnnnnnnnnnnnnnnnnnnnnnnnnnnnnnnnnnnnnnnnnnnnnnnnnnnnnnnnnnnnnnnnnnnnnnnnnnnnnnnnnnnnnnnnnnnnnnnnnnnnnnnnnnnnnnnnnnnnnnnnnnnnnnnnnnnnnnnnnnnnnnnnnnnnnnnnnnnnnnnnnnnnnnnnnnnnnnnnnnnnnnnnnnnnnnnnnnnnnnnnnnnnnnnnnnnnnnnnnnnnnnnnnnnnnnnnnnnnnnnnnnnnnnnnnnnnnnnnnnnnnnnnnnnnnnnnnnnnnnnnnnnnnnnnnnnnnnnnnnnnnnnnnnnnnnnnnnnnnnnnnnnnnnnnnnnnnnnnnnnnnnnnnnnnnnnnnnnnnnnnnnnnnnnnnnnnnnnnnnnnnnnnnnnnnnnnnnnnnnnnnnnnnnnnnnnnnnnnnnnnnnnnnnnnnnnnnnnnnnnnnnnnnnnnnnnnnnnnnnnnnnnnnnnnnnnnnnnnnnnnnnnnnnnnnnnnnnnnnnnnnnnnnnnnnnnnnnnnnnnnnnnnnnnnnnnnnnnnnnnnnnnnnnnnnnnnnnnnnnnnnnnnnnnnnnnnnnnnnnnnnnnnnnnnnnnnnnnnnnnnnnnnnnnnnnnnnnnnnnnnnnnnnnnnnnnnnnnnnnnnnnnnnnnnnnnnnnnnnnnnnnnnnnnnnnnnnnnnnnnnnnnnnnnnnnnnnnnnnnnnnnnnnnnnnnnnnnnnnnnnnnnnnnnnnnnnnnnnnnnnnnnnnnnnnnnnnnnnnnnnnnnnnnnnnnnnnnnnnnnnnnnnnnnnnnnnnnnnnnnnnnnnnnnnnnnnnnnnnnnnnnnnnnnnnnnnnnnnnnnnnnnnnnnnnnnnnnnnnnnnnnnnnnnnnnnnnnnnnnnnnnnnnnnnnnnnnnnnnnnnnnnnnnnnnnnnnnnnnnnnnnnnnnnnnnnnnnnnnnnnnnnnnnnnnnnnnnnnnnnnnnnnnnnnnnnnnnnnnnnnnnnnnnnnnnnnnnnnnnnnnnnnnnnnnnnnnnnnnnnnnnnnnnnnnnnnnnnnnnnnnnnnnnnnnnnnnnnnnnnnnnnnnnnnnnnnnnnnnnnnnnnnnnnnnnnnnnnnnnnnnnnnnnnnnnnnnnnnnnnnnnnnnnnnnnnnnnnnnnnnnnnnnnnnnnnnnnnnnnnnnnnnnnnnnnnnnnnnnnnnnnnnnnnnnnnnnnnnnnnnnnnnnnnnnnnnnnnnnnnnnnnnnnnnnnnnnnnnnnnnnnnnnnnnnnnnnnnnnnnnnnnnnnnnnnnnnnnnnnnnnnnnnnnnnnnnnnnnnnnnnnnnnnnnnnnnnnnnnnnnnnnnnnnnnnnnnnnnnnnnnnnnnnnnnnnnnnnnnnnnnnnnnnnnnnnnnnnnnnnnnnnnnnnnnnnnnnnnnnnnnnnnnnnnnnnnnnnnnnnnnnnnnnnnnnnnnnnnnnnnnnnnnnnnnnnnnnnnnnnnnnnnnnnnnnnnnnnnnnnnnnnnnnnnnnnnnnnnnnnnnnnnnnnnnnnnnnnnnnnnnnnnnnnnnnnnnnnnnnnnnnnnnnnnnnnnnnnnnnnnnnnnnnnnnnnnnnnnnnnnnnnnnnnnnnnnnnnnnnnnnnnnnnnnnnnnnnnnnnnnnnnnnnnnnnnnnnnnnnnnnnnnnnnnnnnnnnnnnnnnnnnnnnnnnnnnnnnnnnnnnnnnnnnnnnnnnnnnnnnnnnnnnnnnnnnnnnnnnnnnnnnnnnnnnnnnnnnnnnnnnnnnnnnnnnnnnnnnnnnnnnnnnnnnnnnnnnnnnnnnnnnnnnnnnnnnnnnnnnnnnnnnnnnnnnnnnnnnnnnnnnnnnnnnnnnnnnnnnnnnnnnnnnnnnnnnnnnnnnnnnnnnnnnnnnnnnnnnnnnnnnnnnnnnnnnnnnnnnnnnnnnnnnnnnnnnnnnnnnnnnnnnnnnnnnnnnnnnnnnnnnnnnnnnnnnnnnnnnnnnnnnnnnnnnnnnnnnnnnnnnnnnnnnnnnnnnnnnnnnnnnnnnnnnnnnnnnnnnnnnnnnnnnnnnnnnnnnnnnnnnnnnnnnnnnnnnnnnnnnnnnnnnnnnnnnnnnnnnnnnnnnnnnnnnnnnnnnnnnnnnnnnnnnnnnnnnnnnnnnnnnnnnnnnnnnnnnnnnnnnnnnnnnnnnnnnnnnnnnnnnnnnnnnnnnnnnnnnnnnnnnnnnnnnnnnnnnnnnnnnnnnnnnnnnnnnnnnnnnnnnnnnnnnnnnnnnnnnnnnnnnnnnnnnnnnnnnnnnnnnnnnnnnnnnnnnnnnnnnnnnnnnnnnnnnnnnnnnnnnnnnnnnnnnnnnnnnnnnnnnnnnnnnnnnnnnnnnnnnnnnnnnnnnnnnnnnnnnnnnnnnnnnnnnnnnnnnnnnnnnnnnnnnnnnnnnnnnnnnnnnnnnnnnnnnnnnnnnnnnnnnnnnnnnnnnnnnnnnnnnnnnnnnnnnnnnnnnnnnnnnnnnnnnnnnnnnnnnnnnnnnnnnnnnnnnnnnnnnnnnnnnnnnnnnnnnnnnnnnnnnnnnnnnnnnnnnnnnnnnnnnnnnnnnnnnnnnnnnnnnnnnnnnnnnnnnnnnnnnnnnnnnnnnnnnnnnnnnnnnnnnnnnnnnnnnnnnnnnnnnnnnnnnnnnnnnnnnnnnnnnnnnnnnnnnnnnnnnnnnnnnnnnnnnnnnnnnnnnnnnnnnnnnnnnnnnnnnnnnnnnnnnnnnnnnnnnnnnnnnnnnnnnnnnnnnnnnnnnnnnnnnnnnnnnnnnnnnnnnnnnnnnnnnnnnnnnnnnnnnnnnnnnnnnnnnnnnnnnnnnnnnnnnnnnnnnnnnnnnnnnnnnnnnnnnnnnnnnnnnnnnnnnnnnnnnnnnnnnnnnnnnnnnnnnnnnnnnnnnnnnnnnnnnnnnnnnnnnnnnnnnnnnnnnnnnnnnnnnnnnnnnnnnnnnnnnnnnnnnnnnnnnnnnnnnnnnnnnnnnnnnnnnnnnnnnnnnnnnnnnnnnnnnnnnnnnnnnnnnnnnnnnnnnnnnnnnnnnnnnnnnnnnnnnnnnnnnnnnnnnnnnnnnnnnnnnnnnnnnnnnnnnnnnnnnnnnnnnnnnnnnnnnnnnnnnnnnnnnnnnnnnnnnnnnnnnnnnnnnnnnnnnnnnnnnnnnnnnnnnnnnnnnnnnnnnnnnnnnnnnnnnnnnnnnnnnnnnnnnnnnnnnnnnnnnnnnnnnnnnnnnnnnnnnnnnnnnnnnnnnnnnnnnnnnnnnnnnnnnnnnnnnnnnnnnnnnnnnnnnnnnnnnnnnnnnnnnnnnnnnnnnnnnnnnnnnnnnnnnnnnnnnnnnnnnnnnnnnnnnnnnnnnnnnnnnnnnnnnnnnnnnnnnnnnnnnnnnnnnnnnnnnnnnnnnnnnnnnnnnnnnnnnnnnnnnnnnnnnnnnnnnnnnnnnnnnnnnnnnnnnnnnnnnnnnnnnnnnnnnnnnnnnnnnnnnnnnnnnnnnnnnnnnnnnnnnnnnnnnnnnnnnnnnnnnnnnnnnnnnnnnnnnnnnnnnnnnnnnnnnnnnnnnnnnnnnnnnnnnnnnnnnnnnnnnnnnnnnnnnnnnnnnnnnnnnnnnnnnnnnnnnnnnnnnnnnnnnnnnnnnnnnnnnnnnnnnnnnnnnnnnnnnnnnnnnnnnnnnnnnnnnnnnnnnnnnnnnnnnnnnnnnnnnnnnnnnnnnnnnnnnnnnnnnnnnnnnnnnnnnnnnnnnnnnnnnnnnnnnnnnnnnnnnnnnnnnnnnnnnnnnnnnnnnnnnnnnnnnnnnnnnnnnnnnnnnnnnnnnnnnnnnnnnnnnnnnnnnnnnnnnnnnnnnnnnnnnnnnnnnnnnnnnnnnnnnnnnnnnnnnnnnnnnnnnnnnnnnnnnnnnnnnnnnnnnnnnnnnnnnnnnnnnnnnnnnnnnnnnnnnnnnnnnnnnnnnnnnnnnnnnnnnnnnnnnnnnnnnnnnnnnnnnnnnnnnnnnnnnnnnnnnnnnnnnnnnnnnnnnnnnnnnntgcgtgcgtgcgtgcgtgcgtgcgagcgagcgagctatccttctttccctattctagtggttccctgaaaacttttcttgatgaacgaggaaggctgaaagacgatttaacccccaagtacctgtacgaggtggagcacactctgtcctctgcagtgctgggcttcacgggcagcaaaatctttggcttctgcagccaggtgccctacatctgcagctatgtaatgcccgtaaaggtacgccagcctccggccgtcaagaccgaagtcgccttagacgagatcctcttggctgccttagcagattcagtcagtcagcaaatagcttcgctggagcagtagcatcaccatcgtgttcagttagagtcgttgacattgctgttacgccatcgggaatacaaccgagtggcctctatgttacacacatcattctttgtcagataaataagcaggtgacatagtcttggtttagtgccttaaaaaatatctagcataagatcttttccatagatgccaggagctaacaggtagatcatttcctgtgaaaccttacaccttggcactaagtaaaattgcacaaaacaattaaactatgtttctgtcatgttccttcctctctcttcaaactcctaccattctatgacacctcctgctgcacataccagcctagtggcttgcctgctacccttggatgctcaacatccactggtacccatcttcagatccctgggaggagggggagactctaccctaggcttctctaaattattttttatcttctctctagtcttttctctgtgtagctggtatattagacatagaaattaagaaaaaaaattagagacagttcatggtaacaggatactagagaagtgttgtagaagaagcaagattcacactagtctttgaaggatgggtcagatttggagccaggaaatagcatgtgcaccctgagggaggagtgtggacagaggaagtggaatgggaccaggtggagccgagaaggacctttcagacagaaggaaggtcgtgtctgaggcttggagaagggggtgcatgggatccacagtgaggaggttggcaacttttatttttgatttgtgaatgatggtatatgaaaatggtggctgaaaatcaagactgtcagcaataggttgggatccttaatggcagaattacatgtaaagaagccattcctgggccaagatatagacccagtggctatgagtacttgcttgtcacgcaaaggagcctggttttgatcccagcactgaaagaaggaaagaaggaaggaaggaaggaaggaaggaaggaaggaaggaaggaaggaaggaagagagggagggagggagggagagaggaagggagggaggnnnnnnnnnnnnnnnnnnnncaaactccttagctggtaaaaatcagcttttatttgtaaagatgtaactgtaattgatacatggtataaacacaggtgcctactctgtcccacacaaggatagaatccccagtttgaacccgaccacatatgtaacacatgcccccccaccccctgcaaaaccaacgctgctgctgctggcccgatcctttttaatcatgttctcttttgctttgattggcaggaacacactggtgtccttgttcttaagcctcaccaaaaagtacagagcaaacagtacggatctggaacaatctatctgtcttctcacggattatggcttatgacaatagctaaatgtggaattctctgtatccgagatatgttcagtatggtaaattaacaaaatagaaaacctgagtagacaaaagggggtgggggtggtgacttagagagagtgcctagtctttagggcatctgttgctcttgcagaagactcagtttccaacatccacgtgaggctgacaaccagtccccagggatccggcatcctcttcttgcttccatgggcaccaggcacacatgtggtgcacatacatacacacagacaaaacactcatacacacaaaataaaaataaagactttttctaattatataaaaaccacacagtgtagggcccagagagagggctcttcctgacgacccagctttggctccagcacctgggctgtgtggttcacaattgcctgtaaattctgactcaggggatccaatgccctggcctccaccggcacctaaactcctgtgcacacacccacgcatgctcacaattaaataggagtaaagtttacagtatggcgcatgttcatggaaaccctaagggaagaggaattggaacttcccttagtataaattgactcaatttcttgttttctttttctttttgtaaagtcactgagagtattaacagttttgttttgttttgttttgttttgttttgttttgttttgttttgttttgtttttaacattcttgccagtgagcttgccactctaaagaaggcaaccccagccagggcaatgagatctgcacacacagaacactaggcaggaccctgcagatgggcccctgtccgacttatctccaagctgttccttggaaactcactgaggggcgctgaacttctaactctctactgtggagtcagggaaactgctccctggcccctagaggctcatgggaaggaaacagctttgcaaatgatgtgcttagcaacaatgttagcctggtccggagggccttggcttgttgctgctgtcctcctccacccgtcaaagatgctgagggagcagaaagggggcagagagtgctcttgtctgaatgggtgggcactagcatcccatttccatagctcacacacctctgagaaactgagacaggtttctcttctgtagaaagcggggcttgctctcctaggttttaagactatgttgcacagttcatcttaccccgttctccaccgctctcctccatgcactggaaatatcatccccacccatgagacaacactccacacgtccacagatactgttatctctggctgggcacatagtagtagttccttttcttctcatttagaagaaagcaaatttggacaaactaaatgtggttctagaggaaaacatgagtctcttagggactgggtttttctctcttcttagtgcgcgtgtgtgtgtgtgtctgtgtgtgtgtgtgtgttttcatgttccctgtgaggtacaggctcacacacactgtagcgaggatgtaaacgtcagagcacaagctgcctttcatagccactaaagccaggctagctggccacacgcttctggagaagtccttgtgggcacatgctgggatctggattctcctggaatggcttcctctagcctgtaagtgggttctggggattgaagcccaacgctgtgaggcttgtactgcaagcacgttatgccctgagccatccatctctccaggcctaggggtcgttttgttttgttttgttttgttttttgttttttaagcaaatgattgcacattgtgccgcactgtcggaagcttggtgcagctgacagtgacccaacacggcagggcaaagcacctcacaaatgacgttattcatggaacagtgacaaaaaaaaaaaaaaaaaagaaaagaaaagaaaaaaggaaagaaagaaagaaaggaaagaaagaagaaaaaagaaagaaagagaaaagacaatcccaagtttcctgcacaaaagtttaagtgaataaatgaactatggtataaaatcagtacttagtaaaacctgaacgatcaccgggctgccgtgatcagaacagggaaagccttatagaacaatgtgaaaaaagtcccaagaaatctcattgttaagtagaacggcaaggtgtataaagtaagtgtgtatgcacatgatatcgttcggcgtctgcggaaaagttctatttacatacattcttttctgaaaggctcttgatgatatagtcagcattcaggggaaatgatagtcacagagtggaagagannnnnnnnnnnnnnnnnnnnnnnnnnnnnnnnnnnnnnnnnnnnnnnnnnnnnnnnnnnnnnnnnnnnnnnnnnnnnnnnnnnnnnnnnnnnnnnnnnnnnnnnnnnnnnnnnnnnnnnnnnnnnnnnnnnnnnnnnnnnnnnnnnnnnnnnnnnnnnnnnnnnnnnnnnnnctgttgtcctgtattgtacacatcaaggatgtgtttatttgcagcacttagttgctttcatcagcacaccccagggcctgttatcttccttccccggtttcttctcaccttttcctaacacactcagccactttacataaagcacatcccgtccagggtcattagatgcatcccggttttactcacccaaggtccctccccaaccttcacagacatcaacactgtcagttcactgacagggtgtccatccggtggcctggcttaagccaccggttttgatttcactccttccacgttacataaactagtgggaaagtaagtcaatactggattgaactagatgttttaagtgctgagcattatcaagggctactttgtcaccaactaaaatgtctttagaagtacagaaaaaaattagccgcaagcaagcaaagatacacatgaccatgttgtgggggggaccaccaaaacaccataccatgtaatggagaattatgtttataatttctctgttttatccctaaaactattgaggaaacctttgttcgatgtcggagtcattctcaccaggggcgagggatccagaacatgaaaatgtcattggacggacagcacatcctggtgaatggaaaagatgacaacacccttgtctgcctcaaatggaagtaagcacagtgcacagcaacgggatgtgatgcggggtttccaattcagaagggcagtctcgccagcaatcagctgtcatgcacagaaatctgaggggggccacacggtgcttgctgtaggagccgtttgggaggcaacagggtagataaggattctgaggagagaacatggcaagagccatcgtttctaatggaaagatctagaaggatcaagtgagaagcaggaatgggttagaccatcaggttctggggcatacaggctacttgttgtctgggacttggccctgagcctgttgatgcccaagactaatgccctaggtgtgagaatgtcatatgtatgggccccacctcccaccccctgggctgctggggtgtggcctctggattagttggctgcattcgagagggtgcttcaaatggagttatcactgggagttggctcatcccttgtcaataacgtgacatcaaaagacagctcggactttaaatccagtgttacagaagccgtgaatactcagctcccttcagcaaccataattttaaaacacagccttccttgaacacagtgaaatattccatagcatagagatttctgtaacttaacacccccgggagctgctttatttcaaagactcacttcaagatggcatgcccgtgcccatttcatatatgaaaaccatgcgtaaaaaagagactcatcttaatacctacgtcctaacatgcccttatagtgagtggacagtgtctcaggcaacggcaaacaagtgcaggaaccctgtttcaaaaggaaagacgcttccagccatcagcaatgaatgacctgaactcccacactaaacgaagttggttcaggaggacttatgagccttgcaactgtaggcattcgatgatacttctacttcaacccatgtaggtcacgacccctctgggggtcgcatatcagatattctacataacatatttacattacggttcataacactagcaaagtagcaacgaaaataattttatggttggggtcacctcaacacgaggaactgtattaaagggtcgcagcatttggcaggcttgagacacactgctctaagctgtctgcaacagcgcccctcgagatgagagtctgtaacttcagatagacttggtagaaatgcatatcaggttgccatttcctctgcctgactcagtgtgtccgcaatgccctagtttgcttttctgtcgccctggtaagcgccatggccagaagagaaaatttatttcaactcacaggtttgtagtcttctattgagggaaaccaaggcagaaactcaaggtaggagcttgaagtagaaacctcaaaagaacattgcttggctgccttgcctcccctgctcatgtacagagcacagatccacctgctaagggatgaatggcattgctctctcaatgtatgtatgctaagccttcctacatcagcaatcaggaggccccagagacttgctcaccggccaatttaatggaggtcgttcagctgagatcatgtatgtgacaaagcctggtgcattctgggggctcagagcagtgagtctttggtgtggtggccaaaggccatgttgggtgaagggtgcagggcagcattaaggagagatcacccaagaagggtcaggaagctgagtctttcaaagtccatgaaagggtcctcttctgagaaatagaagcccagcaactcaagggcaccgtggagaacttcgccatgattctttgtgtagttatctggaaatgaaactgatgaatgggatcattttaaagtggttttatggttatgtattctctctctctctctctccctctctctctccctctctctctctctctctccctctcctgttaggcggcttggagcaaacatagcaagtgagatctttgaacacagccgtccgctagtgctccatctgtcccagacagtggaatcggagagtgtatacttagctttatcgagagagtccacgaatgagcagcaagaagagacaactgaatcccaagtagctagcctgctttctccctctctataaataacatgcatgttttcccttcatagattttatgcgcatatgtaacactattttttcttacccacaagtccagtgatttttcaactcgaatataagctacatgtgatagaaaactaagcttttctcaaaacgatcacaaacatcatatctcaaatttcacttaaatgatggtataaaatgaagacttgcttggaaactttttttttttaaatcaatatttgtagaaatttggtctggtacttcctcccagccccatgtgcccagaattaagactcagactcaaaatatatttacaaataccatgcccacatagctaggctcttctttgaacagatcataacttaaatgaacccattgattctaatctgttttctgctgcatggctggttacccatgcattcgtcctgtcacagctttctgggagaatcttccacacccggctctatcccagaattttttcttcctcccagatgtctcacttcctatttcctgcctaagtcacagacgatcagattcctcactgacatgggccacatccacttggacacaaggtattctgtctacaaatattggtggccggtggcagcagtctctctacctttgtataaatattcatgatttaggacacgtgtcagcctggaaaacaagacttacttggttgttcagtgaataactttttaaaaattaagtaaaatcatattgttgtaataaactcacatataaaaatatcacatagccaaattaggagaccactgaaatacttgtctcctctccgactctgtctcattggacttccgcacggttaagatggtcattctgaagccatggagctttgctggggacgggggagcttacactttaagtgccaattatgacttggttgggttgggtttggttgggtttggtttggttgggtttggtttggtttggtttggttttggttttgattttgattttggttttggtttttgagacaaatctcactatatagccttggctagcctggaacttgcttttgtaacaggctggcctcaaactcagagattgcctgcctcggcctattacatttttatatatggttccaccatgagaaaacattccggcagagttgaaaggggttcagcaaataattactgggtgcccacaaagtgggaactgtgtcctcctttcccctttctgagtgactttctcagcacttgcaaagtagcacttaggtttgagcaacgttgaagtgatcttatttcatttactgtcctattatcggtctttaaaacaccttgatttctgtgctggaggagatgtaaggattgaagaactcatttaggtaggcccacacctagcattattttttttaactgggacaagtgcaaaggaattcaatgaaaggctgtgaagcaaagagacagaaggatttgacagtttttaagaactccctggctcaagggacaagggaggggatagagggttttcagaggagaaaccagaaaaggggataacatttgaaatgtacataaagaaaatatcgaataaggaaaaaaaaaaacagactggactgttaaaaaaaaaattaaagaataaaagaaagaaaggggggaaaaggtagcttttgtttttttcaatcaaatcatgttttgttttgttttctaaatagacagcattgtttttgttggataattttaataaaaatgttttgcttccctatgattaaaaaaaaaaaaagaactacctgtctctgtctaatctctctcagaaacacctgaactcagactcatcagaagaggaagcagtcatcgatcacaagatgattccctggatccaacaaaaaatggaagaggtatttattattattattattattaattctgttgagacagggtttctctgtgtagccctagttgtcctagtacctgttctgtagaccaggctggccttgaactcagagatccatctgcctctgcctctgcctctgcctcctctgcctcctctgcctcctctgcctctgccacctctgcctcctctgccttccctgccgcctctgcctcctgagcactggaattaaaggggtgtgccaccacgcctggtctacgaagactgtttataaagtgtggggtgggtttgaactgtgatgtgccaactgcattctgtttctatggaaatctaggggaaggtttgcatgctccatgagacactccttggcagtacattgcagtatgcaagccagagtcagcttttttgattaagttctccaagccttaagaacttatacccaacctaaaacccaacaaaagtatcaggaaagccaaagccaaaaggacccgagagactgcgtttttgcattttgaagggtatttgtcttaaagggatgggttgggaacagaagggctactgtggctaaggacattatgaagcgccgagtaacaggctgacggcaatgtctagacccagtctcactcaagctagattagttttggtttgtcagtaatttacgattccatttttctctacttttttctagcttgtatgattggtatcggttgcatgttgtttcaatggtcccttacaaacacccttagatttaagcagactgtcacagggactcaatttcatggttagtttgatttttttttcttgcatgcatattcgtgttctttgcatgcatgcgtgttatcccacgtgtatatacgtgcttgcatgtgaaagctcaaagttggcggcaggaataatctccatcactcttccaccttaatcaccaaagcaggctctctccatcaaactcagagcttatcgatccggtcagtgttgccagccagcttgcgctggggatctgccctccgaagccaggtgcgctgccagatctagctggcatttgtgtgtgtttctggggatccaagctctgctgctcacaattgtgcggcaagcctttattggctgagccatacccccctccccagcaccctgtttctttttttttattacatattttcctcaattacgtttccaatgctatccccaaagtcctccatacccttccccccacttccctacccacccattcccatttttttggccctggcgttcccctgtactggagcatataaagtttgcgtgtccaatgggcctctctttccagtgatggccgactaggccatcttttgatacatatgcagctattgtcaagagctacggggtactggttagttcataatgttgttccacctatagggttgcagatccctttagctcctgtactgtctctagctcctccattgggagccctgtaatccatccactagctgactgtgagcatccacttctgtgtttggtaggccccggcatagtctcacaagagacagctctatctgggtcctttcagcaaattcttgctagtgtatgcaatggtgtcagcgtttggaagctgattatggggtggatccctggatatggcagtctctagatggtccatcctttcgtcacagctccaaactttgtctctgtaattccttccatgggtgttttgttcccaattctaagaaggggcatggtgtccacacttcagtcttcattcttcttgagtttcatgtgtttagcaaattgtatcttatatcttgggtatcctaagttttgggctaatatccacttatcagtgagtacatattgtgtgagtttctttgtgattgtgttacctcactcaggatgatgccctccaggtccatccatttggctaggaatttcataaattcattctttttaatagctgagtagtactccattgtgtagcaccctgtttctatttccgttttaaagaagtgcaacctgtgcgtcattgctccaagttctccttgtctctccgcaccaccttcccttgcctcctcctcctcctcctccttcttcttcttcttcttcttattcttattattattattattattattattattattttgatttttcgagacagggtttctctgtatagccctggctgtcctggaactcactttgtagaccaggctggcctcgaactcagaaatctgcctgcctctgcctctcgagtgctgggattaaaggcgtgtgccaccacgcccggcttttcccttgccttattaagtgaggtgcttgctctctttcaggccatcaaaaaggaggtgaggattttttcccctagaagaaaggagatcaaaagaggaattaaggagctcgctcaggttgtaagtacagtgctcacacgcactgaagcgcactaccctgccgtcagaaattacatttgcaccttcttctgtttcctacaacgtgaggacctaaccttctgggtatggtaacagactcaaacttcacactctaatgtcaaacacacatgggtctcccctttactttcctggagttctccatcttatattgtattttaatacttacttacttcaaagttgtccactgacatgtttgtttggttttggtttgaaggcggccactgtcccgcttcacttcgccatggctctcaaactcctggcataatggttttaacgtttctaccttttctcctagactctgctgacattacattacaccaacaagtccatccccagtatgcaaccacagaaagctctaaagctcagttgcgtgctagattgtgactgcagagccattttttgcagctgtttttctaggattgaataactccccacccccaaacccccttgcgttcttgtgcattgttatctacttagactctcagagtgtggtgcagtcaggtatgtgaggacagtctgagctttgtaacctccctcctggagctctccatccttcatcttcagcctgggcatccttctctccagcgaaggcccatagctgctcgctgaaggcctcatcttgttcatcctcctaccaggtggttcttattgttagggctgtgttgcataaaattgatagtttatgcacttcaacctataaaaatgttctgcaaaagtatatgattcaagcacacaagatgtctcagtgggtaaagacacatggagacaagcctaaggacctgagtttgattctcaggaatcacatgatggaaggggagacttgactccgacagttgtctcctgtgacctccatacatgaggcatggcacccctgccatacacccccatataaataagtaactaaaatgcaacaaggctgcatatagaactcaatcaacagccactagtctgtctttatttttttcttttaaaaatataccttcttatgacttggtccatactcttccttcatagcttttgtatttgtctctaatttttaaagggccttccaaaagctgggcataaagtgaatgcctaaagttctgcctattctaggggggggggcagttcattggagcctaggagttagagaaagtagcctaggcaacgtcgtgagatgctgtcttaaaaaaaaatggaagtcttccaaagtctcacatgtacatgtccttgtctaatattctttaattgccgtgtaattcactcttatgaacagtataaaggaaggatcttagcttttcaaatacatagcccatttcccacaacactcttgagcacaaagccctttctgcatggatttggagagcttctccaagcacagacctgtttctggagtccctgtcctgaggatggccactcactggtcttcccctggctcgggacaaagctatttaaccattacagtttcgtgaacgttttgatgttcttgaaagtaaacctacctttacgcttctcttccgaaacaaatattttgtgaacgtttactctgccatttggattttaagatccacctgtgagccttgcttgcttttctgttgctatgataaaatagcccgaggaaatctgcttaaggtccgaggggatttatttgggctcacagttcaaggcacatggtggagaagtcaaggagaaaggtgcttaaagcccctggttacatcacatctgcagccgggaaaataagaacaatgagtgctttcttggtttctctatcatttatgtccacaacgaaaagggctaatgatccctagggcccacctgatggaaggtgagaactgattctaattagtccactgatctggggactaacttgttttcttttcttttcttttctccccacccccccagaaacccatgtgttacctcaacaagctttatctgcttgttttagacccaagcctagaggatggtgaccccaagttttgatgagaatctttccacttcaaataacccccaaccaacacaattccccatagccatttccagaaacaaacaaaaaaaaaaaaaagtcgtaaatatttcatctcaatcaggcgtttctagtccacctttggtcattcagttcccagataaaagacacaaaacctttatatttatgatgagtctttaaagcactaaaaactgggcaggaatctaccttctaagctactaatgtctacttttctatcaataaccctgagttataacttgctacattctttatgggctgctcttattcagggtggccatccttatggttaattctcacaatcgtttaccccaggccgtcttttcttctctccacttcctctctcttctcctcctggtctctcttcagacttgatgtcttgcccaggaaccaaacccccacctacctcgatgctgcccagcaataggctgttggcatctttattcaaccaatagttttaaataaaggagcaaggtcacatagcaccacttggtgtgcctgaggattctcttgtccatggcgggtggggtagggggcaaccagacattggaggccaatatttagttttacaatacaacagaccaaacctcaacacaaaaaattcctgacccatttgcccggagactttctaggtgaatcctgttctgacacagcgatacgttgttgttcttggttttgtctttagataaatgaatttctaagtagcagtccttaaacttcaatgaccacaaacaagcccgtgatccagttctttatcccagagtgtgttgagagaagcacaacacctgttttatcgttcaagtctttgcctgtcactctcctttcttatttcaaaattcagattgcaatgatgatggaagagaatgaaaaggtggacatcattgcaaaactagatgaacaggagttttgcctggacgccgatgagctggaaaggcttcatgatgaatgtgaggaggaagtagcgaaggtaagcaaaggcctcactacgcccctgaggaggccgtgatagacaagacaagacaaacaacaagcaaacccaccatgctggggaagactctccccatggtactttcccaaagctctcatctttggaagaaacaccaggcttggcttcagtgcccctgaagagaattactaacagctggcagcataagcccagctagctattagcagatttgggggtagagtatgagtctctaggaggagaagtggcacctcccagtccagggtctcaatgctaaggagcccagggctgtagtcaccccaagccaatggggggtgggggggtcccacaatagtttctctatctgaacactgtccaggatgctgagtctaagggagttgatagaagagtttcagcaaggagagggaacacaagcaggctctgacaactggtatgccaaggacacatcttagcccttgattcaatgaatcagaagaaaaaaagaaaagaaaaagtaaatttataagaaaacaaaataaatggaaaggaatgtggaaaagttattctgagagaggattcctagctagtttggaaataatcccgccaacaaagtgaaatgcaaggaagtttctagaaaggcccctgaggactaaggactgttgtgggtcactttcataccgtgcttccaggcagactcttaaatagggacagttaactgcttttctattaagggatatcagcagataaagccaaagaagtaacacacaggcttataaaattttggacagtaaataatctgcttccccaggtgagtgtgtattcttctttactgtaaacaaaataattagaggaataaagtaaaaatttgtagacacggcctacaaatgagcccttcaacatgtgtgcgcgcacacagagagagagagagagagaaagagagagacagacagacagacagagagacagagagacagacagagacagagacagagacagagacagagaagggacgagaactcaggaagacatgactcttgcttgacttgcctcaggactgtctagaccaaccatcctgtatcccttacccctgggaggtggagtctgtccacacagccccttctggtcatgaatgtgatctggtcacctttaccggcatttgtttggacacagccgtcttcaaggcagagagaatcttaagccttaggaagcattgggaaaatagggccgtgtgacccacaagtccgtcacagtgtagggcagctcaaagtgcaggggaatcctgtaaaagcgctcccaccacatgcgcagccctggctaaccagagaccgaccatagcgttgtcttccctttcatctttttcctttttccaagataaggaaagatgtggagatgcacaacttggcccagagctacttaactgagctcatcaaggaggagtgctggaactccatggctgtgaagggccgggctctaaaggtaagagacacacagcctccgacacagcatcctggccaacgagggtgttcagagaaagcttggtcacaggacttttttaaaaagtaaagaaaagccacttagaacaaaaccttgcctctccctccactgaagtccaccaggtgtgtccccttccaccaggtgtgtccccttctccaggtgtgtccccttccaccagatgtgttcccgtctccaggtgtgtccccttctgccaggtgtgtccccttcctttagttcattcttccccctgctcagcctcatgctttgaaaccagtgcatttccaggttgttcttagcacgctttctctgtcctctgtgatgccctgaatcctcctctctgtcccttccacctcagaaaggttcttactcgtgttcctcggagatagaaggtagacaaaacactgttcacctttatacctcctctgaccttcatatgttctaaatcgcccttcttttacctctttatatagggtacacacagggcaatcaactgtcaaagttgatgcttatatccttcaatagctactaatagcaccttttctctaggtcagctgtgcctctccctacctatccccacttgggtgacaaagttcacacccactgtgaactttgtgggttctatcttcatgggcttctttgctatcttcatgggcttcggtagcaagagtggcgcatgtgggggccggcgagtctttgttgtcctatgcactgatggatgtttctcaaagtccttggcctctgtctattaacatctccatactactgtagtagcaacacaaaaggtcagactcttggggaaaagagaatgtgggaccattcttgagaatcatggctctacaaagaacccttcacaacagcctgctgttttaggcaatgcccataagaacagcattgcatcactttatttcaaaggtgtcaatttcactcattgcataatttcctttgggttaattttggtgagaagaaacatcccccctgttcccccaagttgccacaagtatagtagaaaattaacctacttcatcttgatttccacccgagtgttttcatataccctatgtggttgacaactttcccatgaaagagcgcacggaagaggagctacaggagttgagtaaagttatgcagcaaaagaagactgagattgagtgtcttaaggtaccaccactttaaacgtgtgtgtgtgtgtgtgtgtgagagagagagagagagagagagagagagagaccgtgtctgatgtaatttattaaaaactatgctagctagttttatgtcaacttgactcaagctagagccatcaaaaaagaaaggaacctcaattgagaaaatgctttcatacgatccagccacaaggcacttttattttgaattagtgattgataagggaaggcccaactcattgtgagtggtgctatctatgtgctggtatcctagagtcctataagaaagcaggctgagcaagccatgaaaagcaagccagtaagctgcatccttccatggcctctgcatcagctttgacctccaggttcctgtcctctttgagttcctttctgacatccttcagtgatgaacaatgtggaattttaagccaagcaaaccctttccttcctaagttgctttggtcatgatgttttacctcagcaatagaaatcctaaggcaatatccaacatgtggatttgtgctgagataaaatttaatattaagtttgcatttatatttgttgtacacttttatttctggctaatttgtatacgacatcctcatgtgatggtttttatatgcttagccctgggagtggcactattaggaggtatggccctgtgggagtaggtatgtcactgtgaatgtgggctttaagactctcattctatcttcttggaagcagtcttctcctagcagccttcagatgaaaatgtagaactctcagctcttcctgcaccatgcctgcctggatgctcccctgccccttgatgataatggactgaacctctagacctttaagccagccccaattaaatgttgtccttataagagttgccttggtcatggtgtctgttcacagcaggaaaaacctatatgacagaagttggtaccaggagtgggatattgctgtagtaggcctgaaccatgcttttatttgtaggaatgtggatttttgggggggactttggaaagcagtggaatgctttaagcggggcttaaagggctatcctagtaggaatatggaagactttgttgctgagtatgatttgaactgtgtagacctggcccaagaggtttcagtggagaagaatttcagtatgtggcctagggactgtctctgtggtattttggtatagagtgtggctgctttttgcctttgtctgaagagtcggcctgaatctaaggtaaagatatttatattaattgcattgacaaaggaagtctcacaaaagcctatggttaagtctcacaaagagcattttgagaaagcatagcaagcttagaagggaaaaatataaaatatacaaattaagtattaaaggggcactaggaagtgaaatggagctaaatcccatattctaggaaataacagataagggcaagatcccacccagctaagtttatatctagacatggtactacacacctttaatcccaggagacaaaaccaagcagatctctgagttcaaggtcaaccttggacagagcaagttctaggtgaagaaaagcttaagtccaagcatggtggaacacacctttaatcccagcattcatgaaacagagccatgcagatctctgagttcaaggtcaatctacagagcaagtttcaggacagccaaggttaggcagtgaaggagttgaaaaacaaagctagtgttaatgtaatagagcaagggggccatgttccagccccagcaagcagcagaactcagtagcttctgctatgtggctctgactttagaatcaagagtagaagagactactgggacaattgatgctgattagttggagctaagaatttgctgtgattaagacgagaccagcaccacaaaagcccatggttaagtctcacaaagagcattttgagcaagcataaggggcttgttggaagtgttttctgaaaatacaaagaagctgtgttcc

SEQ ID NO: 2 - DNA, 1676 bp, Mus Musculus
taactctgttgcccagtaaagctgggcgggaggagtccaggaggcgggagccgccgcggtctagtcgcccgcatccctggatccccggcagcctgcagacccgggaccacgacccgcgcttggagcgaggcccactcggtatccctgcggcggccgcggccgaacctctgttttgggagaggctaccagctgaacccaacacagctttgtgtggccactcgtccagatgggtgcaaggattccctagtcagaacgtccactttgtcaatgaccagaccatctgctacccttctgggaactttgtaatattcattaacctggaaaccaagaagaagactgtactccagtgcattaatgggattgtgggcgtcatggcaactaatgtgcccagtgaagtcgtggctttctctgaccgaagatttaaacctgttatctacatatacagcttcccatcgctgaccagaaaaaacaagttaaaaggtgacatcctcctggactacactctactttgcttcagttactgtggcacctacctggccagttactcgtctctcccagagtttgagctggccctctggaactgggaagccagtgccatcttgtgcaagaaatcaaatcccggcatggatgtgagccagatgtccttcaaccccatgaactggcaccaaatgtgtttatcaagttcaagtgcgatgagcgtgtggaccattgagagaagtaaccaggagcaccatttcaggataaggtctgtcaagctacccctagaagacgcgaccttcctaaacgagcccgacatgcttttccccaccactctgccaaaggatctcatttatgggcccatattgccactgtcggccattgccgggctggatggtgtgatatactccttcatcatcaaggattcaaagtaccaagtgaagacctttctcgagtttgatgggccggtgacacatctggtgttctcccccagttacaaaatgttactgattcaaacagacaagctatccttctttccctattctagtggttccctgaaaacttttcttgatgaacgaggaaggctgaaagacgatttaacccccaagtacctgtacgaggtggagcacactctgtcctctgcagtgctgggcttcacgggcagcaaaatctttggcttctgcagccaggtgccctacatctgcagctatgtaatgcccgtaaaggaacacactggtgtccttgttcttaagcctcaccaaaaagtacagagcaaacagtacggatctggaacaatctatctgtcttctcacggattatggcttatgacaatagctaaatgtggaattctctgtatccgagatatgttcagtatggaaacctttgttcgatgtcggagtcattctcaccaggggcgagggatccagaacatgaaaatgtcattggacggacagcacatcctggtgaatggaaaagatgacaacacccttgtctgcctcaaatggaagcggcttggagcaaacatagcaagtgagatctttgaacacagccgtccgctagtgctccatctgtcccagacagtggaatcggagagtgtatacttagctttatcgagagagtccacgaatgagcagcaagaagagacaactgaatcccaaaaacacctgaactcagactcatcagaagaggaagcagtcatc

SEQ ID NO: 3 - protein, 558 aa, Mus Musculus
TLLPSKAGREESRRREPPRSSRPHPWIPGSLQTRDHDPRLERGPLGIPAAAAAEPLFWERLPAEPNTALCGHSSRWVQGFPSQNVHFVNDQTICYPSGNFVIFINLETKKKTVLQCINGIVGVMATNVPSEVVAFSDRRFKPVIYIYSFPSLTRKNKLKGDILLDYTLLCFSYCGTYLASYSSLPEFELALWNWEASAILCKKSNPGMDVSQMSFNPMNWHQMCLSSSSAMSVWTIERSNQEHHFRIRSVKLPLEDATFLNEPDMLFPTTLPKDLIYGPILPLSAIAGLDGVIYSFIIKDSKYQVKTFLEFDGPVTHLVFSPSYKMLLIQTDKLSFFPYSSGSLKTFLDERGRLKDDLTPKYLYEVEHTLSSAVLGFTGSKIFGFCSQVPYICSYVMPVKEHTGVLVLKPHQKVQSKQYGSGTIYLSSHGLWLMTIAKCGILCIRDMFSMETFVRCRSHSHQGRGIQNMKMSLDGQHILVNGKDDNTLVCLKWKRLGANIASEIFEHSRPLVLHLSQTVESESVYLALSRESTNEQQEETTESQKHLNSDSSEEEAVI

SEQ ID NO: 4 - DNA, 1849 bp, Mus Musculus
taactctgttgcccagtaaagctgggcgggaggagtccaggaggcgggagccgccgcggtctagtcgcccgcatccctggatccccggcagcctgcagacccgggaccacgacccgcgcttggagcgaggcccactcggtatccctgcggcggccgcggccgaacgacagagactgcagctatggccatggaactcttccgggtctgtctggtcgtggtgacagccatcattaaccaccctctgctgttcccacgggagaatgccacgattcccgagaacgaggaagagatcatacgcaagatgcaggagcaccaggagaagctgcgcctggagcagctacgcctggaggaggaggtgtcacgtctggaggccgagaaggaggctctgcggcaggtggaggaggagcagcagcagctagaggcccacaccgcctgggacctctggaccacactctgcatggtcctcttcctgatcatcgaggtgttgcgacagaaccatcaggagggcaccttcccggagtgcctgggtggagacgaggacgagctgtcgggactagggggcacgctgctgcagggccttcccctgcccaatagggccaccctggaccacttctacgagcactgtatccggagcaccacgggggatgccacccgcacccaggagtttgtggaaggtttcgtggatgatctgctggaagccctgaggagcacctacaacgggaaaaccgacatggaattggaggacttcatcggcgtgggcagcatgtatgagaactggcaagtggagaggccactacggtgccacttgtttatacccttcatacccccagagccctacagcttccacccagagttctggtgctccagcctttcaacgcccctggaacgtcagggctatggccagatcaaggtgacgctggctgacgggaaccctctaggctgtgtctgcggcaaggctaagcttgaggaggatatgttgtgtctcctctacggcaagaatagaggggcgtggcccagcagtgccgggtgcggtgagatggagggcttgctgtgttccagagagtcctcctatctcgatgtcatgcaggtcatgaagtggtttcagatggccctcaccagagcgtggcaccgcatcgcccacaagtatgagtttgaccttgcctttggagagctggacaccccagggtctctcaaaatcaagttccgctcggggaagtccatgcctttcatcttgactcctgtgatccagtgtaatgactcagacctgtacttcatcttacaacttcccaaggagccctgtgggggaggcccagcctccagcgctcactggctcctgtcctttgctgtctatgagcgagagttcctccggatgacaggcaaggctttgccagagggtgcctgccacctgagctgtttgcagatcgcctccttcttgctctccaagcagacccgtctgacgggtcccagtgggctgagtgactaccacctaaagactgccctgctgcatctcctgctgtcccggcaggcctctgactggaaggccagcaagctggatgtacgcctgcaggacctcttctgcttcctggagaggagcctgctggagaagaaactctatcacttcttcatgggcaaccacaaggtgcctgaggctctgggtctcccagaggttgtgcgcagagccgagcctctcaatctcttccggcccttcgtcttgcagcggactctttaccggaacacagtggactccttctatgaaatgcttaagaacgccccggcgctcattagcgagtattccctccatgtcccttcagttcgtgccagcccaccaccaaaagctgtcgtctcgtag

SEQ ID NO: 5 - protein, 594 aa, Mus Musculus
SPASLDPRQPADPGPRPALGARPTRYPCGGRGRTTETAAMAMELFRVCLVVVTAIINHPLLFPRENATIPENEEEIIRKMQEHQEKLRLEQLRLEEEVSRLEAEKEALRQVEEEQQQLEAHTAWDLWTTLCMVLFLIIEVLRQNHQEGTFPECLGGDEDELSGLGGTLLQGLPLPNRATLDHFYEHCIRSTTGDATRTQEFVEGFVDDLLEALRSTYNGKTDMELEDFIGVGSMYENWQVERPLRCHLFIPFIPPEPYSFHPEFWCSSLSTPLERQGYGQIKVTLADGNPLGCVCGKAKLEEDMLCLLYGKNRGAWPSSAGCGEMEGLLCSRESSYLDVMQVMKWFQMALTRAWHRIAHKYEFDLAFGELDTPGSLKIKFRSGKSMPFILTPVIQCNDSDLYFILQLPKEPCGGGPASSAHWLLSFAVYEREFLRMTGKALPEGACHLSCLQIASFLLSKQTRLTGPSGLSDYHLKTALLHLLLSRQASDWKASKLDVRLQDLFCFLERSLLEKKLYHFFMGNHKVPEALGLPEVVRRAEPLNLFRPFVLQRTLYRNTVDSFYEMLKNAPALISEYSLHVPSVRASPPPKAVVS

SEQ ID NO: 6 - DNA, 46338 bp, Homo Sapiens
tagaacttctcaggtgcgtgctgtaacacagtaataagaacagtatttatacccagtgttcacctcttcaatagtacccagtgaagatatgaagtaaacctccaaaaaagcagaaacactgacttgcaggcctacatgtaaattcctagcctgtaatgcaaagcaattgtgccctgacagaaatcgacctctgtcatagatcagagaggtcccagaggctattttgggggtgtctgtatcatccacaatctcctctgagattattaactcccacccagaattacgtccctctctgaagccatgatgctctaggccaccctacatacctccccagggccacagctgatgggtcaaggtggagacctgacccacatgaagccagttctattattttcccttggaatttataacagggaccaagagcaagtcaatcattgctcaggtctggaactgagcatgtgaagcccaggagaggcagagaaaggcaggctgtatggagggaagaataaagcaaataaatgaggggaatccacagaccaaaaacaggaagcgaaagatgggagagggagcttcttccttggtggccgatgccctgtgggaacctggtggcaggtcccttgagagacccagcaacacctgctctcttggattctgctagatactttgtatcctcctaacaaaataaccttatttgtttaagctagatgaagtgagttttctttgtatatatcagaaataaaaaaaaaattttaaagcctgcatcaacacagatcctgtttgcacaggcattcttgtggcattgctggatttagtgtctatggaatctaaaaactacatttggggcccttaacgacatggtaaaaactgctcctgtcatcatatctaatatttttcctccagactgttgggaagatgaaaagcccacgtgttacagaaaattgttatcatttatcagccaaccatatggtcaccttagatgacagagcagagtccccactggctagtgttctccaaaactgttgggggcatattttattcctttaatcttctccttttccagactactgcagcactaacttaacagaacatttgttgagcatttgacatcagctcccaaagggtctccagacaaactcccctcgtgacacctgaggaggcaccgaagctcaggcagatttattaggaagactgaaaggtcaggcaccaggtagaagcactgagggagcagccacagcgggtaagcatttttaccaggagaaggagacagcagtgtcataactacccagtcgtcttacctgccttgaattttattggcttaaaagcagctgctctcttctcccacacagattacttttgggtatgactggttaggctagatcattcagttggtgcttcttgcccaagacaccaaggttgcagtttgatgtcctactcaggactggtaaggacgtgcacaagtcaatcggtggaccagattggttaaaaagcttaagtgggtcaagcgcgatggctcactcctgtaataccagcactttgggaggctgaggcagggagatcacttgaggtcaggagtttgagaccagcgtggccaacatggtgaaatcctgtctctactacaaatacaaaaattagccagatgtggtggtgggcccctgtaatcccagctacttgggaggctgaggcaggagaatcacttgaacccaggaggcggaggttgcagtgagccaagatcgcaccactgcactccagcctgggcgacagagtgagacttggtctcaaaaaaaaaaaaaaaaaaaagactaaatggctccatacaacctattcccactaataataaataaataaatgagtgggtaaataagtagcctgaacaatataacaagacctggtatctaaacaaaaaaaaatttttttaatgagctgggcgtggtgttgcacacctgtagtcctagttactcaggaggctgaggagggaggatcactggagcccaggagtttgaggttacagtgagctatgattatgtcactgcactccagcctaggtgacagagcaagaccctgtctcaaaaacaaacaaacaaaagtaaataagtgaatgatatggtgtggatgctttgacccctccaaatctcatgttgatacatgacttccaatgtttctacctcaggtgttcgggtcatggggggtagatccctcatgaatggcttggtgcagaggtaatgagtgagttctcactctaacagttcacatgagatccgtttgtttaaaggagtcaggcacatcctttctctcactcttgcttcctctcttgccacgtgacacaccagctcacacttcgccttccaccatggctataagcttcctgaggccctcaccagaagcagttgctagaaccatgtttcctgcacagcctgcagaaccatgagccaaaacaaacctctctcttttataaattacccagtctcagatattcctttatagcaatacaagcagatgaacacagtgaatatattttaaaaattttaaaaaccaaagcacaaaatacctttgatgatgggccaatgcttttatatctactatcccctgaaagtctctattttcaaacacctctagactttacaaatgctgatcccttttctggaaaatccaatgactccttatttgtccagttagctctttcaagtggcagctcagtgttgcctcatccaaaaaatcttacccagttaattacctctcctctgtgctgctggaaagactgagcatcttctgtcaattcactgcattatcattgtgtgttcacttctatgtctccccaccagactgggaggaccagtcttttctttaatacatctatggtgctgccccataggagacactagaagtaaaaagtttgatgaatgaatgcaagatacaattaacttataaactcacacacacagcaattactcttgggagtgattagtgactaaaggaaggtgaaaggtatcagtacacgaacatttaagattctacagtggttaaaattacttccaagtacacaccaagatcccaaacagaagtacaggtagtaaggattacaataaaatgcacttatctcatttttttcttatcctcaatgtaaataccaaagaactatgtcttttttttcttacccacaaggtgggacacacaatcagtactcaaaaaaagttgactactgaactctcataggcaacaaggataggcatctataaaatgaaatctgctatattaaaggaataagctttttgtttttgtttttttttgagacagagtctcactctgtcgcccaggctggagtgcaatggcacaatctcggatcactgtaacctcctccttgagggttcaaggcattctcctgcctcagcctcccgagtagctgggctataggcatgtgccaccatgcccggctaatttttgtatttttagtagagacagggtttgactgtgttaaccaggttggtcttaaactcctgacctcaggtgatccacccaccttggcctcccaaagtgctgggattacaggcgtgagccaccatgcctcttttctgcctgttaggtatgttgctttcttgccaatacctgctgcaagacctactggatgattttagtagaagcaaatgcctgctgagcatttactgggaacaggtgctttttgaggcaatgcaagggaggcaaaaagcctcaaacctttttaaattaagcaggacaatttaaacctctaggacagcagagaccagtctaagataccattgcattttagaatctagcaccaaggtttgcaaactttttctataaaagaccacattaagaaatattttctggtagaaaaaaaatagaagtatcctgaggacaggtaggaaaaaaagaaatattttgggcttcacgggccacatggtctctgtggcagctactcaactgtgctgttagagccccagagcagccatagaccacacataaatgaatggccatggctgagccaatataattgtatttatagaagcaggtggcactctggattgggcctgacagccatagtttgccaactcctgatttagacaatgcctggcatagattaggtgctgaaatatttgttgaatgaatggatggatgaatgaataagtgaattaaggtattcctaaggttacagcataatgatctgtgtcaaaggcaagggtaccatctttagacattaactacaaggagagcaatgaatatctactgaccagaaataagttggatggcaatcatctgactgttctttcccaagccaagtggcatatgtagatggaaaattaacatacataaaccaataacagttttcaaaacagagatgtgagttagaagagtagtttaaagaaatattttctagccaagcatagtgacccactcctgtaatcccagcactttgggaggccgaggaaggaggatcacttgagcccaggagtctgagaccagcctgggcaacatactgagaccctatctctgcaaaaaataggaaaattagccaggtatggtggcacacacttgtagtcccagctactcagagggctgaggcaggagaattgattgaccctgggaggttgaggctgcagtgaagccgaccgtcactcccgcctgagcaacaaagtgagactctagctcaaattaaataaataaataagcattttcttcaaactttggatcttgactcatttaataagttgtggcctgcatttttttcaaaagaggttaacataggaagagtaaaaagaaaagggaacataacagtttgtatcacattcagtaaacataacaattgtttttaaggaaactgtctttcaattataatgcacttgtatgtgtgagtatactgggttgtgaaataaaatgtattttcaaaaatctttgaaaaacgtaggttctgtagaatctaatgattcctaccacgtgagttgatatgaggattaaatgagttggtaggtataaaatgcttgagtaatacctagcagatggcacaagttttagctattattattcagtcactaaccagcaatgtgaccttgagtatgtgacctaacttctctggacttaatttttgtcagtaaataatctctaaaggccctgtgggctccgacattcccagaggagggacgtgaccagcactgaccttgaggaatgaaatagccaaatgcaaatcattcgtcttgttcaactgacacctctgaggtctcagcaaagcagcctgttctgtgaaacatcctctaaactaacttgctattatcttgtgaaattccatgtgaagttgaaatcagggtagtgggaaattgaccaaatcaagggaagtgcccttttttcccctccatcagatgcttaatgactagtataggcttcctgtctctcccattgtcatgcattttattccatatactggaataaccacagatggggtgaacaggaaatctgtccctgtgtatttaatctttaaaaaatttccagtgctcctaaccgtgagatgtggtgtgaagctcccctgcagttggttcagactttgtcacaagtcacttttttttttttttttttttttttgatacagggtctcactccctcacccaggctggaatgcagtggcacgatctcgggtcgctgcaacctccacctcccaggttcaagtgattctcgtgcctcagcctccagagtagctggaattacaggcacgcaccaccacacctggctaatttttgtatttttttttttttttttttttgtatagacggggcttcgccatattggccaggttggtctaaaactgaactcatgtgatctgcccaccttggcctcccaaagtgctgggattacggacaggagccacagcacccagctgacaagtcacctttcactatggaatgtgaagcctcatctagcacttaaatgatcatgaagaacattccatctactttcacacacacatgtatacacataaacaagccaatagaaaactgggggatgttgtaacagagtcttcacacataaacacataaaggtggccaataacaatgttctgttcagcctcactcataatttaaaaactgcaaatcaaaacattgagattaggggtttttttcacctataaaagaagcaaactaaattaaagttataatagaaaatagccaatgttggcaacaatgtagagaaaaaggcaatcatcatactatgggaaatagttcaaattggtgagatctctttggagggcaattttgtaatatataccaaaatagtaaatgcacatatcctttgatcagccctgaaactatcaaggcactgacccaaaatagccacctatatacaagcttctgatgtgagaaaaacaaatccttatttgtttaagccttttatagtcttagacactataaaaattacagtctggtattccgttacttgcagccaaacatattcctaatttataatttttaaaaagaataggggtgaaggaggacattcatatcttgcactgactttagaagatttctagtatttccccattaagcataacactggtttgggggctgaactttaccctttgtttttaccatgttacagagggtttgtttatatgtcgatgccaaattttatctgatggcttttcagcatatatggtgatgatctttccatttttctcttttgatctattaatgatgtaatattctttggtgtgctgctggaattctatttgttaatatattattttaaatttctgaaataatttatatatttataaacaataatatattacttttctttccccttttcaatgagctatttttattagatttttgactgatatattaccaactgcctaaataaaaaagaatttcaatcattgaggttttttatatgtaaatgactaaactttttatttctacatattatagctgtactttttcaaatttacctgttcttttttcatagtcctatgtcctatcattttatctctgtattttgaccataactatttgatactctttttcaaattgttctattgtctcagatacttaaggggctaattttcctgtttattacatttaccagttcacaccctcatgtggttcatttcctagtctggtttttaattttttattataagcttaatgattattaataattcttaattttaagaaattaaaataatataaagaatattttaatttcttatcatgaaacattttaatttcttattgtaacttcaatgggagttgtttattctgctagggaccaggataaacaaccgaattttacgtttgcttctgacagggccaaggggattcaccactttgaaacaggttttttgtgttttttcttgacattaggattccctcagcacgtgggtagtataaattgggagctcacacctatgcatagtataggcaggctaggggttttcatttctatagaagacattttaaaattcatccagggccgggataaaccacaagtttccttcccgcgaccctgagccaatggggagagggcttttttctatcctcctcttactaaagggcagcctttccagggttccagccttaggcagagatctcaagtccagatccctgtctttatagaactcaaggcctgaatagatactaaccccaatccctgagtgggtactcacccctggtccttagtcatttgggcttatattcatgtcatgcttttgagttcccttgacctatctcacacctggagaccccctttcttcccttccgttgttgatatattttattcagcctttcactgttcgaagcaggagttccctgacttcttgactcctcaagttcccataacttgaatctttgtactttcctatcttttaaaaaacatttctcgagttagcacagtgttctgtagaaacgacaggaggggtgtccaatccagacatgagggttccaggaagacttcctgaaggagtaactgcctgttctgagacaggaagactgagcatacaattagtcgggcaaaataacatgcatgtgcactggggtgacagtttggaggaggaggtggggtggctgtggcaggcagaaagtagagtacatatgaatatccaaggggagagaaaaagcatatcatgcaaacagcatatcaaagagcatatcacgttctgggaagcacaggttccaagaactgcaaggagttttgtgtgggacacagagtgagatatgaggctggtgagataagcagaggccagttcatgaacgacttacaagccaggtagaagggtggaccttagaacagacaggaaccaatcagaacacagaaggtgaaatcatcaggttaaaagcaaaacaaatataataaatattccttatataaatatacatggctggttagaaattgctgaaacaactttgcagacgggatgacaatcccagagggcattcaagcactaaccttggcattccagcacaacgctgaactcttagcccaaggatgacaaagctcagcccagcgctcttacttcacagaaatttcccccacctgctttgcggagggtgtgagtaacccaccggaccaacttctagacattttggaaatacagctctttcaagaccgtttccccagatcgcccccaccacctccaacacacatactggcccccaaaattctgccataacctcttacgtaaggaaagaatttgagcagcagtagaaacttgaaaacaaaagtaccctgggccaagggccagggagtctatttttagaacattttctcattgcctgtttatctttcagactcagccaaaaagtcttccaggcgagtgttaaaggaaaagacgaaaaaaaggtgatctaagaccaaatagcagtagcaatggtgatcattttggacactgtgttccaatttccccaatgtgccttcactggcatttggtgcccccaaagccgcttaatggagaattcattcaaaccctgctctgccttttgtactgatggtaggatttgggcaggtcaaagggaagacaatagaagttatggatttcataaactattaagctcgaccagaacgctgctgctgctcctccaggcctcagttctctcgtttctaacataggggtagtaacacttgatctaccgtcacaacagtaaccagaaactaccgcgcctgtcccgtacagtatccggtcactgttctcctttgtgcccggttaatcccggagaaaagcaaccatgcatttgattatcataaaagtcgggcgcggtggctcacgcctgtaatcccaggcgcttcggaaggccgagaagggagttcgagaccagcctgaccaacatggagaaacaccttctctactaaaaatacaaaattagccgggcgtggtggcacatgcctgtaatcccagctactcgggaggctgaggcaggagaatcgctcgaacccgggaggcggaggttgcggtgagccgagatagcgccaccattgcactccagcctgggcaacaagagcgaaactccttctcaaaaaaaaaaaaaaacggtagtaagctattttaatcctttcaagctgcaaaagagaaaaaggctggcgttttgtctagagttatattttcctccaagagactaaataggtggccccaggaattccgccacttgtaaaacgcgccgcagaaaactctccccgactggtaaggacttaaccccttccgctccgcggcttaggacgacttttaagggcgtcctccccgcgcccctgtccactcgctccagtttactccactggcctgattccgtctctcccagtcactctccagttctgccgtgccggggaagtttctgggggctcactgggaaggtcttcccggcggatcctgggcccaaccaccgaaacccacacggtcctccttaaggagcttccggggccgcgggtagaggcgggtgttttgttcttataaggaggaaaaagtttttgtgacatccaggaaatgagtaactctgaagttcagtagagccggccgctgcaggccagaaggtgggagccagcgggggcatcgccgcccgcgcccctctaagtgccgggccgcaagctccaccgcagccgcctgcaagcagcggcgcctcggccctcgacctgcgcgcaaagcctgtgctggagccgtcctcccgcggcggggaccgggaccggggacccaagccaatcgtaagtcccagggcagcctagtgtgctgaaggaagaagggcgcgatggagagcgcgagctcggaggagctgtgtcggagatggctgccgacagagggggcgcaggagggtgtggggagcgcgggcgcctgctcctcccgggtgggggctgactttggagacccccttcccttaaagcgcgcgtgcccaggcgggcgtattgtctcctcgcggtcccgcatcctgttcccgccgcgtcgggggatgcgtcccgggcgctcgctccagccagggctgcgggcagctcctcctcgaggcgcgcgcagcctcggagcccagagcgggaccacatttttgttcctagtggccaggtgacccgttacttctcacatctgagcagagcgctaccgaagaaagaaaagccggttcgccctgctcatttgctgcccccttttccccttccccttccctcccttcctgtaagggaggaataggcgtgaagtttttttttctcggttcatggtagtgaagttatggggctgcttcaggccggataaaatccccgccgcttcctctttcgggactattagtgggccagacctcacgctgtgcagacttgctcttgggctgcaaataactctctgccccttcacccctaaccccaccctcaaccccatccctgtgactttgccattctggccgcctggtgaagactcccggggcgggactccccatccaaaacgctttctcttaaaaaaagaaaaagaaaaagaaaaaaaaagccaccgaccaggaaggtaaaatattttacggaaccaggcaggggcctcattttgccttttgcccctctgctggtatgagaaaagcaccctttcacaactagtagagtaccagatactggtctcatttcacaaacagtagagtaccagatattggtcgcaatctggactctggtcttttggatctaaatcggggtcgcggtctattttcttgttctttttttggatatgacccagtgctcttgccttttacaaaccgagtctatctgactgccagctaaagttcatctgtggttggtgcagttttaggcccaggtgagccctgaaaatagagtatcagaaaagtggattactgtctttcctccttacgaaaacagaataggctgtgtttttgagtcctccctccagccctcgtgcctaagtggctttcattgtttgctaattccctgtatgttgcggctgctctgggccattctgccttcggattttctccacttgtgggtaaccatgaagtagttatactgactctctgctctccctgggtgcattcttctcatgctcagtaaatctacattttacgtaagataaagtaagcatgtgaaattatagctatctgtttggcaacaaaaggaatgcagttttgttttcggttttgttttttgcatgactgagttcccaagcttaacttttccctttggcatcctgagcttggggtcctaaggttgtattttcctttcacagctatcagcagagacaggtagccatcaacagttaggaaagagtctgggctgggtggctgcctgtcttcccagagctttgggaggctgaggtgggaggattgcttgaacccaggagttccaggcttagagctgggatcacttggttgggatcacttggttggagctaggatcgtgccactgcactccatccgggtgacagagttcagaccctgtctttaacctaccccccaatgccccgctgccccccccccccaaaaaaaaataactgggcaggagaaggtgctttcagagtccaagactcaggttccatgtttcgagttgagagtctgccccagtagggttgaggtggcacggcagcctgtggggctttaatggagaatctgcttggaaggggtgggtgctccaagtgttctgggagctgagaagcaggactttattatggatgacaccaggccatcctggacccttctctcatccagtcttgctggggaggggtacagagccaggaggatgctgagaactgttcatgataacctccagggctgctgctagcctattcagtccttcgcatgaattagaataaggtgctctgtcttggcaagaggatggggcttgatgcctcttagaaatactggccttacttgagtggacatagccaagccatatagctggataagtggcatgtgagctggatttatcctcacccctcagccaggtgccttaagcagtacactgcctggtccaccattcacacagcagccctgataaacaaccactattgagggcttaacattcgccaggctttttttttttttccccaaaagtacttagcctgtattaactcatttaatcctcacagtagccgtatgagttaggtattgttaactccattttacagatgaggaaactgaggcacagggatgttaagtgttccagagcctggaaggtgagtcttaatcactgggcattcatagaccaagaagcaacttaagcttaaaaagctagtttaattgggaaccctcgtgggaaagggggaagaacagttgcctttttctttctctgtcaaaggaggaaatacccattctcagtccaggtggaggaaggaggggaaattcatctggcaggaggcagaggaggaaagaaaagaggcaagccgggccttgatggctgatggggagcctggcccaagaatcaagtgactttccttaatctctgggcggtgtgaggtggcagatccagtttggggcctggcatgagggtgatgagtaagtgcccccaggtgtggctcagagggaaacggcggtggctgcacgcagggtcctgacctaggcagagagcgagtggaaggaggtgagacaactgtcctgaccttccaaacccctaatccccatctgtggtctcttgcttccttgttgaagtcccattcacccacaaatgcccttctcaagttcgtccaagaacccttcctgaaactccatttcacagttccatatacatgatctcttagtttccacaccgtacagctgagcgcttaattagctggaaccgagcatttcactatgtactgtcgataggcactttaaacaaaataggcttctcatcagtgaggaagtcaagatgcctcctgggaggggccagctggtgcccagcagattgctcagagggtggtgtttacctggatcacgtcacctgtcccagggcatggctcttagctgtgcccgctcagaaacccaatttccataattttcagagtggtttggactcaagctactgattcaccctgagaaagctcccagaagagggtgtacgaatcagaatgctggtttattaatttgcaaggagacttcgcaaacatcacacagactgaatgtcgtctcttccctgcgtcctagacaagccatatgggaaaccaaagaccagaaggtggactgcgcttatcaaagctggagtcagaaccaggcaggagcagcatggggtgagggtgggggacagtgatgtccaatagtgcagggctttgtctacctctgcggccctctcaccagcagaaagatagctgccaggtagactggatactcaggtcagcctggctatgggcatctccttggccagtgcctcaagggcagtatttccctgagaaatcctggtagcatttctccctttcctctctcataatgtagtaattttttattttatttacctatttgtttagtgctttgcaagcattagctcccagagacatagatttgcatttgcgtaaattcgataactactgtacaatctcagagttgtagggccaggccatgagagtaagtgctatatgcaaatcaagaggatgatccggtaacctggatggatcaatagaaagccaagcatagagcaaagacacgtggtccccaatcagcatggaggctgggccaaggctggccagttgttgcatcccctgcgtaggccagggggtgaagcattcctaaagcagtgcctgcttcggctgcctcaggcagcctgccctgctcagctggcctctttagatttaaagggctctttctggtctctgtccaggcccttcatggctcatctttaatgagccacatctccaggtgcccagagccaaggcggtgtgactgcacgggctttgaagtggggcagacttgagttgagtcctggctccaccactcggtggttgggcgttctcagtagttgggcaggtgccttgattcttcaagtctcggtaacatcatcagtaaaatggggatgaccctcagggctgtggggagggttgacccagacgatgcacagaaggctctgagcaccgtgcctggcgcagactggaaacctggccagtgtgcgctcttcaggacagcagaggtcggttggaggtctgcattctctgccgacttgggccccaacttccccatcaggtcactgctccctcctctgaggtctggacaaaggacaaggctgtagggacctagactgtcctagacggggaggacatctatcctcagtggtctttccagcagtttgtttggagctgctcatcctgatcttttggctgactctggcagagggaaagtcagatttgaggcctgagctctaacaggcatccagagaggaaggaagggtaaggagctcttctgggcgaggaaaggggtcatttgggagtgccccagaggcctgtagacccctcctcaacagtttaggacctgtgacgtttccccacagagagcacatcccccctctatctgttaggcccaccccgtgacatcagtgaaacggaagcaccctgcaggtgacatcactgttgctcagggcaacgcctccaccctaaggcggacggggaggtgaaaaatcggcctcaagtgtgagacgcatgttgaagggaagggacatagaaggtgtaacgttcacaggtgtgtttctcagaggctggggagaggatgggcccagttagcggcagggtgaatagaagagggaggtgctgcagtctcagatctgggctgtgtcagttggtggtgggtctttaggccttgggtcagagagcgcagtgctgacagctgcagtctccttcagttctctgaacgggactccttaggggtcctcctgcagcctggatctgtaaggagggttaggggaagggcaggctggagcagtgatggggccatcagaaaagtgactttccattcttcagcctccccacaaaagagagtgagaaataggatgctcacatccttattacgggggcttcattgatcgagcagccattgtgtatctgttatgcatggcctgtgccagggattcagcggcctcgtggagcgttatgatgaaatgcacatggagaggaagagtgtatggaatccactgccccaagaggcaggaccaactggagataggaatcccgtctcacagttcacctcactcaacttagcattccctgtggaattctagatgggttaaactaaattcatggaatgctttcagttgggtgtgcttgagatacacttgctaatttgggagtggagtcagagggggcagccatggatgtccatcttgtccctgggatggcactgtttacaaggctgaggtcactcagcagttctgatgctcttaacttggtgacctgtgtttccgccacatcttatcaggtgatgcctgctgcttctcctaagcaagggctgccaaatgtcagcacaggagacgaaagaggcaggaaagggaggactccctgccctgaagaaagatgaaaaactagatgatatagtaggtgtctctgtagaggtttcaggaatcgccttgtccttccacttgaaggcacctgattaaagtttttgttttgtgcaactaggcataacttcaggtgcttttctgatgtccagcatttcggtggctaaagtcattgccctaattcttgtatgcacctagctttttcaggtttataaataaaaattagagtatcattaatctgcagaatccaccgttatggatatgacattgttcatataagtagaatggccttattaaaaaaaaatagtggcttcatttactgagcaaagccccattctaggggtttacacatatttatttctcctcctcacaatggcccttcaaggtgggtgttatcctagttttacaggtgaaagaacagactcagagggacttgccccaaacggacaacaacagagaagagattcgaatttagatttgctctctcccagggccttggactctttctgccacctcaggcgtctgtctggacactgtagcccagaacacatacagatggcataaagaatcccacaaagttttaagtgtcaatactgagaaaacagcaagcagaccaccaactccaggcctgagacttctggtcccttcctgctgtctcactctgatattagcagacctagtgagctttggagactccttctgccaagagattctgtgagtgtggcctgagctatctgagggtgaaaggaaggaaaggctttcccttccagcactgtttgcttttctgtttaataggcacagtaacaaccagttcctgataatattcagagcactttgcagtcctctgctggaagtccctaggaaaaatacaaagccccgcaattatcaaatgactcacttccaggtgcataacacagtgggacactcactgcctgggaagaggggctcagcttggaagcaaccctgggctgctactgctttctctcccttctaggtcatttccctgaagctgatgcaggagtccccccaactctcgccccctcctcctgtatcaaagcagcagggaaggtgttgtcattattttggccctgcccgctggtgcaaaaccatgtgctcataacatactgttctcatgggagccggcttcaatagcctcttagcagcagccgggggacccgcctgaagtttacgaacgcgtcctttgtttgctgagactttgttccaaagttcccaaggaggcaggggtgcagcatgcctgggctggagggtaggagagcaggggctgcctgggtcctacccctgtgtgctgccccaaaatgtccctaatgtacccatgccgcttcctgacatttcaccccaacacatgcctacctgccagtgtcaagagagccctcactcccttttttgcagagaaggctttccattccttttatctcaaatagcccaggccacactcacagaatcttggtagaaggagtctcataagttcattaggttttactccctgcttcatgcccacatttcatctagattgtcacctacccttccctaaacagtccgggtgaggaaagtccataggtacatgtctaatgtttcacagataccaggtcactgagcagcacagctcgtggcttcatgggaagagtataggcttgaaagtcagataggtttggattcagatcctggctctatgatgttggtgagtggcctcacctctgtgcctcagttgccttatctgtaaaatggagataagtgcctgcctcagaggtttgatgtgagaatgatacatgtaaagctttattgtgcaatgcttaagcctcaataaatgggatgcagtggttgtaattcattaaaccctcccatggtgtgtcagggccctgaggcttgtccagttttttcctgaaagaagaattacttctctgctccttctcttactctgtaatcctctgtttatttctacaagaagcttgagcaagaagggaggtgtccacggcaaggcagctgagggtcagaaaacgtgtcagggttcattcctgggccattttctaaacgttggcagtgagtctgcctgcagttacatgaaggccagtccagaccaaacggggctgcaaccgtctctgtctccagggctacgtctggaagggattttgctggaagggattttccaaggcacttacactgttagcactttgtttttctgactgcagtgcccctcccaggaagaaagaatgtagaagttactttatccagagctttccacttcactccaggaatttcaaattcctgctcctgggagtaaaggcagtgaggttcttttcccaatcctaactccattcatgtattcagcaagcattcattatagcaactaccctcttccaaagctgggtactcagaacctaatggaagagctgtcagtgtcaatgatgccagattggagggagtaagggagggtgctgctgaccttcctaggtctccaaacttcctcctcttcctctgtgtcagcccctggggcctttagaagaagacaaggaggtggaggagacaacttagtcatactccccaggcttctggaggagctgcagggatgttgttcacccacttcttcccagaggactccttaacatgcaaccatgacgatttaacaaatcaaaaaggagacatgaccgcagcaccagtaccagtgccaacagcagtatcatttaccaagcactgccgagtgactgtgagatggtccacaaggccataaattggacactattgccatagcaagttgtagagccaagattcaaacccaggccttctgattccagagtttgactccttagcaatggttctctaagcctctgcaaactgttaagctcttcttagctgatgagctttgggctgtttctttctcggtgacagtaggagtggaaatgagcctgtgtgaacttgacactatcagtggctgcttgctgcccacctcagtctgactgacgcacatatgagtcatgggtccatgcattcagcaggcattatttggacacctactgggtgccagcacagcctcggtggagcacccgcatcacaccttattgctccgtccctgtgactagaaaatgatgtcatagtagggttgttttgtgcaatccgtagagagtgtgactctgagtagtcataggtacttctgggagcaattttgctaactgttcctagccttaccatgtgggccctctgctctccagagaggaggaggactggtttgctctgactaactggtgtgggagggctggcagaggcccggctctattgttcagcccagatccttgcagcagagcacaagcaaagacgctcttaattttttttacagctgggctggcctcccctttgtctttgtgtctgttactgttcccctttattgagatgaaaggggtttttagatctttgcagggagagtgtgtgtgtgcgtgcatgtgtgtatgtgtgtgtgtgtgtgtgtgtgtgcatgcgtgcaggaggcccacagcgcttctcttcctctcccctccccgctctccccagcccagctggggcccaggctttgtgtcaggtaccgcctaagccgcagggggactcgggtagaagaacagtctgggatttctttcactgtgtggggcctagaatctcaggaagccaggacgtgggtaagagaccagtggggtggggaggctgaggtggggaacaagcctttccgaggtcgtggacaaggccttggggggttcatcctcccccatctcctagaggcagagtgtctttctaagctgggctctctttgttcccatccaggggtcaaacagaaggtggctgctgggtgctggccctttatttaattccatccatcctagtttctcagtgaaagggggaaagtggaagggggcggggagtggccaagggagggctttgttccctccttgttttcctttgtgtttactcccggttctgttccagtcccttcccctttccattgagtcagtgtgtctgctattgtgcagagcctgcgtctaagcgtgcagcctcccctccctgtcccactgagaaagtgtggttttgcctgaacgtttgtggctctgcttggaggcagggggtgtgtagatcatggggtggagagagagaaaggggacgactcttgggaactctggcatgtcctgccccaaggtgggtattcatgctctctccaaaccagcacccttgtgggtgagatgcggccacagggctaggggaaattcggaggaatacgagcccagaccaagccaatgtaggacaacgggaagtggtgagggcgcattgctgtcactgtgattcacgcatagaaaccggagatgggaatcctggaggctgagggagaccttcccctgcaggctggctgtgggagaggcatccttcctgcaagtggtgggcatttgtggggaactgtcttgtgaaagtggtgcctccagtgcatggtgtgagctgtgggcccccaggatagtgtgtgtccttagcacggagcgcaggtctatgccagttgctctggggaatgcaaagacaaacaggaccctgcccttgccctggaggagctcacagtgaggaaggtgatggggcaagacaaagacagaggcagctgtcgggcacaccagggcgacacggggcctggagccaggctgttgtgtgaccttgagcacattgccccacctctcagcaccttgggctcctgccagggacatgaggctgatggccccctcccccggggttgctgcgtgggttaaatgcaataattcaaggatagagacacatgggaccagcctcagttgggtgcctgctgtgtgccggtgcatctacagagccacctgacctacatgaggtacctggtgcactcagtggggcctaattcatatgtccctctccctcccctgttctcctatcccttggaagaaagagggatttgtcttgggatcctggaaggctccttggaggtggagtctgagatgggcttgctgtgaggtcagttgggtagggttttggccagcagaggggtgaagcatggatgtttccaggaatggtggggaggtgcaggagctatctgggggacaggagatgatctgaagtggccgggccaggcagagagggaaccaagaggtcctctgaggctggttgggccaggccttgaacattcttaaagcgctgacttgtgtcccatggaaacaagactcccttgaaatggggaggggagacgtgcagggttggggagctaactgggggtttggagtgttagggagagctcagatgagctgaccccaaaggcctacgctggccagcacacgagagagattccatctcacgtggaatccccaggcttcggtgcagagcaaaggccaggtcagaggtggctggggagactggagataccccaacaagaggaaggtcagcgaggggagctggctgggagagaggagggtgcattgcgctttgagactgcagtagtctcctggggtggccataacaagttgccacacaccaggagggcttaagacagtgggcatttattttcacagttctggagaccaggatcaaggtatcagggccacactccctccagatactctagaggagagtccctctttgcctcttccagctcctgttgtctcagatgatgctcagctgtggcagcgtcactcccatcctggcctccgtctcccctcacctctcctctgtctctctcttttgtgtcacttcataaggatacttgtcattggatttaaggcccacccgggtaatccaggatgatctcatctcaagttctttaatttaatcacatctgcaaagacccttttaggtcccattcataggggctggggattagcgcgaggacgtatattttgagggctgccattcaacccacacagttgaatggatctgagatgccctggagggaacgcgtgggagaaaaggaggtgtgggccagagctcaggggttgcaggggagccccctccttgtctctgctactgttttactccttgtagtctcttctcactgtcctctccacaacccagccatagagatcaggcgtttgtctgtctgtcccaagatgctgtgatttctatgatgtcctgctggaggaggcaggcagagtggctggacggagggacactctgtccttcctgggagaggatggcttccctgccttctccatctgctcgccgagggacgtgcatcagccggcggaggagcgggaacaggaaggatgtggctcacccacccagagccagcagagtccagccctctgtccttcctgtgcctctgctggctggcagaccacccccatgacccagtcctgagaacagagttggcattctggtgacttcttgaaaccgctccctctcccgagagtgggccttgagagcacttaatgctttggacgggtgtgagcagcacctcctgtgagtccggccagagtgtccacatgcagacaacagaggctcgctggagcaaaaaaaggcagcttctgccccgcgtgtacttccccaccggctcggtggtagggccacctcaggtgggcactggggtggagctctcccctctctgctgtctgtcctgctgccccacctcaccagagtccagactgacccctgggtgcttctgagcccagcatcccactcagtcagtctgggctctcccctgggttagggagggacagttggggctcctggggcccacaggccttactctaataccaagcgcttcttagcgcagcaccattaggcctttttgcttaggcgagcctctgctgtccgcgtgtgcacacgctggctggactcggggtgcccggttccacccactcgaagcattaagtgtcctcaaggcccattctaggaagagggagggacttaaaaaaagtcaccaggatgccaacccaacaaagcctcttctctcttttcttctagtccttgcagaggccatggggaaggaagaaaatctgctctggcatttacactaagttcctacaagggctggcacagagtcagccctcataagtgctggttaggattattccgaatgtggctgctggggccaacgaggagacacgggagtaatcaggcctaggtttggggagaaaggtggagccagtatttcagggagtcatggactcagaggaaatagtgggtttgctgagtagttgctgatggggtaggagtaaggagagtcctgggttaggggttaccttgaggaacgcttcatggggggttgcagaccagagcccacaggctctgggtggccactaacatattttatttcattttcttttcttttcaagacgaggtctcactgtatcacccaagttggagtgcagtggcgccatttcagctcactgtgacctccgcctcccgggctcaagcaatcctcacacctaagcctcctgagtagctgggaccacaggcatgtgccaccacgcccagctagtttttttatatttttggtagagacggggcttcgccatgttgccaaggctggtctcgaactcctgagctcaggcgatccatctgcctcagccttccaaagtgctgggaattataggtgtgagccactgcacccagtgttgctcacatggtttttaaggaatttttgaaatagcagctaacatttaaaaatggggggattttgacaaagtccagattagtggcttttctttgggaaaaaaaagatcttgtcattctgggtgcacagaatgtgtggcgtggggactcgccccttcagacgaagcatgtgccatccagtcgaccagtgtcccctcctctcagctgtccactgcagccccgctcattttccctgcgggctggccctcccagacacttgattttacaacccgggtcctcgagacaggtgtctggagagaggaagggaaggagcccagtggccacagggtggcaggtctgggggaggtgggttggccaacatgatggtcctgcccagtgggagagggggcagatgactggacggggtcagggctgcaaggacgccgagaagaaaaggaagtgcggcaagcccagagccgcaaacgcaccctttccacctactttctcaatgatctttttgttggtcctcttccttcctctttcctcacttcctttctttgcctgtccctccctcccctttcagggcccagcctccggccccagtctgctcacctgcccctctatattccctctcctgtccccatttggagtgcaagtgaagagggacccagccagagatgccctggtgggagcagctctgagaccttgcacttgctggagcaaagcccttctcctgtcccactgtcctggaaggatgggagccaatcaggctgagcagtgacacattcagagccattgttactgagccatttgtgctgtgtcctctgtcctgagttaggcaacaaggagggagttggtggagacatgtcactccccagctctatctgccaccagccacctcctcccaatgtgcaataagtcaactcctacttacatgttgggagcctgcagtgtgcccagccccgtgcgtggtaccctgggggctgcaggagaacattcagcttcttgaccatgctggaactgtaggtaggaaggcagggaccggtgggtgacacagtaaagagcaggaaggtggcctgacctgcaggagttccaggaagggtgagataggccagatccaggggcaggtgcctggagaagggccctgagctggccttgtgctatgggaagctggtgtcactgcagcatggggcgtgagccctgctagagagaagcatggaattgagggtgagacaagtaggctgggccatgggaggagggtttcacgatggctcagaccgcccgcccatgagttccaaactctaaaaccaagactcagggtagaactcatgctcctttctcaaagtcctgtttttctaaggcctgggaagctcgggagacagccaacctggataattttggtggtcaccactgacaatgatgctgcagaggtacccccaggcaggggaagaggcaggacccactcagttttccatcagtcccttgaggggttggaaggagaccagagggaggggcagactcagcctaggtgctgctcacattcagccatgcactgcagactcaggaatcctagaggccacccagtgaccttcccagaacatcagtcttcttcatctgtaagagagttttaatgcaactacctaaatgaggttgtgacaattaaatgacaaaacatatgcagagtacttagcatcctgcctagtatggggtacctgcttcctaaatggctggtcatgtaaacatcttcacctttcaccacccttcccctgttctgtgctggaatcactgccaggtgctccctgggagggtccacgggatgatacccagcctgcctcttctactccacccaccctccaggcctagcatgtcttctcttgaggcctcggtttctacctctgtaaaataaagaaacctaaattcaactctatattctgactttcttaaatatttggcttgatttccccccaacaactgtgtacctcatcagctggggctgagaaactgcagcacaaggccaggatacagaaggagttcagcccaaactcatggcagtttgggcctcccttggctccttctttcttggaggacccagaacctagtgaaagggacccaagtcacccccaaggcctcggctaaaagtgccctcccctgccctcagccagtcctttattccatttcgtaaaggaaacctatcagctactccttttggctctgaacgtgacgccagggccaggccttcttttgctgttgtaattagcagagctaattgcatctgtcaggctgtgtgctgggcaagcccttggcaatttccaggatgtgggctgctgtgacactgcaggagccccaccctcctacccagaggacgcctggtttgggaagggatggttctcagacataagcgggcattagaatgacctagagggcttgttgagacacagatactgggcccagccctggcatttctgatcagcgggtttcaggttgcctgtgaaaatttgcatttgtaacaagttgccaggtggcactgttgctgctaagcacgttgagaaccactgtcccagagggaataccaggtggccaagaaatgggtcctgggcacccctgctgcttaaggctgtggtcagtcaaccctcagtgggagtagatgggcagtggggcaaaagcggtgtgatgaacaggttgtggggccggacacatgctcctactgttcctggttggttgtagtaattctgtctggaaggagaggaggaggtgaaggtggagccaaggagttgcacactgacatctccccaacaggtgagggcagggagagctccagacagggagaggccttcagagaacaggaaggaagctccctccctcctctgcattttgcagcctgtagctcacgtgccttttatgccccacatctcattctgtctggggactccatacgtagtggctgtctaccttcccgcgtggattgtaatgcttttgctaccaggggtcaggccatactcatcactgcaggccctgaagcatccatcatgttcctcgagctcagtatgtgctccgtacatgtagcacagtggaaaaacttgagctttgctggcaaagacagacagaatgagcttgaatctcagcccagctatggcttttctagtcctgtggctagaaaatgacttagcctcttggactttggttaacccatctgcaaaacagggatggcacccacctcttagaaagttacagtggtcaaaaaaaaaaaaaaaaaagaaaagaaaagaaacttacagtggttagtgtgtgcagtgcccagcacatcctagtgagggctcgagaaatgggagagctatgggtgttaggcaatgctttgtggtgtttattggattaagctatggtggggagtgctgcaggctctgggggacccaggagtgagggaccccagtgaaggaaggaagccttggatttctcccagggtcttggcttccggccagcctcacagtaaaggtctgaataaaccactggtcccagccagccacctgcagccctctgtccgggccacccagaagcttccatcttccctcagcccctgttgccccgtgactccagcgttgccaggctaagtttagctgtgaactgcatgggccgcccctctctgtggacaagggcagaggtggagaggaattcagcaggcttcctggcaagcagacagaaaaaagcccgccaagtgacccaggtttattctcaaagccaaacccaccagctgatgtctcagaccacaggtgcgggagagcctggtagaggtgagaactttgggccaaggcagaggtggacatccttggaattgggagtaggggactctttggggaggcatgtgctggtatgtgcaagaacatgcacacatatacacatatccatggtttgtgagaggctcctcactacccgtcctgtctcagaatgtcagaatgccctgtttccttcccttttgtggacaagtcaactctatacaatatttgaagggatttattctgaacccatctgaatgaccaaggcctgaggcacagtcccaagagatcctgaaaatatgtgccccagacagttgggttacagcttgatgttacacattttagggggacagaagttacaggcaggccaggtgctcacacctgtaatcccagcacttgtgatcccaggcagatcacttgaggtcaggagttcgagaccagcctggccaacatggtgaaaacctgtctctactagaaatataaaaattagccgggcatggtggggcatgcctgtagtcccagctactcaggaggctgaggcaggagaattgcttgaacctgggaggcagaggttgcagtaagctgagatccctccactgcactctagcccaggcgacagagtgagacttagtctcaaaaaaaaaaaaaaaaaaaattacaggcagacctccatcaatgcatgtgtaaggaatatgttagtttggtgtggaaagatgggacaacttgaagtgagggcaaggagtggcttcctggtcataggtggattcaaagattttctgactggcaattggttgaacgagttaagttattatctaaagacctggaatcagtagaaaggagtgtctaggataaggggtatggagaccatggttcttactatgtagctgaagtcccaggaagcgagtttcagagacaggagatggtaagtgtctgtcaaacctaaaaaggtgccagacccttagttcatctctcctggatcaggaagaggcctggaaagggaaggaaattctgtacagaatgtagatcagactcttagttcatctctcctggatcaggagagacctggaaagggaaggagattctgtacagaatgtagattttcctgacaataggcagctttgcagggccatttcaaaatatgtcaaagaaatatattttggggtaaaatactttgatttctttcagggcctgctatctcatatgatgctatattgggttgaaattcggtatcttattgctacagagtctgttttgtcactcctaggatctctgttttaacgttaatgctgttcagttgtgcctgaattccagagggaggagggtataatggggtttgtcggctcctccttcccatcatggcatgaactggtttttaaggtttattttggaatcctcttggcctgcaggacattcttctgacccctggggtccccagggcagtgtttcctgtgactgggtttgggaaggggaagtaccagaggcttcaaactgaaccccatctggtgggccctgagcgaccacagccctattatctgcctcggcctgtcctatcccatagggtgctgcagacagagccagcctgtgcagagtttaacagggagccaaatgacagctgggatccgatccggggaagcggggagatggattacgtgagaaagtgagtcagagggaacccctgacctgcaggaggatcccaggctctgaagccttctcccctttgctgggggccagggtggactcaggggtgtgccaaggaggagaaatagcagtggaacatcttgtgctttcagagcactttcgagcgtgtgtttactccccatgcctggggctcaggcagggctgctgtgctcagcaggtgagaaagcagaagcctgtagatgctgaggagaggagcctgccctgtgccaggcacggtgctaagcacccaaggtgtatgatctcactcacccgtcccaacatccctgtgaaggaggaagtgttattaattcctcctcacagggaaagcgtgggagcgcagaagctgtgcgatccacccacagtcactcaaggttagaacacaggtctgctgggtctacagcccaggccccctttccttgcagtccttccccaggctggtgccctgtttccctggtgcttctgttgagtcttgtctgtaatcctacaattaccagtgctactatgcactgcctacatcctgccagagttccttgtaggggcgtctgcggcgcactccgccctgaaccccagcaggcagggtcatctgcgtatttccatcccatcgcagttcctttcataagaaaacttgctcaggagcaagcatgttgctgagtgctttacatgcattatcttgttcaagctttataacagtagatatgattattctcattttacagatgaagaaactgaggttctgggaagtgatttctccgaagtcacctccagtaggtgcacatactgggttctgacccagtcttgtctcctctcgagtctatcctcttttcctcttgcacacagagttggtcccttcagttggtttggagttctgaaccttgcctgtgccagtacaaggaggctcttacagctcctcctcctctggcaggaatgaggatgtagcaagtagcaccatgaagtgtggcgtagacacagggatggttcccagccatagggcttggccgtggccccactcacctgttcgtggcatcctgcactgagttgacaaggaacctgggtaggtggttgtccgggctattactgtgactggtcaaggcccactgtgtccaaaggtggctgcctgtgatccaggcagcttgaaggaccctaaaaccccccaaattatctcctaactggctgctgcctgatattctgctatgagtactctccacctttatgttaactttctcacccatgttaatcacccagcctcgcagttagttatgccttggaccctccctggcaaaactttccgttgatgtttctctaatgtagaaaccaggctgacctgtttctgccattatccagcaagctgctccttggcttggggaaggaaagctggctcgctgccccctgcactttttccttaccccacccaccttgcagtgtgacttcttccacttcatcctgtccccgctttcctcctccagtggaaacctgtaagtgcttcagtgctcacctctgaggcccacactgagaatcctcagggtggaggacggaccttctccactccccaacccttgtggttcctgcagacctgtccagctgtgtatggggtggaactgtctgagtcacatctgagcagcaagtttgtctaggcgtgaccagcagccaactcagtccatctccatcctgccacttgccagggacaacctgcagaggtatctttacctggggacaaatccctgttccttggcaccattaggacaagaatttcattgtgcaaattccaggtcgggctcaagccaaagggaatggggctcaggttggcacagtagctcctatcagccagtgttagtgtgcactagggggtggtagaaggagccctgtgctctcaacaatctcaggacctcaactgatttgcatttggccatttgcttccttcatcgaggtcccaagcaaggaggggggtagttcaagtgtggaaatagcagattgttaagtcccaggattcctgctgaggagaggagagggtgtaactaagtcttgcagcgtaagacagtgcctctcagatttttatatggatggtattaaaatgtggattccgattcagtaagtgtgggtggggccgagattctgcatttctaacaagctcccaggagatactgcagctgctggtccgtgaatcatacttcgaattgcaaagattgtagggattagcctttctccaaaagtcacttgaggcttaaaaatccacttatcctaggggaacagagtgcctcctttcacaattaagaagttagatttaaagttcacatgcctggtaagaagaaattagtgattctttgctctctggtcatcatcaagattgtcctggggaaagacaaaagccaggagagtgtgtctgaatatggggtaaggtcttccaggtcagaaagagacgtttacagaagaggaggataagggctcaaatctacttccgaaacagttattgttcagtgaatatgtgctttgcactggtcactgggccatgcagtttgcagggatcattgcgtctctcaataccatgaccctgtgagatactattgctttccccttgtgcagtaaggaaaccagggctcagagaggtgtgttaacatgcccagggtcacacagcttttcagttgacagtgctggtttggaacctagccctttctcccttaaccactaggcttcactgtattgcaggaagatgacattcacttgggagagaaggggatatgttattcaggactattttgatttcaagtggtggaaaggccactcaaactgacttaaaaagggtttctttattgacttgtgtgactaaagagctcagacagcaatgccttcaagcagagctgagtgtggggagggggggttctgctttcctctatgttggtgtctttctcaggcgggctcccttcccgagagcccactgcaggtataatcctgttccctcagcaacctagcaaccaaactagcaacaggatgagtctttcttcctattgggcccaacacaccctacatctgtctctcattggcccgaattggatcaaatgctcatcccagaaccaatcgctctagctgtagctgggcggcagaatgtctgattgtcttgggcctgggttttgagcccaccccaggagcttggaggtgggtatatcctcgccctggccataaggactggtaggagaaaagggttagggacagtggggtgctgctgccatccaggaatgtctgggtaggactaaaacagatgtccaccccagggtaggcctttggggctcttccatggctggactgaagctcctgaggcagccgcagggagctctcgatgggttgggtgggagaactaagaccttaaccagccctgaggggctgaggttggtgcggggcccagggacgaagtggcattgagggaagcttggtgtgaccatctgtctctctgttcccaggaaagctccaaccatggccatggggctcttccgcgtgtgtctggtggtggtgacggccatcatcaaccacccgctgctgttcccgcgggagaacgccacagtccccgagaacgaggaggagatcatccgcaagatgcaggcgcaccaggagaagctgcagctggagcagttgcgcctggaggaggaggtggctcggctggcggccgaaaaggaggcactggagcaggtggcggaggagggcaggcagcagaacgagacacgcgtggcctgggacctctggagcaccctctgcatgatcctcttcctgatgatcgaggtgtggcggcaggaccaccaggaggggccctcacctgagtgcctgggcggtgaggaggatgagctgcctgggctggggggcgcccccttgcagggcctcaccctgcccaacaaggccacgcttggccacttttatgagcgctgcatccggggggccacggccgatgcagcccgtacccgggagttcctggaaggcttcgtggatgacttgctggaagccctgaggagcctctgcaaccgggacaccgacatggaggtggaggacttcattggcgtggacagcatgtacgagaactggcaggtggacaggccactgctgtgccaccttttcgtgcccttcacaccccccgagccctaccgcttccacccagagctctggtgctccggccgctcagtgcccctggatcgccagggctacggccagatcaaggtggtccgcgccgatggggacacattgagctgcatctgcggcaagaccaagctcggggaagacatgctgtgtctcctgcacggcaggaacagcatggcgcctccctgcggcgacatggagaacctgctgtgtgccacagattccctgtacctggacacgatgcaggtcatgaagtggttccagacggccctcaccagagcctggaagggcatcgcccacaagtacgagttcgacctggcctttggccagctggacagcccggggtccctgaagatcaagttccgttcagggaagttcatgcccttcaacctgattcctgtgatccagtgtgatgactcggacctgtactttgtctcccaccttcccagggagccctctgagggcaccccagcctccagcacagactggctcctgtcctttgctgtctatgagcgacacttcctcaggacgacactaaaggcactgcccgagggcgcctgccacctcagctgcctgcagatagcatccttcctgctctccaagcagagccgcctgaccggtcccagcgggctcagcagctaccacctgaagacggccctactgcacctcctactcctccggcaggccgccgactggaaggcggggcagctggacgctcgtctgcacgagttgctgtgcttcctggagaagagcttgctccagaagaagctccaccacttcttcatcggcaaccgcaaggtgcctgaggccatgggactccctgaggccgtgctcagggccgagcccctcaacctcttccggcccttcgtcctgcagcgaagcctttaccgtaagacactggactccttctatgagatgctcaagaatgccccagcgctcattagcgagtattccctacatgtcccctcagaccagcctaccccaaaaagctgacgtcttttacagaatgtgggatcctcgagctaagatgagggcatccctcacgttcacacccctggtggcatctgccagccctgttctggggacaaggcgggctttcgtgggagccgtgctcagcctgccaggaagccaagccctacagtgcagaggaaacagaatttcaacgggaagctggtttgcttcataccattgggatctgctggtaaagctgttatttgggtttagggactgatcccttgcagtttacttctggatcaccatgaatggccaagatggtggcagaacacgctgtggaccctgagttagagacaatgcaaatgttggattgggtgtaattctttttgaatcccagatccagtctgtacttgaatatgagcagaggatctacaagaatgctgacagggaaccgtgttaagacccagcacccctattcccaggagcttctggcctgaccatctgcagccaaagcactaacagggacagatatgggaatgtccacctttgatccgcatcctgcacaatagtggtcccaccatggctgccacttttttatactatttggagaaaagaccttgtataaattcgaggcccgaatgactaacgtctctgtcacacggaaatgggtacttggtggcatagagaaacacaattagccactttttcagctacacttctcactcagctgcaccctacacttctcactcaggtgcacccccttctgctgtcctttccccaacgtactgggtcccgagcgtggtgggtatttgccacactgggtgccagctcagcagccccccacctctctttattctctccaaagctggtctttctgactatcattgtggtagggggaggacagatgctaaaggtggaagctgacctggagaaagagacacacggggtgactgtggcaaaggacagctggaaaagaaactctatcacttcttcattggcaaccacaaggcacctgaggccatggcactcccagaggctgtgcgcagagccaagcctctcaacctcttctggccctgcgtcctgcagcgaagtctctgctgtaagacagtagactccttcgatgaggtgctcaaaaatgctacccggggtggtggtgtctggcttgcagtctggcccagttcagagaaagttgcagagatcaggggccaaggatgtcatagccccaggttgtcctcagggtcccaatcctagggcagggtgtgcatggaagcaagaactatggaaacctagctccagtctgcaggctctgagcccctagttcctcactccagcggggctccctcactgcacagaacccaccccttctgtgtgggcactgctgaccacacagatgacccagacccaaagagcctggcagaagctctgtggttggagctgggctccgtctccaggtctggttcagggggatcaggaaggctcttttccacctgtggcttcactggccctttgagatttcctatctcaccgttacttcagttacccttgcagggggccagggagtcaagaatataccgtgttcctccagggtttaagccggccatgccttcccgagagcataaccaacttgacaggggtgcccagttaccccacaaactgaaggaaggagatccttcccccatccccaggagtgctctcaaccagcctcagaaagcttgagaagatggaccctttgcccaccagggttaattcctggtggggcagctcggctgtgatcagggcaaccaaacctataggaagccttccagtgtgagctggaattagactgaacatgtgcttgggcctgcctctccctagacgcagttgcggggcactccagggaatgaaccagctcaagtgtgtccctaacagcagcctggagctacccccaatccctcacagcctgaccctcctcattccatcagatgcatttgtagaatcggggcaaatttccttatttatttatggcccatgcctttccccctcttcatcctgatcccgttttgctttgaagagaccccagtaaccaaaaaacagcctccagaagccaaaaccatgcctggatctcccatagcttctcctttgcttccaggagaaagttcactgaaaaaaaaatatcttctggcttcttgtgtgtacagagacaacagaactcggtggggaaacgggaatcttttctgcaccaaagctgcttctaaagcagaaagcagtggggctcttggtgtttcatgctgccttatttatattaaaggaagaattaaatcttgcaaggagtagaaatggtcactgtttgtttttaacttcaggaaatctgtgaggctcccagggcagagttggggacaggggggtggatttcctattgacaaagcagaagctttcactccctttttattcttacactttcaggagactttaaaaaataacaaaacagaacatttctaccctgtctttgaggcaacttgtgtgctgcccgcagggctccagaaagggcctttgaaagctggctgtagggtggattccagcctaagaccttatttcacagagctaatgtcagcgagaaatataggagctggaactaacaggaagcttttgggttttaaagaaagagattgtattttaaatagaggattttgagtcctctaggggactttggcctttccactaaggacaaccctgccctctttccccagagtctctttcccaaggatgcttgactttccccagcaactgctcacttgctttgcaaaataacaagggtgaaatgaatagagttggcccctaggccaagaggctggttatgttggggaagggccttatatcctcaaaagctctagcccctctgcatgcctggctgaagcacagcccccgttgagaacctgggggtggagctctggttcatcatcaagggtgtcatccgaatcacccagacaacctggtccattgccccgaccccgccttgaacctacatggtgctcagaatccagtctggagtggtcaggctaggctcgatttttaaagatttcccccaagtgactgatggtacccctagctgaggaagccctctcactttctttcttaatggaaagttaaagaaaacccaagtggactactttccctacagatctattggaagatagatagacctgggaaaagccaatgagcctgcttggaatctgtggtctaagtggcatcagctacaccacaagcttctcatgagggcacccacattcacgctagtgccgtaagcctcagagagagggtgggaaggcataagatggtgagcccttctcccaagcaggtcatgaatagtccacaagcatttgtcaggagcctaacgtgcatgagacattgtggaagatgggaaaatgaataggaccaagcctgttccctaggagaggcagcagaaggtggccttccaagtactgagctattccaagtgtgaccctgcactacacatacgggtgtcacctgggggcagcttcctgggccgtgtcacagactccagtgggatcctgagaagttaggtagaagaatctgcacttcaccaagttccccacctgattctggatgtccaagaaccactggtacctgggctgattagggaaggcctcatggtggggcgctgccagatagagactctgaaaaatgaccaggactgtggccaggaaagacattccagccagaagcatggagtgagggtgggaagcacctactgtatggcaggcaccgttccgcacacacatttgttaatgcacacagttccatgtcagtcctatgatgtaggtgctattcttatcctccctgctttccagataaggaaacaggcactgaaggggcaactgacttacctactgtcacagtggtaagtagcacagcccagattccaacccaggcagtcctggtgtacatgttggcatatactgagaagtcgtagcaaatgaggttgaaaagataagagtggggctgaaccatgcaaagccttgaatgctaatacaaggtaaatttggacctcacaacaagcagaggtgggccattggcgggttttgagtgagacagtaacttgattcacccccaaactaaggagtccttatctatgtgatcagtgccatccatgtcctgtgctgtagggtacatggccggcttcccgagcagggttggtggcagctggcagtggttggtgaatgtccaggaagtcttaactcaagccaccccaaggctgtgattcagaacattttcgtggtccgtctcatctccacctcacgggacagagctggaaggctgtttggtttggccagcgaccgaaagcagagggagccaagagtcacagagtgaagggcaatgtgtgccttcaacagggccctccctctccgccccactctgccttgccccacccctgtccctgggaagggcatcttttagagttaacttttctcattgccatccaaaaatagcttgcttgtttaactagtttgttgtttaaaaaataaacataaaagcaataatacagtcataattttaaaattcaagtactaacaggaaaattaagtaacagactaacggtcccacttctgacttcttagtccactccccagagataaccaatatgaagtttttggtgtatccttccaaaatttttctgtgtatgtgtcacatgtatgtatatatatatgcatccttttagtccttttttacataaatggcatcataccgactaattcttcttggttatctttttgaacatttggctctaccttattctttaaactagctgcttactggccgagtacattagctcacacctataatcccagcactttgggaggccaaggcaggaaaatcgcttgagcccaggagtttgagaccagcctgggcaacatggcaaaccttgtctctacaaaaaatatataaattagccagacatggtggcgtgtacctctaatcccagctactccggaggctggggtgggaggattgcttgtgcctgggaggcagaggctgcagcgagccgtgatcactccactgcactccagcctgggtgacagagtgagtaagaccctgtctcaaaaaaaaaaaaaaaaaatatatatatatatatatatatatatggctgcttactatctcactgtctgtatgcatgtaccataatttacccaactttccctactgaggaacacttaagttgtctccactttttgctgttataaacaacactctagtgaacgtctctgtgcacaaatcctgttttgaaatgatccttcctctcccagtaatctccatattctgtacttgctgtatgtggattcaccaccagcatcttattataaaaataaccattgcctgggatttagtcaatcatcgttgaataaattttgaatcaacagtgaggaaaaggtgtttgaccaagtactgagcaagagcatgtgatctgcctaggtccggctctatgtggggaacaaaagtataagatgggggctctgtccccaaggaactgggtctaataggaagactaccaatggctgcaaagtaagtcagagatcaatgaagtgtggtaagtaattgaaagtgaaattgtgtggctctgaagcccgcatgagcggaatgtgaaaacagatcagctttgagtttcagctgtaacctcttttgctcccttacagatgggaaactgtgaagagcctccccaaagaaaatcaaatccacgtaattgttctgtctctcaaatgcttgtactcactccattcatctgagcccgggtctggtttatttcctcctgcacaatgtggggccctcctttacaggtaaaaatggcattttccaccctttgatgtttctccacagccccacaaagaaaccagaaaataaaactgtcaacaacaaattatctctcagaaagagggaaccacataaacctcagagatgttcaaagacatttcttcttgatgggaataggtgggcctcaaaagtgtgaagtgagagttgtagcacagcggtgggttagggagtctggaagagtttcgtcccatctgtttctttcaaacccacaggtcagtgatattttaggtttcttttggagcaactttatttaaagtagaaatagcaaagacccacaccccgtttcttcccattagctgcccttggctatcttcccaactgcccagagatgacgcccatagcccccacagccttgctgccacgaagaaggctttcttcctgaagaaaggaccgggctatgttagaccaaaggtctcctgggacgatggccttgcatctcttccaaaaggcatggctagtgctgaatcaagccccccaagggtctggaaggtgtaggtcagccgccagttctcccagccaaggacagtgagtcagcccatacataccccatgtactcccaccccaggaatcagagccaagtgagactagagctggtgctgtatgtagagccagattcagggccagggagaaggtcagtggtgttcagccctctggatatccacagctttgcccagtgcagtttctaagaagccctctccatagggacaaaatgccacaaagaggaaacaaatctatggagagggcctctggccaggcagggaagctgcacaagctccatacatccagagcaacacaagatgccacactaagctgcaaggttgctcagcctgaacgtttaaatccagagagaaacaagagcaggtcccctgccctctctccatataccctctcaatatggaggcctatgcaaggtcctgcccacgaggttccagccttcatgacaaagctggtgctaaggccaaggagactgagagccttactataaacagcacagggactaagagtgtgggctctgtgttcaatctctgctatgccatgtcctagctcagcaagtctcaccatttctaagagccttgggtgtgcctcagtttcttcaactgtaaaacaggaataatactgcccacctcgtagagccattgagaaggttaaatgaaggagcgtgtgtgatgcacttagcttcgggcctgacaaataaactcaacaacaaaaactgcggagattcttccccttgctctgaggagggctccttacagcccaactcctactgcctggttcccccagcagtgtgagctgtccctccacatgggagtgcctcctcccacatgggggtctgtcttccctgggggttccctcacacacctcccttagggccagacactggccaggtgctcagaaaatgtttgtgcacctcacaggaggggtctggggccatgtcccctgtttaggggaacagaaagggtctcttgcctctgcccttctgacccctctgttctcctcgtccctctgcaggacagccagagcctagacctgcagttgccatagcaacgacagagccagagagagtacaaggcagggcatccctgtggctccagagaagcagctacctcttctagacagcaaagtggggaaacagctataatagcggcctcatgatgagctcctggaagtggcctgggtttctacatcatccatccatccatccatccttccatttgctcagtcattcatcactactatacacaaggcactgtgccaagcaccaggaaaacaaagtcaagtgggacactattcctaccttgagagagctcccagtccaggagggaaagcagaagaggaaggcagcaagggcaaggaggtgaggtagtgctagtagtggggaggccgagcagggcagaggttaagcgcacaggctccagagtcagcctcccgcaagcaaacctcagctctgctcatcactagctacgtaacacctgggcaagcgactccacctctaaatctcggtttactgatctataaaacgggagtgattggtacttacctcataaggtttggaggtattagtagtatatctaaggtacctagcatatagtcagtgctcaaaaaacagaagatttactatcattctgaatctaccctacattccctcctccaaaacccaagtctgaagcccaagtttctggttagggcttcctgcagtttcctcagctaactcttcccctagcttccaggataagcagcccttgctgccactgtacctgggatgtctgtgtgtccccatctctccaactccctgctgctatcagatcacctgggacagtgtctcagataaaagtccccaaagagggtctttctgtttagcaaataaatggccaaaaaccattaagtgaaatacttaaaatacctcccgcccttacctttatacagctcctcattatccatcctgataccctcctcttatggcagaaaggcacaaagggtgcatgtgctgcacatgcgcatgcacacgcgcacgcgcgcgcgcgcgcgcacacacacacacacacacacacacacacacacacccgttgagagatattcttcacctgtgagcgtaacctgaatacgcccagatttagcaacagctgttcctgctaacagtcatcctcccacttccctgccccagtcctgtgatgctggaacagaggctgcccctactcagggttccctggggggcagcgtcatcactaagcaactactacctccattgctttgtccatcttagccccaggacaggactggaaatggctcttcgtattggcttctatagcagggagctgactgttgctgctcaactgctccctctggagggggctgtctgctaatgacaaagtaggccagagacccttgctgtctgcaaggggattcctgggcatggcaggaatccttgggaggaaatggcagggcagagtattgcacagttcttgtccctggagcacatgtgtaaccatcctgtctatgcgcagcatggtactggtgtgctttagttttccattcagcatccaagctgattggtaactgggcaggcctgcaggcatttcaaatccctcacattttaacccttggaaagagataacctgctccaagaggagacaaagattctctgcttgaccaaactttagtcaggctcctgaacctcctcctaggttcatctgtgcgtgtccttgtaaaattgttttagcaaagaaccctgctaagttagtttggcaaaagaactcccccacctcagtatcagatcatccttgatatctgatcaagttccttgtcctccgccagccctctggtgatgtctgatcatcctggcctgtcttcagcaagaatcctgttaggtcagtttagctagaatcctccttatccctgacgtttcctccgagtgattttcaatccactgacctctgctctacttctgggctataaatacccacttgttcgtcttgtactcagagttgagcccaatctccctccccaactgcagaagtctcattgcagcggccccgatacctaccgtgatggttatgaggaagtcttccttcacatgctttaaacaagtgtcagtgaatgatttttttctttaacagagtagcgagattctgagtattcttcagaaacacaggagagaagatttattttacatcatcaacattgcaagatttcagaatgcacagtattaaacttggccttggggtgagagggaggaggacggggagggataaaattgcagctttcaagggatcacaggttgagattaaacctgcacacaggaaacaaccagaaaacaactccaaaccatgaatcaagccatgtgcaacgtaggacatctagttccacaaagtgatggggggatgagcacagggttcaagtctgatcattggcagaagcctagtcataatagggttgcctgccattcactgagtttcacccagctggtactaagcccttgcatagatgagaccatcattattcaacagcccaatgaaataggtacttagccgtcccattttacagataagaaactgaggctaatagaggtgtagcaacttactcaagaaagttaagttgcaaagtcggaatttgatcccagtgctaaccttgaagccctgtttgtaacccctatggcacgccacttctctttacataaagaagaattttgatctgaactttgcaagagaaaagactggttggaaaaaaaaacagagggctgctctgaggaagaatagtatgtagaggaaatggcattttcaaaggctcaagagcgctaacaggccagatgagagaaaaatgtttgaaaagatcaaatgttcagccttccaggcactcaaagaagaagataaatgaaaatgggtctcccaggtgggcacagtgtttggtgtgtgtgtgtggtgggggatgggaactggagactactcattgagaactgcactgggctggatatttggttatttgtgaagacttcagaaaacaaactaagctaggctgatataaaccacagggcagtcaagcttgcttctcaactcagagtaacccagtctcccctccatcaaggccaatgactctgacaaaggaaacatgggtaaggagacctgaaggtgagaaaccaagaaacataacacctgcccctgccacccctaccaccaccaaagctccaagaaacaatgtgggagccacatgcaggcagtttctgcagcactggagggattgctctagcttgtactttatgatttagattaaatctactttaatactcagagtcattctgtcctcctaggcctctgagtctgtgatgggaggggctgccacaaaggtctctgaaatgccttcaaggccttttccccattttcttggccattagcacttggctcctttttacttatgcaaatttctgcagcctgcttgaattccttccctgaaaatgggctcttcttttctaccacatagctggctgcaaattctccaaacttttacgctctgcttcccctgtaaatataagttccaacttaacataatttctttgctcacaaatatgagcataggttgttgaaagcagccagggcgcatcttgaatgctttgctgcttagaaattttttctgccagataccctaaaatcatcactctcaagttcaaacttccacaggtccctaggccaggagcacaatgcagccaagttctttgctaaagcataacaaaagtgacctttgctccagttcccagtaagttcctcatttccatcacctcctcagcctggccttcactgtccatatcactactggcattttggtcacaaccatacaaccagtctctagaaaattctaaactttccctaaagaaaacaggtttacaaaaactgcatgttctcacttataagtgggagctaaatcatgagaacacatggacatgtggagggtaacaatacacactgaggcctatcagagggtgcagggtgggaggagggagaggatcaggaaaaataactaatggatactagacttaatatctaggtgatgaaataatctgcataacaaaccccatgacgcatgtttacctatggaacgaacctgcacatcctgcacatgtacccctgaacttaaaataaaagtgtttttaaaaagaggtttaattggctcatggttctgcaggctgtatgagaagtgtagtagattctgcttctggagagccctcaggaagcttcctctcatggcaaaaagcaaagggggagcgaggcatctcccatggtgggagctggcgcaagaggggtcagggagatgctgcacacttttaaacaaccagaactcatgagaactcactcactatcatgagaacagcaccaagagaatggtgctaaaccattcatgagaaatctacccccatgatccaatcacctcccaccagcattggggattacatttcaacacgaaatttggtggggtctcagatccaaaccatatcacagaattttagatctaaaagaaatttcaagtaccatttagtcaccagcaccacgaccatagccagctgtcccagccacacaagccctgccccatcatgctccctcctccccctagccatgttagattgtaactggactgagtccaggctaggctgtagctcagaacctccaaggaggggaactccacacaacctccattctgatgttaacatcatctatgaccatttcttttaaatgctgtggtttaaactaatttttttatttttccaatctgcaaaagatagagaatggctctgatatggtttggctgtgctccacctaaaatctcatcttcaattttaatctgaattataatccccacatgttgggggagggacctcaagggaggtgattcgattgtgggagtgttttccctatgcttttctcatgacagtgagtgagttctcatgagatctaatggttttataaggagtttttccctctttggctctgtacttctctcttctgcc

SEQ ID NO: 7 - DNA, 4416 bp, Homo Sapiens
agtgtgcgctcttcaggacagcagaggtcggttggaggtctgcattctctgccgacttgggccccaacttccccatcaggtcactgctccctcctctgaggtctggacaaaggacaaggctgtagggacctagactgtcctagacggggaggacatctatcctcagtggtctttccagcagtttgtttggagctgctcatcctgatcttttggctgactctggcagagggaaagtcagatttgaggcctgagctctaacaggcatccagagaggaaggaagggcccaccccgtgacatcagtgaaacggaagcaccctgcaggtgacatcactgttgctcagggcaacgcctccaccctaaggcggacggggaggtgaaaaatcggcctcaagtgtgagacgcatgttgaagggaagggacatagaaggtgtaacgttcacaggaaagctccaaccatggccatggggctcttccgcgtgtgtctggtggtggtgacggccatcatcaaccacccgctgctgttcccgcgggagaacgccacagtccccgagaacgaggaggagatcatccgcaagatgcaggcgcaccaggagaagctgcagctggagcagttgcgcctggaggaggaggtggctcggctggcggccgaaaaggaggcactggagcaggtggcggaggagggcaggcagcagaacgagacacgcgtggcctgggacctctggagcaccctctgcatgatcctcttcctgatgatcgaggtgtggcggcaggaccaccaggaggggccctcacctgagtgcctgggcggtgaggaggatgagctgcctgggctggggggcgcccccttgcagggcctcaccctgcccaacaaggccacgcttggccacttttatgagcgctgcatccggggggccacggccgatgcagcccgtacccgggagttcctggaaggcttcgtggatgacttgctggaagccctgaggagcctctgcaaccgggacaccgacatggaggtggaggacttcattggcgtggacagcatgtacgagaactggcaggtggacaggccactgctgtgccaccttttcgtgcccttcacaccccccgagccctaccgcttccacccagagctctggtgctccggccgctcagtgcccctggatcgccagggctacggccagatcaaggtggtccgcgccgatggggacacattgagctgcatctgcggcaagaccaagctcggggaagacatgctgtgtctcctgcacggcaggaacagcatggcgcctccctgcggcgacatggagaacctgctgtgtgccacagattccctgtacctggacacgatgcaggtcatgaagtggttccagacggccctcaccagagcctggaagggcatcgcccacaagtacgagttcgacctggcctttggccagctggacagcccggggtccctgaagatcaagttccgttcagggaagttcatgcccttcaacctgattcctgtgatccagtgtgatgactcggacctgtactttgtctcccaccttcccagggagccctctgagggcaccccagcctccagcacagactggctcctgtcctttgctgtctatgagcgacacttcctcaggacgacactaaaggcactgcccgagggcgcctgccacctcagctgcctgcagatagcatccttcctgctctccaagcagagccgcctgaccggtcccagcgggctcagcagctaccacctgaagacggccctactgcacctcctactcctccggcaggccgccgactggaaggcggggcagctggacgctcgtctgcacgagttgctgtgcttcctggagaagagcttgctccagaagaagctccaccacttcttcatcggcaaccgcaaggtgcctgaggccatgggactccctgaggccgtgctcagggccgagcccctcaacctcttccggcccttcgtcctgcagcgaagcctttaccgtaagacactggactccttctatgagatgctcaagaatgccccagcgctcattagcgagtattccctacatgtcccctcagaccagcctaccccaaaaagctgacgtcttttacagaatgtgggatcctcgagctaagatgagggcatccctcacgttcacacccctggtggcatctgccagccctgttctggggacaaggcgggctttcgtgggagccgtgctcagcctgccaggaagccaagccctacagtgcagaggaaacagaatttcaacgggaagctggtttgcttcataccattgggatctgctggtaaagctgttatttgggtttagggactgatcccttgcagtttacttctggatcaccatgaatggccaagatggtggcagaacacgctgtggaccctgagttagagacaatgcaaatgttggattgggtgtaattctttttgaatcccagatccagtctgtacttgaatatgagcagaggatctacaagaatgctgacagggaaccgtgttaagacccagcacccctattcccaggagcttctggcctgaccatctgcagccaaagcactaacagggacagatatgggaatgtccacctttgatccgcatcctgcacaatagtggtcccaccatggctgccacttttttatactatttggagaaaagaccttgtataaattcgaggcccgaatgactaacgtctctgtcacacggaaatgggtacttggtggcatagagaaacacaattagccactttttcagctacacttctcactcagctgcaccctacacttctcactcaggtgcacccccttctgctgtcctttccccaacgtactgggtcccgagcgtggtgggtatttgccacactgggtgccagctcagcagccccccacctctctttattctctccaaagctggtctttctgactatcattgtggtagggggaggacagatgctaaaggtggaagctgacctggagaaagagacacacggggtgactgtggcaaaggacagctggaaaagaaactctatcacttcttcattggcaaccacaaggcacctgaggccatggcactcccagaggctgtgcgcagagccaagcctctcaacctcttctggccctgcgtcctgcagcgaagtctctgctgtaagacagtagactccttcgatgaggtgctcaaaaatgctacccggggtggtggtgtctggcttgcagtctggcccagttcagagaaagttgcagagatcaggggccaaggatgtcatagccccaggttgtcctcagggtcccaatcctagggcagggtgtgcatggaagcaagaactatggaaacctagctccagtctgcaggctctgagcccctagttcctcactccagcggggctccctcactgcacagaacccaccccttctgtgtgggcactgctgaccacacagatgacccagacccaaagagcctggcagaagctctgtggttggagctgggctccgtctccaggtctggttcagggggatcaggaaggctcttttccacctgtggcttcactggccctttgagatttcctatctcaccgttacttcagttacccttgcagggggccagggagtcaagaatataccgtgttcctccagggtttaagccggccatgccttcccgagagcataaccaacttgacaggggtgcccagttaccccacaaactgaaggaaggagatccttcccccatccccaggagtgctctcaaccagcctcagaaagcttgagaagatggaccctttgcccaccagggttaattcctggtggggcagctcggctgtgatcagggcaaccaaacctataggaagccttccagtgtgagctggaattagactgaacatgtgcttgggcctgcctctccctagacgcagttgcggggcactccagggaatgaaccagctcaagtgtgtccctaacagcagcctggagctacccccaatccctcacagcctgaccctcctcattccatcagatgcatttgtagaatcggggcaaatttccttatttatttatggcccatgcctttccccctcttcatcctgatcccgttttgctttgaagagaccccagtaaccaaaaaacagcctccagaagccaaaaccatgcctggatctcccatagcttctcctttgcttccaggagaaagttcactgaaaaaaaaatatcttctggcttcttgtgtgtacagagacaacagaactcggtggggaaacgggaatcttttctgcaccaaagctgcttctaaagcagaaagcagtggggctcttggtgtttcatgctgccttatttatattaaaggaagaattaaatcttgcaaggagtagaaatggtcactgtttgtttttaacttcaggaaatctgtgagg

SEQ ID NO: 8 - protein, 547 aa, Homo Sapiens
MAMGLFRVCLVVVTAIINHPLLFPRENATVPENEEEIIRKMQAHQEKLQLEQLRLEEEVARLAAEKEALEQVAEEGRQQNETRVAWDLWSTLCMILFLMIEVWRQDHQEGPSPECLGGEEDELPGLGGAPLQGLTLPNKATLGHFYERCIRGATADAARTREFLEGFVDDLLEALRSLCNRDTDMEVEDFIGVDSMYENWQVDRPLLCHLFVPFTPPEPYRFHPELWCSGRSVPLDRQGYGQIKVVRADGDTLSCICGKTKLGEDMLCLLHGRNSMAPPCGDMENLLCATDSLYLDTMQVMKWFQTALTRAWKGIAHKYEFDLAFGQLDSPGSLKIKFRSGKFMPFNLIPVIQCDDSDLYFVSHLPREPSEGTPASSTDWLLSFAVYERHFLRTTLKALPEGACHLSCLQIASFLLSKQSRLTGPSGLSSYHLKTALLHLLLLRQAADWKAGQLDARLHELLCFLEKSLLQKKLHHFFIGNRKVPEAMGLPEAVLRAEPLNLFRPFVLQRSLYRKTLDSFYEMLKNAPALISEYSLHVPSDQPTPKS

SEQ ID NO: 9 - DNA, 4158 bp, Homo Sapiens
ccgctgcaggccagaaggtgggagccagcgggggcatcgccgcccgcgcccctctaagtgccgggccgcaagctccaccgcagccgcctgcaagcagcggcgcctcggccctcgacctgcgcgcaaagcctgtgctggagccgtcctcccgcggcggggaccgggaccggggacccaagccaatcgaaagctccaaccatggccatggggctcttccgcgtgtgtctggtggtggtgacggccatcatcaaccacccgctgctgttcccgcgggagaacgccacagtccccgagaacgaggaggagatcatccgcaagatgcaggcgcaccaggagaagctgcagctggagcagttgcgcctggaggaggaggtggctcggctggcggccgaaaaggaggcactggagcaggtggcggaggagggcaggcagcagaacgagacacgcgtggcctgggacctctggagcaccctctgcatgatcctcttcctgatgatcgaggtgtggcggcaggaccaccaggaggggccctcacctgagtgcctgggcggtgaggaggatgagctgcctgggctggggggcgcccccttgcagggcctcaccctgcccaacaaggccacgcttggccacttttatgagcgctgcatccggggggccacggccgatgcagcccgtacccgggagttcctggaaggcttcgtggatgacttgctggaagccctgaggagcctctgcaaccgggacaccgacatggaggtggaggacttcattggcgtggacagcatgtacgagaactggcaggtggacaggccactgctgtgccaccttttcgtgcccttcacaccccccgagccctaccgcttccacccagagctctggtgctccggccgctcagtgcccctggatcgccagggctacggccagatcaaggtggtccgcgccgatggggacacattgagctgcatctgcggcaagaccaagctcggggaagacatgctgtgtctcctgcacggcaggaacagcatggcgcctccctgcggcgacatggagaacctgctgtgtgccacagattccctgtacctggacacgatgcaggtcatgaagtggttccagacggccctcaccagagcctggaagggcatcgcccacaagtacgagttcgacctggcctttggccagctggacagcccggggtccctgaagatcaagttccgttcagggaagttcatgcccttcaacctgattcctgtgatccagtgtgatgactcggacctgtactttgtctcccaccttcccagggagccctctgagggcaccccagcctccagcacagactggctcctgtcctttgctgtctatgagcgacacttcctcaggacgacactaaaggcactgcccgagggcgcctgccacctcagctgcctgcagatagcatccttcctgctctccaagcagagccgcctgaccggtcccagcgggctcagcagctaccacctgaagacggccctactgcacctcctactcctccggcaggccgccgactggaaggcggggcagctggacgctcgtctgcacgagttgctgtgcttcctggagaagagcttgctccagaagaagctccaccacttcttcatcggcaaccgcaaggtgcctgaggccatgggactccctgaggccgtgctcagggccgagcccctcaacctcttccggcccttcgtcctgcagcgaagcctttaccgtaagacactggactccttctatgagatgctcaagaatgccccagcgctcattagcgagtattccctacatgtcccctcagaccagcctaccccaaaaagctgacgtcttttacagaatgtgggatcctcgagctaagatgagggcatccctcacgttcacacccctggtggcatctgccagccctgttctggggacaaggcgggctttcgtgggagccgtgctcagcctgccaggaagccaagccctacagtgcagaggaaacagaatttcaacgggaagctggtttgcttcataccattgggatctgctggtaaagctgttatttgggtttagggactgatcccttgcagtttacttctggatcaccatgaatggccaagatggtggcagaacacgctgtggaccctgagttagagacaatgcaaatgttggattgggtgtaattctttttgaatcccagatccagtctgtacttgaatatgagcagaggatctacaagaatgctgacagggaaccgtgttaagacccagcacccctattcccaggagcttctggcctgaccatctgcagccaaagcactaacagggacagatatgggaatgtccacctttgatccgcatcctgcacaatagtggtcccaccatggctgccacttttttatactatttggagaaaagaccttgtataaattcgaggcccgaatgactaacgtctctgtcacacggaaatgggtacttggtggcatagagaaacacaattagccactttttcagctacacttctcactcagctgcaccctacacttctcactcaggtgcacccccttctgctgtcctttccccaacgtactgggtcccgagcgtggtgggtatttgccacactgggtgccagctcagcagccccccacctctctttattctctccaaagctggtctttctgactatcattgtggtagggggaggacagatgctaaaggtggaagctgacctggagaaagagacacacggggtgactgtggcaaaggacagctggaaaagaaactctatcacttcttcattggcaaccacaaggcacctgaggccatggcactcccagaggctgtgcgcagagccaagcctctcaacctcttctggccctgcgtcctgcagcgaagtctctgctgtaagacagtagactccttcgatgaggtgctcaaaaatgctacccggggtggtggtgtctggcttgcagtctggcccagttcagagaaagttgcagagatcaggggccaaggatgtcatagccccaggttgtcctcagggtcccaatcctagggcagggtgtgcatggaagcaagaactatggaaacctagctccagtctgcaggctctgagcccctagttcctcactccagcggggctccctcactgcacagaacccaccccttctgtgtgggcactgctgaccacacagatgacccagacccaaagagcctggcagaagctctgtggttggagctgggctccgtctccaggtctggttcagggggatcaggaaggctcttttccacctgtggcttcactggccctttgagatttcctatctcaccgttacttcagttacccttgcagggggccagggagtcaagaatataccgtgttcctccagggtttaagccggccatgccttcccgagagcataaccaacttgacaggggtgcccagttaccccacaaactgaaggaaggagatccttcccccatccccaggagtgctctcaaccagcctcagaaagcttgagaagatggaccctttgcccaccagggttaattcctggtggggcagctcggctgtgatcagggcaaccaaacctataggaagccttccagtgtgagctggaattagactgaacatgtgcttgggcctgcctctccctagacgcagttgcggggcactccagggaatgaaccagctcaagtgtgtccctaacagcagcctggagctacccccaatccctcacagcctgaccctcctcattccatcagatgcatttgtagaatcggggcaaatttccttatttatttatggcccatgcctttccccctcttcatcctgatcccgttttgctttgaagagaccccagtaaccaaaaaacagcctccagaagccaaaaccatgcctggatctcccatagcttctcctttgcttccaggagaaagttcactgaaaaaaaaatatcttctggcttcttgtgtgtacagagacaacagaactcggtggggaaacgggaatcttttctgcaccaaagctgcttctaaagcagaaagcagtggggctcttggtgtttcatgctgccttatttatattaaaggaagaattaaatcttgcaaggagtagaaatggtcactgtttgtttttaacttcaggaaatctgtgagg

SEQ ID NO: 10 - protein, 547 aa, Homo Sapiens; identical to SEQ ID NO: 8

SEQ ID NO: 11 - DNA, 65071 bp, Homo Sapiens
gtaagcgtaatgtgacaatcccctctgtcttgcaaaataaccttctcattcttcttcattaaaacattatttaaaaccacatgttcagtgtgctattttcctgaatgttgacctacaaaccctttctgtatttaacctagtgtagttatttcagcatcaagagtaaaggaagcatcttgggacacaaaatttagtcataaagctatactccacagatatctcgaaaatatttgaagcttgaaaatgaagtctgaatttgtagattaaacgcaccaaataataacattcagccattttcactaagtggcccaggatatccataacaatgtagcctcttcccatattatttattctaaaacttttggaaattatgaaggatttcctatttttcctctctttttccagaaaaatgcaaaatttaaactaaatgtccaatttactttgaaatttacaagtctgctggaaagaagagttattttcagacaattaactacctgaattcaagttcatttgaaacttgtgagatgttgggcaaaaaatcttaactttctgagactcatctttcctgtctctacaataaggattaaataatacaggttttataaggatgtacaatgccaggcacagaggagtggcttaatataagttagctattattatacaaacatgcgtggatgcggcggcagagcagagagaaaaactgtgcagaagacgtagactttaggccagacgcagtggctcacacttgtaatcccagcacttcgggtggccagggtgggaatattgcttgagaccaggagttcaagaccagcttgggcaacatagcaagaccccatctctacaaaaaaaaaataaaaataaatgcagacttcaggggcaggtgaacccatgattgaatccaactctgcctactaactaaatgtgtaatcttgagtctcactcatctctctgagccacaggttcctatgtagcatagttggtgggagcattcagaatctatggagctccaaacacgtaatagctgcttagtaaattgtggtcatcgctgctataaaaggggtcaattgccatagaataactagatactctctatcacagcagattattcctttattttaaaaacattcattatttacatttctttttacacagagaaacaatgccaacttatttttttgactttttgcataaacaaggtgcatttcacaaaaagcaaataattagctgataaacaggaaaccacttactcatctacttaataaaataagttctagtatgctgtatgatttttttcccatgtttaaatggtcatagaaaacttaattaatgggtgaaaaacttagtgaaatttcatcttgcagattatcttggaatttggctggaaccctacagaagccaggactgaaatgatcccttagtgggaaataaggatttttttgttctgtgactggctgtggactagtttggttttagggcttgctccatgaacttgaattaaccactgctcttttagcctttaatacaagctgagttctacaaaagtataaaacctcacactgaggattaggcgtattctgtcaaggactaggctgttggtggcaaggtggagatttgccagggaagagaagattgggaggggcaaggccagtttaggggagttgagcccttcctaaaaatggtggaacacactggttattactttaggaagcccaggactgctcactgggtcactgattagagaaaaacttgtgtgtcttagattttgtttctaatacccataaatctttcaatgtgagaactggaaccgattttcctaacttatccttcccagtccattctctgggatgatctgcatttccccttccagaataagaaagaaagaccactcatccttctgtaatctggcacggtgtaggggtcaggtaatctcttgcatatcagaacattctggtatccccagaaactcagccagagacctccctttccatctaaaccataacaccaagatttcaagagtaagatacacacaagactgccttttcaatttgattccattcagttcctcttttgctgtaacacagggtaagttcagcttcccagggtcactgctgattccaggccagcatctctttcccgaagtctatatttcctgcctacttttcatcctctgccagtcacttactttgggagcagggcaagactggcctcctcacattctgctctagggttggctttaaaattaagggaggtctctagctgggtttctggggatacccatagttgatattcaggagattccctgacccccacaccgggcctggttgcagaaggatgagtggcctttctttcttagttgtggttaaaggtatgagggtggggtggagagggcttggtcaaaacacaaataagcaaagtcatcaggggtggcaagagaaagtttgacttttcctccttgccacttctccctgggactctgcaacttgagattttgtcagtcagttttatgagtttttaagaactaagcatggtgtgtgtctggcactcacatttctgcatagaaacacgtgtctccatttcctcctcaccccgtctcagtgaagagcaccaccatctctgtggtaattagaaatctaggaacatccttgactctcctttctccctttcctctttttatcaatccatcaccaaatcctatagatttttaccttttaaaataactttttaatacactgacttaccagtggttttcaactggggagtgattgtgctatccaggggacatttgacaatgtgcatagacatttttggttgtcaaaactgcagaggtgctacattgctaaacaccctgcaatgcacaggactctaccaacaatcgccaaatctagcccagaataccgatagtgctgaatttgagaaatcctgcattggctccacttgttaggagaatggaatagactcccgactgatctgcctatttcaattctccctgttctcccaccccaaccaattgataatcctgcagccaaatgatcttttaaaagcatagacctgatcctgtcactcccctgctgaaaaccccttaatgtcttataggggaggagaaggtgtgatacctttcctcatctatcataagggttatagccgacactcctataacaaaagacagactaaccagagaaaagcatgacaaatttgttaaatcaaagttttacacgacacaggagccttcagaaataaagactcaaagacccagggaaaagtatttttatgtttaggctccatgaagaacggacagctgtgtagaaatgtgattggacaaaaagggtatgatctaatggtaacagactgaaaggggaacccagcaaggcccatctatttacattctttgtggcctctccgagtaggattccttcctgctgggtacagagcaggacccctctggaataagatgcttatgatctacattagacaggtaggctagagaatttctttatggccagttcctacaaataaaggcaggggaaggttagagtaatatttccaggtttttatgccttgctttgagggagggggttctataatatatacaatatatatattaatagtttctatgacccaccttggggaagaggaattctggtgtctatgacttgctttgggggagaaacaggggcaggagacaggaaaacagaaaaaggtcggagagaaactttgcttctgaggccttccagtcttctttaattcaaagtattcagcatgccaaagcattatacttttatttacttatttatttatttttttgagatagggtctcactctgtcacccaggctggagtgcagtggtgagatcatgaattactgcagcctcgacctaccaaggctcaactgatcctcctgcctcagcctcccaaacagctgggactatatgcacatgccaccatgcccatctaatttttgtatttttagtagaaatgaagtctcactatgttacctaggctggtcttgaactcctgggctctaagccccaatagtcttttcatggctcttaggataaaggccagaactttcaacttgtccttcacctggccattggttccttcactagcctcatcttaagtattttcttcttatctccctctgcaccaatcacactgcccttcccagttcatccaatctgtggccctgccttagtgtctttataaaaattatcctcagcccatcccacccccatccagcaatcactcctcatggtttgaccctcagtgaaagcggtgcatgcacacagagaccatccctaacactgcccattcagctcgtgttaaagaacgaattattcaacggtacttgctaaagcacggtaaggccacctttactcaggaccatcatgaaaggtataggaaccatgacaatggaagtttgagtacagagctcaactctaaatatagcatgggcaagtgggaatttatagccaaggagcagggtgggggtcagtggatggaaaattactataagaaaccatcagggctgatggaggattctggctaaattgacctaatgggcttcttgctgaagacaggtatgaaaggaaaataaatcttggggccctcaaatcactaagccaaagggaaagtcaagctgggaactgtgtcaggcaaatctgcctcccattttattcccacataagatagctacaaatataaaaaaagctacatacctccctcataattttcccacaaggaaattccttgtggacaaaggacagacaaaactcaaagttgtccctctggtcacaagagacaactgtatatctgatggctttctctgccctgttgtttcactaagccagacttaggcataagtgactattcctctaccctcctctcatatgtaaattgttgtattcagtgaaaagctaatcagagactcaaaggaatgcaatcttttatctcttatctccctatgacctgagtgaaccaatgtacatcttaaacatattgtgtaggatgtctcatgtctccctaaaatgtacacaaccaagctgtgccccgaccaccatgggcacatgtcaggacctcctgaggctgtgtcatgggcatgttcttaatcttagcaaaataaactttctaaattgattgagacctgtctcagatattttgggttcacataggccaaggtaatcagacatcacctgggggacggtagagaatgaggaacctgatcagatatggagggtgatcagacactgaggacactgactgactgacttagcagtgttgccaaactgacttagcagtgttctttgctaaaaccggatcttacaaggaagggcgcagacaagcctagggaaaggctcagtagcctgacgaaagtttgaccaggcagagaatctttgtcactaggcgaggatcctaacataagcattcatactatcatgtttcttttcttcttatttcaatctataattctatttgcataatgatgttgttataggaaaggggtcctgatccagaccccaagagagggttcttggatctcacgcaagaacgaattcagggtgactccgcagtgcaaagtgaaagcaagtttattaagaaagtaaaggaataaaagatgatatactaaacaaggagtggattactcatgcctcccctttttagaccatctagggtaacttcctgatgttgccatggcatttgtaaactgtcatgaagctggtgagagtgtagcagtgaggatgaccagaggtcactctcgtcgccattttggttttggtgggttttggccggctcctttactgcaaattattttatcagcaaggtctttatgacctgtattttgtgctgacctcctatttcatcctgtgacttagaatgcctaaccatctggaaatgcagcccagtaggtttcagcctcgttttgcccagctcctatttaagatggagttgctcttgttcacatgcctctgacatttcccccttgtcttttataagagaacccttaatcctaagggttgcagagggacgaagatccatcttttgtaactttttcaggctgaataggggcgatgatattcctgcctaactatgagggtctcttgcattcagggtagagaggagttcagtcagagaacatcagtatggtaaggtccattcataactgttgagttttgacaaaaggtgatatctggaagattaatacgtgtttaagaaaacatttagtaagcttgtcctgtattcctacacaaagagtataacagcaatatattccacaagggtagagcaaaataagtaaagttgttccaagtaagctaaattagaaggcttttcatgaactgggcagctgttggaactaagctgatatggggttattagctgaatgtgatgtgcccggaattagaatactgatccagatttttacattacccatcccttttgtttattctgagcagcagtcagagatcattggttggttcacaggaataagcagggttagcctaaattgcagaaacgaacttaaaaacaactaatgagactagaatttaataacaagtataccacagtacttgaaacataatatttctctctccagtttctcatttttactaaagacaaatcatggtaaggctgatttgctttgttatacttggcctgattatttgtataaagtgcaacaaaaataattatttttcacataggctctttttaaattagctttgatggaactctgctctatagaagtaatcttagacaagactttgtaaagccaagctcggccatgtgtttgtatcctcaaatatctatgagttgagtaaattcctgttctcttgaggtcccaagataacttaggactcctggacctgccagaaagtgacattctttacttaccacaggtcattctttacttacctttacagggacagttgcagacaagatctgaggccaattctccaagtggcttttattggctttacaagtcaagtttgattccttaaaggaaagcacaccattccagttaaagccgtggtgaaataaccaatttatccaattgtgttctgctacaaaagaaaacagatccttattgcatgtatgcaaataactatattgccataaattaagaatactcacaaatagtttccaaattttggaaaaatcaggtagagagaaacaaatatactccaaattttgttcacagaagtatactcaattgctaaaagctgtaaatagctcaaaagaaaagtttccttgactctgatattcatgaacattccagctctacatgagggttctgaaagttgtttcctctattctaatgttacaatttccaaagttattggaaacctgcatttgggaacacctgctggagttctacagttgattataaaccaccttctaaagaggattagaacaagaaaacaattgtggatgataaaaagttttaggatagccactattaaagccacaattgataaggaaacttggttacctatgtggcacacaaaattttacataacaattataattattaataatctacactaagtcatattagaattataagagtttctcataactttgtaacatataccaataacacatttatgcaaatatagtccaaaaaaagcaaaaaaccatttcatatttggcaatgcttcctatatgatttttatagcaaataagccaaattttacctttacattaatgtgctattaatgttaaacccaatttttaataaaaccttatagacatatttacccaattttaatgttaaccataaggtaagagtcttataaacctcgtataaccctttacaattgtgtgtgtgtgtgtgtgtgtgtgaaagagcagatcaactctaagaaaaacctgttgtgcttttattccaatgtttaatttatcgaaaaactgaataatacccctgtaactttagccagtatgttcacatacagaatctcttacaattaatttttataaaccttccacaacttatttaaacctttagttttttttttacttaaagcaatcctttaacacttaaatgtaggcagagaaaaatccacattcccattacttcttataatctttcaccaaaaacacattttactttctttacacaccttgcatgtaaaactgtttctttagtagttttaattacatgttataatgttaactttttgcaacttttatttttggtgaaaaccttggtaagtaagagattttaattgtgtactaggtgtggagcctagcctaggacacaacaggcagaagtgcagataacagctgactctctagcatagctagagggcatagctaactccacatgtccacagggctcacccttacttaagcaggcaagttgtacagtaagagtcatagggcattgtatgaagcatttaggaggcctaacaatccgtgaattgtacaacatttcttgcataaaatcactttcataaatcctttcacaacttacacagaccatctgagaccatgtggatatctagcccaactccctggatcccaccagtctctaagttccaagaaggaagaaactttatttgtttttctatttttttcaagtgactagcacatgcatgaatgcatgcgggatgctctgtaaatatttgtgaaagaaatggagagaagaaagcaagacaggaaggaaagacctaaagaaaggaagggaagggtagagaagggaagacgactgaagggaaaggaagaagggtaagggagggagtctaagggaaggtatgggagagaagaaggaatgacaagctgccgaccattcaatcaggttacttccagagctgtctgcttccctgaggaaggaagagggtacatttcaaagtgttatatggtacttaagggcttggagctctaaattagctagacctgcgtttaagtcccactcagggctgggcaaggtggctcacgcctgtaatcgcagcactctgggaggccaaggcgggcgaatcacttgaggtcaagaatttgaaaccagcctggtcatcatggtgaaaacccgtctctactaaaaatacaaaaaattagctgggcatggtagcacgtgcctgtaatctcagctacttgggaggctgaggcaggagaatcgcttgaacccaggagatggaggttgcagtgagccaagatcaagccactgccctccagcctgggcaacggagtgagaccctatctcaaaaataaataaataaataatataaataaataaagtcccactcaactttgtagccatggacaaattatgtgcttctcttttcctcacgttacttatctgtaaaatggggctgatgggagatgtgaagacgttgcaacaatgtttggcacagtcagcactctaaatgaaagtctgtttagaaatttattaatttttaaaaataattatttatttagagacaggtctcgctctgtcgcccaggctggagtgctgtggcgtcatcccagctcaccgcagccttgaactcctgggctcaagcgatcctcccacttcagtctcccaagtagctgggactacaggcgtgcaccaccatgcccggctgctttttaaatttttttgtagagatgcggcacgggcgcggcaggtttcgctatgtcttccaggctggtcttcaactcctagcctcaagcgatcctcccgctctgaccttcgaaagcgcggagattgtaggcatgagtcttacttgcaattattggcccggacctggggaaatttgttaaaatgcagattctgattgagtagatctggtgtgggagccaagtttctgcatttataacaagcttcccaggtagcaccaatgttgctggtaaacagaccacactttgaacagcaaggggcccgcccctcgcttggcttgccgctcacccattggccgagagcggcagaccttccaccaatctgctcggctcagaagggagcgggccaaagcgcagagccaatgggcgcggggcttacggtctccgggatacgggtgtacacagcagcggcgtcgcggcccgcagccccgcggcggcggaaaggtaaccgacccgccctggggtgctgcgtgcgctgcctgctcccgcctgaggaaaacactgcccatggcgcaaggccgggagcgcgacgaaggcccccactccgccggcggcgcgtccttgtccgtgaggtgcggtgttcacggccccgcgaccgatctgggtctcgcggaacctcctgccccacgtcccctcctccctcctctccctccggttccttagggcggctttccccgcagcttcgacctcttcccctctgcccccagtgccttccctcagcctccctccccgtgtgacctcccctgtccgctccccatccccttgttccttgaccccgtccccagttgtctttcccactccttattctgcgaccctgaccctccgtctcttacccagcaacgtcccctgcacccttcatctcttccttctagctcaggattcccgctagtgatccgggtcttctgatcacatccccctccccctccacctggcgacagcccggatcccgtccttgctacctttggtgattttccccaaagttaggtccctgaatcctttccttctaactcctatccactagctttggatttatttgcatttatagtagcctttgaaaagcatcaagcactgcgcagatataggtggcattttttcccctacattctagagtgttcctcccagcccccacctccactctatacagcatcccctgctagtcctggacactctaatgtctcgaggtttctcaccaaaccagtgtccttcacttgccttttccaccatcttcaagcatacctttaatatttaaataaaaatagaatctccttcatctcctctcctttctagcatacacctagcacgcactccttacttgagagtatgttctttttgtgtgctagcctttcattcacgtcgacttcattccttttattttctacgtttatctgtatttttaaatctaaaatatggccacatactcttcatctgtgtaaataagcaattttcctactctgctaacaaccacaaagcaggctgtcctatgcaaagttgttttttaaagtttattttaaaaaatcaaactaattataaaagaatggcccaggatgccactgtgttgagatcaagctcttttctctgttattttcactttttgtcttccaagtatagaagaccccagaagtccttctgagactttctcaggtttggtcagagagtttcctttgctgaaaaagttatctgaagaaggcctgggagacctacggaactttaggtctacatttaaatttctataattcattgactcaaatggatctcacagccagcatgtgtgttcttttatcttagaaattgggggcagaaaggacatgaaaatagaaatgtttcaaagattttgatgaccctttgctttgttaaaaaaaaaaaagtatttgaaatgtattatattgatgttgacatatcttttcccaaagatgggtgcaaggattccctaagcagaatgttcattttgtcaacgacaacaccatttgctacccttgtgggaattatgtaatatttattaatattgaaaccaagaaaaagactgtactgcagtgtagtaatggaattgtgggcgtcatggcaactaacatcccctgtgaagttgtggctttttctgaccggaagctaaaacctctcatctacgtatacagctttccaggattgaccagaaggaccaaattgaaaggtattctagagaacccttcctctgcccataattgaaggattttgtttaaagagttgactaaatctattataagtgaagatttattttttgaaaggttttttttgtttgttttttgtgtttgttttgagatggagttttgccctgttgcctaggctggagtgcagtggtgcgatcttggctcactgcaatctctgcctcccaggttcaagtgattctcctgcctcagcctcctgagtagctgggattacaggtgcgcaccaccacgcccagctaatttttgtatttttagtagagatggggtttcaccatgttggtcaggctgttctccaactcctgacctagtgatccgcctgcctcaccctcccaaagtgctgagattacaggcatgagccaccacgcctggccccatttttttttttaatatacatttttaaagaaggaatcaagctgatcactgaggatttaaattatgttagctagagccttgctgttcaaagtgtggtctgtttaccagcaacattggtgctacctgggaagcttgttataaatgcagaaacttggctcccacatcagagctactcaatcagaatctgcattttaacaaaattcccaggtgattcatatgcacattaaactttgagaagcactgggctagaagactattgcctttttcagagcaatgatttttttttctttcctaatatttgttgaaaatccaggtgaattgatgtttgtatagcttctaaagtcaagtctctgagcctcaatttcctcattcatgaaatagggataaagatggtgtctaatgtgaaggctgcggtgatgatgatagatgaaattatataatatgctgtatgtgtatgtatgccaagtgctcaatgttgcctaccatttgaattattagtgtttattttatttattttattttaacagagtctggctctatcacccaggctggagtgcagtggcatgatcttggctcactgcagcctccacctcctgggttcaagtgattctcctgccttggcctcccaggtagctgggattacaggtgtgcgccaccatgctcggcttttttttttttttttttatgtttttggcagaggatggggttttaccatgttggccaggctggtctcgaactcctggcctcaagtgatccacccacctccgcctcccaaagtgctgggattacaggcgtgagccactgtgcccggcctaatgactctttcttagatacagctgacccacactgagctgctgcacgtctgctggagccaccagctaatgattccttcatttaacaccccatgggcagaaagctcatgcttgaggctggacttagctctgtagtcttaagggtcaaataagtgtttggatgaagtcagggaacttcactataatttataatactttgtttgtggtgaaatttgcattctcaacagtttaagacaattttcaaaacataacccattcacatgttggggactatctaggtggactataccctttatctttaaaatttccccaggttggttatttggctgtagttctgtttgaaccaattgaaagttagttcaaaccaatacccaggagtcttactgaataatgatgccctaaaggaattcccagtaatactaatcagtaatattaatcagagagacctgttatcactattatttaatatcaacctggaagttctagccaatgcaacaaaatataaaactgaaaaaaatatagctatgggaaaggggatgatggataatgcgatagtctgctaggactaacaaaagaatgctcagtaagatgctggttttgaaataagtacccatacaattagaacatatacatacttagaaataattcaaaaaaaagtgtgagtgacctaggggaagaaaactacaaaaatcattgatttaaaatatttaaatatatagaaatatattcctggatggaaagcctggttattataaatatatttctgagatttgtcatagaaagtaatttgtaggtttatcctatgttttagacagcaaggagtactcaaatgattccaaaattcatctgggaaaataaaacatagagaatgagaataatttgaaagagaatgatggcaaggcagagggtcattttaatattatggtgccatagtaattagaagtatggcactggtgcagggatcaccaaatcagtgggagagttgaagacttgggacagaatctaaagtatataaaagctgagtaaatgaagaaagaggctaccaccaaaaagaaggaggaagagaaggaggaggaggaagaaagaagaaaaaatatagattattcaacagtggttaagaaaactgcatattttaacaaaagtatcaagttagatactcatggtctatatcagatgaaaaaaagcattaaatataaataacaaatccacttgaaaatagtagaaaatatgggccgggcacagtggctcacgcctgtaatcccagcactttgggaggccaaggcaggtggatcacgaggtcaggagatcaagaccatcctggccaacatggggaaaccccatctttactaaaaatacaaaagttagttgggcatggtggcgcatgcctgtaatcccagctactcaggaggctgatgcagaatcgcttgaacccgggaggcggaggttgcagcgagccgagatcacgccactgcactccagcctggcaacatagcaagactctgtctcaaaaaaaaaaaaaaaaaaaaaaaaaaaaaagtagaaaacatggtagaatagaggagtgattccaggaaggggaagaacttttcacacaaaacaaaaacttagaaaagacagacatatttgattgtatatctgttttaaactgattaacatcaaaaacaccatgaaaaattaaaagggaaataataaaccaggtaaaatatttggaacaaatatgatcaaatattttcagagcattaatgaaacaagaacaaaacaaacagcctcttagaacaatggaaaagaaattaacccagacaaatcactaaactccaaataaccaaagacatcaaaaaatgtttcatctcaagatttgttttaaaaagtgtgatttaaaccaagatgctatttttctgcctatcaaggtcacaacttttttatgatcataattgctaggtagaatgcagtgaaattggtagcactcttatttgctgaaggtgggactataaattgatagagtctttctgtgaaataaatattgactctatttgacccagtatactcacttcaagacgaattcaatttttaggaaatggttagaaatatggtcaaagatttacatgcaaatgagcttaaaaagcactatgataatagcacaaggttggagcaacctacatctccagtattatggatatagttaaataaaatatactataaaggggtattatgcaaacattaaaaatcacacttttaaagaagtgttaagataatgataaaatggtcaatataacgtaaataaaaaaccaataggaggcaacactatgatccaattccatttaaaaatggattatcatatattatatatatatgacgagacagagtcttgctctgtcccccaggctggagtgcagtggcgcagtcttggctcactgcaacctccacctcccaggttcaagcgattcgcctgcctcagcctcccaagtagctgggattacaggtgcttgccaccacacccggctaatttttgatttttagtagagacgaggttttaccatgttggccaggctgctctcaaacttctgacctcagtgatccacctgccttcccctcccaaagtgctgggatttcaggtgtgagccatctcgcccggcctcatatataatatttaatctatggctagtatagctataaaaagcaaagttatatttaaagaaaatatatatgtatgtattttttcaagtaaacacagaagaaaagactagaaagaaatttaccaagtttggtagtaggattatagagggtatatttttctctctttttttttggcattttcttcaaataccatattttctaagatttaaagaatatctaaagttggtcatcttcaattgtggggggaaacgtctgtttagcaagcatttaaaaatcattaagatctctgcctacagaaaaactagtttttgtagtgaatgctcaataaatacattttttctttgttgattagactatgctaaatatattcaataaatgacaaaagcaaaattttaggattatattatggtcaattaaaatgagaatgagaaaaaaagcagaaaacagctattaaaaatccacagaacaagcaatagagacacaaacatacaaagacagactgagatgagggcaaagcttgcacctgtggaaccccactgaagaacagcagatgaagaagagggaaaatcagaccactctgtactgggaagcagagacaggcgcttcttgttttggcctccccatgatacgcattttaaaacatgttgttgctaagactttggaattcatgttgctttttgtcaactataggtacaaaggagtatgtcactttttatagctgttccaaaagctggcagatattaagctaagggccagatatggcctaagataatagaaataaggaagtaagctagaattattacaacttcccaagatatttaaagatgtctgaataactattctaattacaatgtctcatatatttatgagattattcttgggtcatttcagaccatgctgggacatacatggtgcggtatgctcagttctgcattgaagtctagagacagtaacctaatggtcttaattcactttaatatattttacaaatggatcttagctttgctctaagctttctgttcatggtcttagaaattagccaggatctttcttattctaatagttaaatgcttttgaattacgtgaaaatcattagcaaaggaaaataaactgtaagaccatagttaactgaacatggtcttaacataatcaaatcctgataatggattttatattttaggcaacattctcctggactacactttactttcattcagttactgtggcacctacctggctagttactcctctctcccagaatttgaactggccctttggtaagtttcagcatcctgtggaattccttttactgggttacattttcctcttactcttctggattttatcgaaggaaatagacatgaaaaatctgaaacaaggaaatatagaaggaaaaaatgccaatcacaagttttaatacagttgctatgtttaggcataaaatttggcagtcagagcaaaaactatataagaactaaattagttattgtcattctctttcattaacatgctttatgtattctcagatagagaatatatttataaatacataaagtttcacttaaaaaaaacaaatggcatcttggagttgttcgtatgtttcctgctaatattgaaattgagatggtctctatattagagttcagtttaaagtaattgttgttagagacattagaacaattatatgttcagagagtggaacattataccacttttgcccactgtatgggaaatcctgtggttaagacacatttctagtctttcctggatcatttcacgtggccaactttaaggctatactcccttttctatccatgatataagccccttcaagaggatatttttcttattaaggggaagtacaaaatattccagaaatgattaaaggataacatactaacatttcttatacaaaaatgtaagtacctagattcagggagccacatttagtttatgtaaatttttttttttttttttttttttgagatggagtctcactctgtcccccaggctggagtgcagtggcacgatctcagctcactgcaacctccatctcccaggttcaagcaattctcctgcctcagcctcccgagtagctggggttacatgtacccgccatcatgaccagctaattttttgtatttttgtagagacggggtttcaccattttggccaggctggtcttgaactcctgacctcaggtgatccacccaccttagcctcccaaagtgctgggattacaggcatgagccaccgccctaaaatttttttaaaacagctttattgaggtataactaacagataatgaactgttcatatataaggtaaatactttgataagttttgatttatgtataaacccatcaccgtaatcaagataataaatacatccatcggccaggcgctgtggctcacacctgtaatcccagcattttgggaggctgaggtgggcaaatcacgaggtcaggagatcgagaccatcctggctaacacggtgaaatcccatctctactaaaaatacaaaaaattagctgggcatggtggcaggtacctgtagtctcagctactcgggaggctgaggcaggagaatggcgtgaacccgggaggcggagcttgcagtgagctgagattgcgccactgcactccagccttggcgacagagcaagactccatctgtaaataaataaataaattcatccatcaccccaaaagtttccttgtgttccttcagagcttcttcattagcctttgtcagtaatgtagtttctgtcactctagtttgcattttctggtagttcatatacagggagtgacacagtgtatattcttttgtcgggcttctttcatgcaacataattattttgaaattatcttatgttgctgcatgtatgtgtcagtagtcattcctttctattccatggtatggatataccatactttattcacctgttgatggatgtactgtattagcttgctagggcttctgtaacaaagtatcacaaactgagtgtctcgaataacagaaatgtattatctcacagctctggatacacaggataggaagcagctgggagagatgacaagtgcataaattctgatagttccaaaagcagaaggctccaattgtccttactaagaacaatctgtaaatattaaaaaagcagtgaagtggaatgagcacaaatgtgttagtgtaacagacttagacctgaatcctggctccacaaattactagctgtgtgatcttagaaaggctgagccttagtttcttcctctgtaaaatgggtacatcaatgtctcctaaatatggtttttctaataattcattgactaaaagtatgcatcatacctaatagtgtctattacattatgtttatttaagtcagagtttcaaaaatgatgattgttaggctaattctgggccaccagtgtatttttttttggccataaaatatttttaaaattggaaaaatttagagaaaaagttatctgtataacctttctcaaacacaggcaaccctggacctgtattcccacatggtcacagtctggttgggctagtaagtgggtgctcattctacatgcccaccaccttgagcaggggttggtaaacgatggcccataggccaaatctggcccaccacctgtttttgtaaagttttgttggaacatgtttatttgcttatatattatctatggctgcttttgctctatgatggcagacttgagttgtaatagagcccatatatggtctgcaaagctaaaaagattaactgtctggtcctttatagaaagagcttgccaacccctatcctagaggtgtttatactcagtacatttcattcatttacattaacttcctggcccctataagcatttgagtttgctcactggatttaattcattcaatacatttgtatctcctgcttcctgctggatataaaatgtatctcaggtacattttaggtatatctgagccttctgtagagggcatttttgataagctgaggtgagactgagactatgggtaggtagtatctcctcccggtcccaacccttcccctagatttgtttgcatgtcttaatattcatgcgcacttctatttaggaaatttgagtcagaggggagagacaagggggcaggagtgaggagggcaggggaggacagggtagatgctgtgcagaggaccagacactgctctctcatgaggagattctcagtgaggctctgcggcagcagaggtgccctggggcccaagaatgagtatgaacagagctgggagacagacactcttccagcctctgctgtggaaacccaagatgagaagctttgggagcaaccccgatggcaccctcgggtgctgcatagaaatgtgagtgggatttaatcctgtgatgaggcccaatagtcctcttcaccaagtagctttgccagcagtgggcctaaacacgagggagctagaagatgaacagggaggaggatgcaactcacttggtgacagcagttagtccgtggaccctggggactcccagaaataatttagtaaaagttcaaaagaggtgaaacttctggaagtcagaccaggaggagcccaagtaccatgatttgactcctggaagtaaattgatctaagaagactttacctttatgttctaatgttttaaaagagcagaatggattcatatattatttgtgtaattaaaaataacaattctgaaaaagaatctaaagtaggtggggaatggtctcatggttatagtcccaggctggtggggtctgggacatctggggttcataagcaaagacaatgtgctatacaccagcaataccaccaccagcagtttcatcagagaggcattcactgagatttccaatgggttagtgcatttaatccctgcctcccccctgcagcaacccccatgagacatctatgatggtcctcattttaaagaaagagactgaaacttcagagagatgggatgttaaaggagaattttcaaacagattataagatgtaagatggtttcatataactccttaataatggaaccagcaggaaaacaaaagaagctggtccctgtcttagtaagctgtcacaaaatcccatagactgggtggcttataaacaacagaaatatgtttctcacaattctgaaggctagaaattccaagatcaaggtgccagcagcttcagtttctggtgagggcctgcttcctgattcatggatgataatttccaccatgtcctcacatggtagaagggatgagctagctctcttttataaggacacttatctcaaccatgggggctctgcacccttgacctgatcactccccaaaagtcccaataccccaataccatcaccattggggttaggatttcaacatataaatttggtggggggaggcagcacacaaacagaccatagcaattcctgagtgcttaaaagaacacacacacagctgggcatggtggctcacgcctgtaatcccaacactttgggaggccaaggtgggcggatcacctgaggtcaggagttcgagaccagcctggccaacatggtgaaaccccatctctactaaaaatacaaaaattagccagagtggtggtgggtgcctgtaatcccagctactcaggaggctgaggcaggagaatcacttgaacctgggaagcagaggttgcagtgagccaaggtcatgccactgcactccagcctgggtgacagagcgagactccgtctcaaacacacacacacacacacacacacacacacacacacacacacgctcactcatatagagttagaaaaagtagtggttacataaaatttctaggttagatatgtgaatgattatctttccagaggtctctaaaaccttaggaccttaaacttaactgttctaccagggcatacaatcatagcattgaacatgttctagagtttaacctgtaaaagcatgcctgcctttatcacatcgaggctgttagtatgtattatgacaacaaagttacattccccaggagtgtcagatatggggcaaagcaaggtacaaagtctggtttttgttcgaggaggcttgctggaaaatgcttcccagcatgatatgagaaatcaagccaacacaatttttcttttttccaagtttcattttttttttgttcttatagctacttgcctaaacttatatagttggtgagttgctgagtgggctttaaactcatttggtttctaagctcttttatagctttcattgatctaaggcacaatgggaacctgtagtaggggcatctcacatagtctgttggtggaggggaatggtcagggaaggcttcctggaaggagaggtaatgtttaaacagatacttctattaattagctaggcctgccatagcaaagtaccacagactgggtggcttaaacagcatgcgtatattgcctcccagttctggagactagaattctgagatcaaggtctcagcaaggttggttcctactgagggctgtgagagagaatctgcccccgcgcctctcaccaacttctgctcacttgtttgctggcagtccttggcttacagacacatcacccagatctctgcttttattttcacatggcattctccctgtgtgtgtctgtctccaaatgttccctttatataagaacaccagacttattggattagggcccatcctaatgacttcattttaacttgattaccctctgtaaagatcatatttccaaataaggtcacattctgaggtgctgggggttaggatattaacacgggaatttgggggaggcacagttcaacccatagcaatacctaaaggatgaacaggaatcagccttgtgacgagaagaaagaacatcctaggcagaggaatggcatgtgcaaaggccatgaagtagaaaaagcacagcaggtttcaatgaaaaggtcatgataacgggaacaagagatttgccatgagagaggcaagcttggagggacagtcagaggtgagcttatgagcagccctatatgtaggtgaccatgtggtttatcatccaaatcaggatgcttttgagagtgaaagagggtgttgctgatgaatgcagggcactttagcctaaactgggtttctcctaggcatactgggaaggatactcacactccatataagctaggctaatggacaaattctttatcctaaaggcagtggggagctactaaagggttttaagcagggaagtgacacaattatatctgcatttaagaagattcctttcagccaattatttccaatgaaagtatctccaatactttcgtactgtggaaggtatattggaaggaaacaaggcatgaacatcaattaggaggctgtggtggtccaggtgagagatgactgtgtcatggactagggtgggagtagggatggagggaagtgaaactatttgggaggtgtttaggaggtagcatcatgagacttgtaactgactaaatattgggtgtcgtgctgaggaagagggatgggtctagggttatatccagagttgcgtgtgacttgggcaacttagggacactctgatgctattcagagagatactgagggcttgggggcagggaatttaggggaggcaatgggggaagatgagctgggggacaaactgaactgagagtgcttgagatgaacaaacggagatgtctagttggcagctgatatatcagttaggacttaggttcatttgtggtcacagaaacccaaatcaccaacatgtgtttccttctgtcacatgcagttgtctgggcacgagcagctgtggttggtgtggtggctcctcggggtcagcgtccagtctcccgctgtcatgctgctcggctgttcctagggtgtttctctcatctctggtctataatgggttaaatagtagagatgagggcaacaccctaggaacagcagaggaaccctaaaccaccggtgtattttgggagccaatggggagggaaaaggatgaggggaagggcacaaaccttctgttgaaatgcagggcttgcatgaaagagatcattgcctgacccagggactacctcaagggcttttggtgaggacaagtgacagtaggaagatgcaagagcctttagtaccaaggttctcaacactgactacatgctggaatgacttgtgaagcttttaaaaaatgttagtgcccactcttcccctctcccctcggccagttaaatcagaacctcagagagcaatgtgccttgagatgccttgaaccactgcttgagaaggaaggacaaacacattattaccttggaagaattgcataaggcttatgacttgaaaaaaaattctttttggaaacacaagcatttctttccttttttttttttttgagacagagtctcactctgtcacccaagctggagtgcagtggtgcgatctcggctcactgcaacctctgcctcccgggttcacgccattctcctgcctcagcctcccgagtagctgggactacaggcacccgccaccacgcccagctaattttttgtatttttagtagagacggggtttcaccgtgttagccaggatggtctcaatctcctgacctcatgagccgcccgcctcagcctcccaaagtgctgggattacaggcgtgagccactgtgcccggccttggaaacacaagcatttctttaagaatgaccaggtgttgccatatgtatttacggcgcaagcaagtgttgtctaagcagtttctctgtttgcttgtcatagcgacatttagaaactcgaacatgctttcatttatgtaaatagtttatgaagctttgacaacaaatgtaaacagacctgaaattataaatctgctaaatttgtattaagggtattaattattgagagaaagtccccttcctccacactcaactcctatggcaattatgaactccattttacccagaacacttaagtgcctcagcatctgtatgatacagtggagcaggtgctggcataggtaccagctgacctgatgtatcactagctctgcaggatgattgccacatacatggaacacctgggagtgctggaaatgtaccgggatcgaagctacaaagtgtgttttcattcgcagtggaggccatgtcaagcaacggaaggtccagccctcttgcgggtgtggtgagaggctctactagcaaagacatgggtgccggagtgggtcctatgtagcatgcgagtgctgtagagaaaattcagtgatgtacatggctctgatcctggacacaaaatctatactggagaggaaatgactgctgaaataaggaaattgtatgaatatttaaaatgcctggaacactaaagtaatgatatttcaaaaagaaagaaaaagaaagaaagaaagaaaagaaaagaaaaagaaagaaagaaaaaaatgcaaggcttggaaggtgcacacatgactgccactaacattcattgactggctcggccataagccacagccagcttcaagggtggctaggtaatattaggtcctcattgtgagtggccatatgtgcctggctaatattcagggggttctgttactcagagggagaaatggagaataaatgctgagggacacatgcccttgccacagatatccaggactggtgctcaggagagagggctggagataaacatttgggaataattaagtcaatggatagccaaagtgtgaaatgtaagtaagaacacctcaagaagagcctagggtggaaccttgaggaatatcaatggaagggacccacctaggagactcataggagtagctatgaaaggaggaaggacactaggcagggagggttccagaatgtgcctcagcctggttccttggaaagcagaggctgaggcaagagctcatgcatcccatctttagcagggtgtgtgatcccagggcaggagagccagtatgagggcgtattaccttgctggccaccacttggtaccgagtgcaactggttactctatctcgaaggtggtcttctgagaggttctatgaactgctgtgaatcaggacagtcctcaggcagtgacagactgtgggtggggaaggggagaggaggagatgagaatttatccaccaactcctgtatcccatcgattgaagcttcactgcacagggtggtaattccttcacactttcaggtttgtcgtgattgtccccaggagccccagtgaagccccagtgaagccactgggcgtgtgaagtgggtgtgaggcgaggcacaggtggggtgtgcctacatgaagttagtcaaagtgcacacacagttggacagccactgagtcagcgaggcagaagacggggtcaagggcccagacacaatagagaggatctgtggtgtcccataagaggtgtgtgacagagagtctaagagtgattccagaaggtggttgtggtgaacagtgcccagttctgcagaggtaaagttaggcaatgactgagaagtgccttttggatttaggatgaaggcaggtatctgtggatatagctatgtcaatggaatggtggtgacaggatgcaggtatcctgggatgaggaaagtgtagctgaggaagccatggcggtgactttagaacaacttgctcaaaaagtttgactctgaggagaggggagagacatagaaaggtaagactgagggaaggcttcttttgaggatggtatggatgagcacttgtgtgttggcaggaagaagtcaggctagagggagagttggaagatgcagttatcctgagtaaaccaatgtccctaagaaggcaagactgtgggacccagagcacaggtggtggaattggccttaggtaggaggaaggacacaccttccattgtaaggggagaggaggcggagagaaccatgcagacccaaatgggtagttatacttgagagcaagaattctcagctgatggcctctattttattcatgggaatcaaagccatttactgagattgagaagggagtagaggggctagaggtttcgggagaggggagaatattttaaatgcccattttagagaatgagagagagagaactggccagagaaacatagcaggattggagatcctattgagggtctggtggggggtggcaaccacaagtttatggtgtcactgccatgcacagtcctgtagtctttgttcccatgtctctagcagcccaggctttcagttgtctccatccagggatgacggtctttgccaggtacctgatgcaaaaagtcaaaggatcaagggaaccagagattccagcaagagtgtggttgatgtgttgggcagggcatttgtgatagggaatgaaggatgagggcaggagggagtgaaaggcaagctaagctcaatcaatattagctccagtttcctaatcacaactctgaatggagttctggcccctcatttgagggcatagctcacatttaatttttttcttttccttcatctagcaagggactttgttcatggtaggagttcaggatattctcttaaatgggtaaatgaataaatccattttaaaatacaccactttatttatttatttatttatttatttatttatttatttatttttgagatggagtcttgctctgttgcccaggctggagtgcagtggcacaatcttggctcactgcaacctccgcctcccaggttcaagcgatgctcctgcctcagcctcccaagtagctgggattacaggcgtgtgccaccatacccagctaatttttgtatttttagtagagacaggtttcaccatattggccaggctggtcttgaactcctgacctcgtgatccacccgctttggcctcccaaagtgctgggattacaggcgtgagccaccgcgcctggcaccactttaattttaaaaactcaataaatgatcaattggcatcgatgagaacagtacccccagatccatatggagtactcacatgtagtacttacagattcaggcacttacacttgttttgtagcaaatgtgatgatatatttcattttctaggtttggctgagttaaattgcaaaattattaaagaagataaaatagccttggtatagcatatgacagtatagtgtttttaaaacatagtttttttgctttcttaggatacaatacaatgataagcataagtatttataaatttgacattaaggtcattgattatataaattgtatcataaattatatcccaatttatgtaaattaaaaaatagataaatgttctaaatacatgaaattcaaatgaactttttttcatcaaatgctatttttctctaaggaactgggaatcgagtatcattttgtgtaagaaatcacagcctggaatggatgtgaaccaaatgtcttttaaccccatgaactggcgccagctgtgcttatcaagtccaagtacagtgagcgtgtggaccattgaaagaagtaaccaggagcattgtttcagagcaaggtaggagcctttgttacaacagtagcaacatggtgctctttgtttgcattcgtgtaatgtgattgggtcaatttgatgaattaagtggctttatacatacatatatatgcatacacacacatacacacacatacgttcagcttatcttgttataacatctttctacatgcgtgattaccttggagtggttgtttgcatttcaaaagaattctctatgacttgtttcccaattaatttatttaaaatattaagttctctgagagctttttccaacatgatctaattttctaaaattttatttgtccttactattttaaaacatgcctgttgtataaaaaggagagttaagacttttgctattactcagatgccctactggaatttcaaaaataagaaatggttagatatagaaagtatgcagattggccgagtgcagtggctcacgcctgtagtcccagcaatctgggaggccgaggcaggcggatcacgaggtcaggagatcgagaccatcctggctaacacggcgaaaccccgtctctactaaaaatacaaaaaattagccgggcatggtggcgcatgcttgtagtcccagctactcgggaggctgagacaggagaatcacttgaacccaagaggtggaggttgcagtgagccgagatcgtgccactacactccagcctagggacagagcaagattccatctaaaaaaaaaaatatgcagattatacattcagacacattatccgcaagcaaaagggtagttgtgtatagtggagccatgggagttacctgtttaaatagaactgggtcaaagagaaattctgtgacaaatgccgtggtgataatgggtgcttttgttgagaaagagctcggagactcaaggtgctactgagctgaccattttcagtgtactccatgaagtcaaagttgaagagatgttggatctcttgatttttaagagatctcaaaagtattcccttgaaattgcaattttgataaatcgccttaagagaatctaaagctagtaaataaagcttttgaaatggagagccttaagagaagcctttctgctcagtgctctttatgtctcaacttctttttcacagtaacccattgaatagccaaatctgtctctagtgagagttgacaacactgcaccttttaataaaagtgggtgatatctctatcagatccttgtgagggcaggcaagtaatttatcacacccttttctccctttgcctccctcaaacgttctactcaagttctgaatactgagttgtgacttttctgtaagcaaataaaatgggagataaaacgagtggattgtcctagttcacaaagcaagcaggattcaaacacacttcagccttacatttgagtagtaggtgctgtttttatgtgattgtttttcaaaattgtttatcatttataaaatctaggcaaggaagttttgaatttaatgcatgaaaccacaaattctctaaattaacctttataaccatattataaattaaaagtagatatatgataaatttgaaaatgaactcaatatcagagattataaaagtagctgaatacagcctgaatatatgtttaaatatatatttattttagtctacagtgtttttcatttgaattagttgccaacatttaaagtttaagagatttctcataaatatccaggttatagtattctcttgaaattttggaatcaaaattctcacatgtcaacaaccctcttggcttgaactgagtggtccctgccaccttgaggagggacaaatattttcccattttccactgtcctcaccagtcacatatcacctgcccgaccctcatccagtattcaaatttacaactcctgctttagatattaactttcaaaaatttttataatccctcagtacttaatttaaaactgtgtaacttgtctttttacaacctgttatatatttttaaatctatcatttggcttttatcttcttatttgatttttgcaagttataatacctccccacctcacttaaactgatatgcagtggttgcatcaataagaagtttctgttcatctcattgttctgatgcctcttttgtctacaggtcggtgaaattacctctagaagatgggtcattttttaatgaaacggatgtcgttttcccccagtcgttgccgaaagatctcatctatggtcccgtgctgccactgtcagccattgccgggctggtaggcaaagaggcagagactttccgggtaattacctggcacctcttcctgtttgcctaatgggttgaggtctaggaagcctgatctcatttgattggcataaccatcccttgagaaatgcaggatacagaggatcatcttggtttttaatatagattagccacagagactgtgagagatgaagactctggagttttgagtttggatgactgggatgatgacggcattgctaacagagacagggggcccaggtgtgatttccattttgggcatactcaatttggggtgcagggaagacacctaggtggagatgctgggcagaagttgggaaagtggacctagtgttagggaggagaggtgggactgtcagtgtcattctcacagataggacggtgggagcactgaggggatgtgatgagcaaagagagaaagggtgcaagggaagaaaagagagccagagccagctgactgctgaactcaggggcgaaaggaattctgagaaggcgcagtcacagaagtaggagcaaacccgggagggaggaacaaggccgtaggaaacagcagaagaaagtttcaaaagggagtttgccaggtgttacacacccattcattcattcattcattcaacagagatttatcaagtttcttctatggagcagacactgttttaagcaatgggattcgcatggtggccaagcaggctccatgtaattctcatggagcttacattcttgtcagggagacagaactacaacaacaaaagtaaagagtattgttcttttgtaataattatcacattttgcaatgatatattgaatcattacaaaatgtggtaattattacaacagaataaatggagacagggcagcaaggatgggatgggctggttaaggaaggcctctggggagatgacacttaagctaagatttgaaggacaaggaggcattactcatgttacaagcaggataaagagtgtttcctttgggaggccgagacgggtggatcacgaggtcaggagatcgagatcatcctggttaacacagtgaaaccccgtctctactaaaaatacaaaaaaattagccgggcatggtggcggacgcctgtaatcccagctacttgggaggctgaggcaggagaatggtgagaacccgggaggcagaacttgcagtgagtcgagatcacgccactgcactccagcctgggcgacagagcgagactccgtctcaaaaaaaaaaaaaaaaaaaaaaaaagagtgtttcacgtggaaggacctgcatgtgcaaggccctaagggaaaaagagaacttggtatgtgtaaggaactgagaaaagatgcatatggctggagcatgataaatgaagtggaagtgaggtgtggggtgctattcaagagacaggcagggaacagagggcagcacctgcaagacctttgggatgaagggagaagctccacttttttggccctcttgaacctgctatgctttacccttgtgttaaaaattagctgggcatgatggcagatgcctgcaatcccagctactcgggaggctgaggtgggagaatcacttgaagccgggaggcggaggttgcagtgagccaagattgcaccattgcactccagcctgggtgacagcgagactccgtctcaaaaactaaactaagctaaactaaaataaaaataattcagtgtgaagattagttcattcaaaaatctctgtggcaagcaagagaaagggttacatgcccttaatatttcctctaatgaatgtcaatgattcacctttttaaattatggaaagagattatagtcaatctcctgcattcgtgggttccacttctgtgtattcaacccactgcagatcaaaaatattcagaaaaaagttgtatggttgcatctgtactgaatatatacacacttttatttcttctcgttatttcctaaacaatatagtataacaactatttataaaacatttacattgtattaggtattataagtaacctagagatgacttaaaagtatatgggagaaaaaataaaataaaataattaaaaataaagaaaaaatttacagggggatgtatgtaggttatatggaaatactatgccattttatgtaaggaactggagcatccacagattttggtatcagtggggggtcctggaacccatcccctgtggatactgtagttccttttatagcacaggtctcagccttggagatataactgcattcagccacagtggggcagcaaaggaagaacaaagagatcagccatcaaggtttgcaactcaaatttttctatgtttagtatttggtgccagagcccctaaatttctactctctcaaattgggtttttctgggcagaaaatatgtgtaggagcccttatatttcacattttgtacaaacataacgaactctgcataaaacatttaaaattcaggcaattgtccttgtcatttgagaaatgctatgaaatgccttctttaaatactcaaatgtggagttattattttaaaatgctcataatagacatctttattttaaaaccttttttatttgtataaatttaaggggtacgcctgcagttttgctatgtggatatattgtctgggcagacatctttatttcctaggacttgtgcactcagtgtattttaaatttttctgaaagcagaaatgtaatattatagtttgacaaccctaaatcattcatggattattaataaagccatatattttgtatttaagttagacattttcccagtagtttactttttcattttgtagcaaaataaagtgaggaaaatgtttaaaacattaattaatgtctgtacaatgagtgaaagcataaccaaaaatagatctcaaatgtcttgattctattccctccttcaatgtcatttcttgtgacctgggtaccaatggcaagggaatcaataatgactcgatctgtataaggtcttaaaaatggataagttgtggacttttaaaaaattacaaacatcaaataatcccattatctattcatagctaatgccagaagggtacattacaggactttaaatagccctgagtcacattacacaacttatttagggcgttagaaatgtatccagttttaagtcgtagcatgggggaaatcaaaggcagatgttatctgggcagaaattggatccaagatcatgaacttaatctcaagtgtctaatttctattttccatctacctttttaattttttcaaacagatgttgctaaataggaatctcttttagagactcaaatattttgaaatatatatggatttttacattttctaaagcaggattaaattggactgcaatttttcatgttttgtcatcatgtgatcaaaatgatttctgattctagaggactgaaaaaggagatgatattatcaacaaacatttctaaacactactggtaccctttatttttaaatatctcagaattataaactattgtttctgcttacataatccatatactcacattcatttttaaatgtcatcaaatatatttattgatgaaaaagtaataggaagacaagcccaggtttgtcttaaagaaaaaaaagccacatacaatactagtttaacataccaaggccagaaaatttcaaattttaatcttcacattttgttttatacacacagattcactggtattgtgcaaatgagagacatggtgttttgttgttgttttgtttaagattttgatcctattgtcatttcagttaagtctgtctttgtgatttatagtttaaggttagatgtcataaaaaaaactcaggaaacttttcaataatggtgataacggtgaataactctcttccttatgagtcaaatctcaatcagacaccacagaagtgtcactattcagcagcagtttaattttttggagtgggaaaggtggtttgcctttttcttgatccactgggtgaccagattgttacccaactatttattttctaactatctaaggctatgagggcatgaaaggtacaaataataaattaaagtcagtctgtccttaaaaaaaattattatgatgaatgctcaatgttcctatgttttctgcgtctatggggttaagtatggttcctttttgtcagttgttctggtgagtatttctcaggcttttagccgtgattgttttcttaacacaaggttttattctctccctgaagccgaaagatgatctatatcctttgcttcacccgactatgcattgctggactccaacaagtgacttgtacattggctgtgaagagggtcatcttttaatgattaatggagacaccttgcaagtgactgtacttaataagatagaagaggaatcgccattgggtaagaaactgtcctacttcatattcctgtatagccatgggtgttggtttttttggttttccctatttttctctttcttggagacatctttgaatcctccttcttcttaatcctctggctgttactgtgctgttggcattctaccatcactttatatgcatatttcatgtaatcctcagaacaacattatgaggagagacaccttaatctccacgatacagaagagatatgttaggaaacatggcccagtccacgtaaactgtggagctgacacctgaacccaggcaataatacctcagagtccaagttcttggctactgtgctgtatccttttctatacatatgcccattctgcttagtctgctaatcataccctttcctgcccccaccccaacccttttctccaggctgatcatctgttaagcccaaaagccatcttgaaaattacctttctattgctcggttagaggtgttgtttttttggtttttttttagacagagtctcattctgtcacccaggctaggatgcagtggtgcaatcttggctcactgcaacctccgcctcctgggttcaagcgatctcgtgtctcagcctcccaggtacctggaattataggcacacactaccacgcctggctaatttttgtatttttagtagagatggggtttcgtcatgttggcccggctgatcttgaactcctgacctcaagtgatctgcctgccttggcctcccaaagtgctgggattacaggcaggagccaccacaccctgccatattgctcagctagaatttgaaagataacctgatctattctgccctagatatagtgtctattcctgaccctatcagctgtggccatggttgggcctgggccacaggagccactgtccactcattgagcagtagatgtagaccctgggaggagggggccttgccaagacaagctcctcaaacctgtccaaagcactctctatttcaattgctcttactatttcacaccttgatttctgtaacaaccttaggatggacttcactgaccttaatctacatctgacccaatctatgcagtttatctctgtcaaattgcctctttgaaggccacttttaacacccagctcaagaactgctctgccttgatttcacgctctccctaatctgatcctacctactccattaatattatttccaactatgccctggtatgagttttctgagccagtcatttattttcaccatttcacagacatgcctctagcccattcccttggcacttactgtctctgaatctgccaatgcccagctcaaataccaccccctccagcaagttttccccattgcattgtccctcatctgccttttttcctattctctgactcactttccctgtaaaactgaggccatgaggtttcacttccctcccaactccctttctctcttccctttactcctactataccctccagccttgctcctctctctaatctagcatctatgttagttacatagatctgatgatagagaattcaaaaacaacttataagatttacatcagtaaaagtagcttttattattcattgttacattgtacttttaattacgtcacctgctttaccttgtttttcttttccagaagacagaagaaattttatcagtccagtaaccttggtatatcagaaggagggcgtgctggcttctggaattgtaatgtattctttttttcaaattaattggtttaaagaaaattcacaattcccatttgttgccatttactattatgagccatattttaggatgtcagatctgtcacattattaattaaaatggtttcctctttgggtactattaaaaaggatttattatgaatagcttcaaatctatacaaaatagaggggacgatataatgaactaccatatattactgcaaacaaacacaaatagaatttaaaaatccattgcccttccgcaatgaaaaaatacctaatatctgtaacccaattccatgctcatttctacacttaatgtattagcttatcagacacgaatttggaatcctttgtctaagctgcagcttagactcttgtgaatgcccatttaacttacatgtatcataatgttattgttgatattcgaatcagtattaatagcctccatttacttggtgcttgctttgtgccaggcaccaagctaagtactttacttgtattatcttataggtccttacaacaaccttatcaaatagaaactattgacatcctccttttacagacaaggaatctaatctcacagagttcaccagcaagtaattggaagagttagggcttgaacataggtgtatcaaactccaaagtctttgctgtcatttattagaactcagcctcagtaagtaataaaaggggtcagaccatatttttctttttcttttcttttcttttttttttttttttttttttttgagacggagtctcgctctgtctcccaggctggagtacagtggcgcgatctcggctcactgcaagctccaactcctgggttcacgccattctcctgcctcagcctcccgagtagctgggactacaggtgcacaccaccacgccctgctaattattgtatttttagtagagacggggtttcaccgtgttatgcaggatggtcttgatctcctgacctcatgatccgcccgcctgggcctcccaaaatgctgggattacaggcgtgagccactgcgcccggcccagaccatgtttttccatgccattgtaatcaatgtaaacaatgctaaggtgtggaactgacctacactaaaacataggtctagttgtaactatcccagatgttagcatagtccatttcactgccacagatgacatctccaggaccttgagggtagctaggcagtgacatcagggtgagagacattttaccctcaggaagccatctggagcacatacacctacacttagctcccccaaccttgcagtggactatcccctcctcctcctccatttagtcagcatttgtgccttttatgactcttgtcctcttcaagaccacccttgatgtttgtttaaccccctttaaagtaactattatagcatttgctctggtgagtgatggagaatggagatgagctcaaaaaaagcaccttgcctgctttcccttccagggcccaagcatttgaaaccagccatctaaagtccccatgcttagttataacagatctaatctagaaaatgataaataaatttcctcagagtgttttcactattgtaaaaataactcaaattcctcttgagaataataaaattaacctaaatctattcacaaccagccaaccaaccaacccgtttctattggatacttgccatgttctactactgtgtgaggaacagaaaaagaggatccgaagggaataaaaggcacactgcctacccttgggtcatttagggagataagaaatgcacataataatgattaaagagcatacaggagggctagtgtcctttgaaggaaagaaactgctatacacaagccacacaaactctacttcatttttcctacctcctgtgcagtgaagaatgtagtaagaagagggatactagagaaactcaaaaaaaggggaggtcagtaaaattttaggtaattgaaaaatgcatcacaaaagagatcagactgaagcttgaccagggaacatagttaaaagttgtctaaataaagatgagaggacagtgcatctatgcaaacatagatgatgattccaaataagcagtagaagtaatcaataagccttagcttgtctgatgaggcaagtatactatgcattgactaagactgattttctatgtttatctcactcatctctaggatggctttgtgtattcttttattattaaagatagaagttacatgatcgaggattttcttgagattgaaagacctgtagaacatatgacattttctcccaattatacagtgttgctgattcaaacagacaaggtatgttggatggtaatttcttgatatgtgattttcagatagtattattatcatcattacatgacaggaatgaggagcagagtatgctgcacagtggtactctacttgtcaagactctaggttgtaaatgaaaaaatacccaatttaaaaggcctaaattacaaagagctattggtttatttttgtgcatgtaactgaaagggcaaggagtgaatctgaataaaagagctaccatgatgccaccaagccttgtttttttccatctcttggctctgtttcctctctgctgcctccatttccatgcagactctccgcttatggtgttaacagttatatgtagctctagattatatttctgcctgcttgatgtccctggtggaaagataccagctagaaaaaaaatcttggaatctagactcattggactgactgaatcacgtgtctaccccgggtcaatcacttgcaccataggaatcctaaactctgattggccaggcctaagtcaaatgcatagccttggatgctgggtagagtcaacccacttaaatgagaactgagattggggcataggttgttctccaaagaaaatgtgtgttctataagagaagaagaaaaatgaattattgcaagattaaaacaaacatttacttcaattatactgctaggaagattcctaattaatggaatgatcttcagacatcaagattagcagatatttatattgttagacaatcattttagatgaattgcaaacaaaattcaatgactttctgcctgaaagaaacttaaatttaagtatggaaagacttttgtttctgataattaccagaagttttttttaaaaaaaaaaaaactatgctaacttatgttttaataaataaatgactaacttaaaatatctatggagaataggaaactaggaaaaagatatcataaaagaaggaggaaagacccaaatagaacttctaaagaagaaaaatacactagcaaagtaaaaattaaatgaacatgtctgacaaaaggttggacatagccaaagagagaataaatgaattcgaagatagatcagaagttattcagaatgatactagaaaagcaaaagggtaggaaatacagaagggaacataagagataagaacaatacagtgaaaagatctaacatatgtttgattagagtccagagaggagaaagtgggacagaggcaataattaaagagatattgactggggatttcccagaattgcttaaagacatgaatttacagatttaagaggtccagtgaatcccaaacagaatacataaaatgatatccacacttagacttaccagagtgaaactgttgaaaaccaaagacagagaaaattttaaaagcagtcggagaaaagacagattacttctaaggaatttcagttagactaatagctgacttctctgtggcaataatgtaagaaatagtggaataatatcttcaatgtagtgcagggttcagcaaattgtggctccatggggcaaaactagcctgctgcatgtttttcaaataagattttattggaacatagccacacccactaacgtattgtttatggcttctttcacaccactatggcagcattaaatagttgtggcagagactacatggtttgcaaagcctaacatatttactgtcagcctatttatagaaaaagtttgatgacccctgatgtaatgaaagaaaataattaccacctagaattctatacccaatgaaaacatcttttcagtatgcgggtgaaaaaagacattttagacactccaaagctaagagtgtgtcagcagctgactatcactagagaaaattctaaagaatttacttcaggcagaggaaaatgatcccaggtgggaaggtctatgatgcaacaaaaataaagagcagtagtaataggtggagaatgacacattgtagaagatgtacagtaaatgaacactgcatacaacagcaaaaaaaaaaaatgtgaaagtaggtttaaaaataatattgaactaaaatcccaaataacaataatataagttggggggggcagagcagggtatatagaataaagtgttccaaggatctcatataacccaggaggagaataaagcttaaagtaacttttgatgttgataaattaggtacacatgttacaacttctaaggtaaccactaaaagaataggaacagtagatgaaatttccaaactagagaaagtgaaatgtaaaaaaaaagtttaacccaaaacaaggtaaaaaagagaaagaaaatgaaatgcaaaacaattgagataaacaaaaagcataaattaaaatctatgtttaaacccaaatataaaaagatggaaaaagatatgtaaacattaaccaaaagaaaaccagtggaaatatattaacattagacaaattaggctttaaggtaaaaatcattactaaagataaatgggcttatttcagaataataaaatattaaatttaccaggaatatatgaatacttaaaatatgtatgtacctaatagcatagccttagagatttaaaacaaagcatgacagagtgacaaggagaaacaaagcattgatattaatggaacattttaatacacttctttcattacatgatagaataaacaatgtattctcaacatagcagccaaggtgagcaaagcatttttctctactaggcaaagccctccagtgatttcctgtcattctgagaaaaagccaaaatccttactatgtttttaaaggcccttcatgacgtggactccaatccccacctctggccttatctgctactactgtgaactcttgtccatcctgctccagccacactggccatcatgctgtttccttgaatctgccagacatgcttctccctcagagtctttgtactggcttttccctctgtctggaatgctcttcccacagaatctacatgggtagtttcctcatttcctttgggtcttttttttttttttttttttttttttgagacagagtcttgctctgtcacccaggctggagtacagtggtgcgatctgggctcactgcaacctccacctcccaggttcaagtgattcttatgcctcagccttctgagtagctgggactacaggtgtgcgccaccatgcccagctgaatttttgtattcttagtaaagatggggtttcaccacattggccaggctggtctcaaactcctggcctcaagtgatctgcccacctcagcctcccaaagtgccgggattacaagcatgaaccttcaagtcttttctctaaagttacctttgttcccggaccgaactgagggttgggctgtttgttctcctggcccaataacgagatgcagatgaactgggaaagaagggagtttatttctgtaaccgggtgcagggagaaggctgggaaaatatcactggaccaactcaatattacaaagctttccagagcttatataccttctaagctatatgtctatgtgcaagtgtgcattcatctaaagacgtaagtgattaacttctaatatataactaaggcctgagtcctgaagaccttcctctggagcctcagtaaatttacttaatctagatgggttcaagtgccaggtatgattacccttattttgtctcctgctaaatcatggaggtttggggagttccttagacccccaataaagcttgtttgtggaggtctggggattttcttcagaccccccaataaaacttatttaattctaagtgggtcctgttgagaattccttcgttatcttgtcatgcttcaaggcccaggaaaggcctaggcaaaactcttggtggggttttgttacattcaagcgtttgtgtaagggcactggctctattagcttttaatatttaacttaaccactcagtcattgctgaaacagttgtcatggaggcctgcctgttcagctgttagtgagacctggcctgccacaccttctcactgaagtctttcttaaacatgcactttaaaatttcaccctcttattttgctatataatgttctccttctctgttatattttctttttcttcttacaattatcactgtttaacttacagtatattttatttggttatattatttattgtctgaatctcccagcagaaggtaagttccgtgagggcaggggattttgtctgttttatcctctgctgtaaccccagcatctaaagcagtgactggcgctgtgtatccacttaatatttattgaagaaatgaaagaaagataacattagtaaatatctaccaaattttgaactcctataaagtcattttttttagataaataacaccagaaatatttatgtttaactcaagtaagcgtgaagaacttgtgattagctgaaagcagacttcttattgctggttaagtgaccatattatattaccagctacttggtagagatgcattcattacagaacagatttttttttagaggtgagtttgggagctgaaaataataagcataaagtgacagcttcagccatacctcaactatttctacaaaggcttgtttaaatgtttagtgttccttccattatatttagcatgtggtaggatttagtacatcttaacaactttttgggttttacacattttccaaattttctacataaatagatattatttttgaaacaggaaaaaatgttttgttatgttttgtaaattaaaaaataaatgtctgggagaccaggcgtggtggctcatgcctataatcccagcactttgggaggtcgaggaggggggattacttgaggtcaggagtttgagaccggcctggccaacatggtgaaaccccatctctagtaaaaatacaaaaattagccgagcacagtggcgggcacctgtaatcccagctactcaggaggctgaggcaggagaatctcttgaacccaggaggcagacgttgcagtgagccaagattccgccattgcactccagcctgggcgacagagggagactcagtcacacacacacaaaataatgaaattttaaaaaattaaaaataaaaaacgaatgtctggaattgaagaagaaagtcttatggttatttatgaggccaggcgcagtggcttacacctgtcataccagcactttgggaggccgaggtgggcggatcacctgaggtcaggagtttgaaaccagcctgaccaacatgttgaaaccctgtctctagtaagaatacaaaattagccgggcgtggtggcgcatgcctgtaatcccagctactcaggaggctgaggcaggagaatgcttgaacctgggaggtggaagttgcagtgagctgagattgtgccattgcactccaacctgggcaacaatagcaagactttgtctcaaaaattaattaattaaaataaaataaaatgatgaataagtgaatgaatgaatgaatcaaccgatcaatcaataaacaaacaaacaaatcaagtgtctggattttaagcccttcagggtcaaggtcttactgagttgatctgtgatttcccatattctgtttccacatagagccttggttacagtaggcatttaataaatatttgttgaactatatacacaacaattacaatgtgtttcttttcttttgtatgtttatcagggatctgtttatatctacacttttggtaaggagccaaccttaaataaagtcctagatgcttgtgatgggaaatttcaggcaattgactttatcacacctggaacccaatacttcatggtaaagaatattttactgtgtcacagtaggactaaagatacgatgatgttgcaagatttaaatccctatttatatgttattgggtaactttgaaagttcatgggcaaagcaatgcgaataggaggcagaggctgtccttgaagactgtggtggagatgccagacacttccatcttcaaatctaccccccggttagaatgataccctcatattgtgacttcataatatcatcttctgaaaacagccaacacaattgagatcttaggagccatcttttggttttcaccacccaagctctgcaagccaggctttaacacgtttttaaaacacattcattgctaatgagtcatcagcactaagtaaactgttagtatttatttagtatctttttttccaggtaatgcagcagcaccacctgaggttgaaaatgaaatagttgccatgtataatacattaattcagtctaaggagtcaataataatatgtcaatattggctcttcagttgtaacaaatgtaccacactaatgcaagatgttaatagtagggtagtaggtgtgtggaggggaaggtgaaggagaactctactttctgctcaatttttctgtaatcctaaaactgctctaaaaaaataagttctagtaatttaaaaaagaacaatgtatagtttcctatttctacatttgttcattaggcaatagttttactgatttttataagcaacttttatctttaatatgttacatgaaaaatctttattttacttttctaatactaattagttatgtattaaattgcattaaagataatagttaatatttgctcagaaacaaagcattggcgttgaaatgataaaataagtatttataatccacgtaagtaaaatgaaattttatactaaatcatcggcacactggaaagggaggtagaacatgcttccataggaaagtcttattttccatgtagagtttttgtttttctttttttacagacacttacatattcaggggaaatttgtgtttggtggctggaggattgtgcttgtgtaagcaagatttatctgaataccctagtaagtatacttgataaatggattttaaaaaaatactgaattctaatccaatctactttttcatattcacatgtcaatagtctgtagaaatacttgttaccgaagcctcactgcatttttgccttctagatttacagtaatccttgtgtgtaaagtatatgccacagccccaagagtggaaccatagcatacaatattggttatagaaaacaataagtttttctgtggtggcagttgtttttgaaaccccagtagtttatatcttactcatgccataagttcattgtggattggcaggggtccctcttgcacagtctctcagggagccaggctgatgggggttccaccaaagaatacttcctctgtgctgtgtggcaggagaggaagagagtgctgaaaggtcttttggagggagagggggtgctgttgaatcagcaagtaagtgctttttctcagaaatgaaatatccctttggccataattggttaaatggtcccatttaatggaaatcaattagaaatgaaagaaagttgccactctaaccagcttaagccaaaaattaaaaagtaagtgttattggcacaatcaactataaagtacagaacttgtctggcctcatgtgtgcctcaatccagcagtttaaatgatataccaaggaccttgtctttctgtctccacactatgcctttagtttcatcttaggcttcattgaggtacacccagataccacaggtgccaacctcacatcatactgtcagagagggaagaaaaattcctgctgtaggaggaggaagaacaaagatgcttcttctttccagaaggttcagtaaatgtcttgcaatgtcttaataacatctgtgaactaatcatatgcacaggggatgagaaatgcaattaagtgcataattaatgcacaaactcagccctggaaatgggagttagattcattccactcatccctgaagataggggagggatagtttctcagtgaatattcaagagattttccaggagggcgtatggatgctgagttgcaaaccacactgcccaaaacacctaccacaatgtgataccattatttctgccatgttcacagtgcattttgcataaaataacattttaaaaggaccaagaaacaacggtaatgctttctttttttaaaaataatattatttgctgcattacacagttctagttgagaaatggatcttggtattaggtagggaagtttcagtccttcccttttataaaactaaaatcttaattataaaagactaagcatcatattttacataagatgccaaagatacataattcaatgtgataaataaaactttcccacaaaagtaaagataaaaattcttactgagaaaacttgaaatatgaaaagactccatagtctatgtgaccaagggttatatgtattcatttctattagaaatagtaaactaggagagatcttacaagtgcatttaatcacatgtcctttcacacattagagacacagaaacgtttaacaacccacccaggggcccatataatcaggatataccttgttcctcttgggcaaggagggatacaggtaccattaccctatagagaattgatccagacacagtaatgctgatgccaggtctctctgcctgcgtccgggactgtgttgccttccttcaggcagtggtcctgggggatcccagtccagcagcacagtgtcaagatacctggacactagcagcatccgctgatggtacctgcaagggtacataagactcctctggcccttgctgtacattttcagactagcacaccatcgccctggaatgaaggagaatttcagctgattatttttattttgggaacacatacacatatacacacacttcccacagaggttttcaattttacaaaaagcccactcaattgggagactgtgtgcattctaataaggcaggacacctgggtgcttcatctgaagtttgtcaccacatatgggatccttgggcaagctgctggacttccttggcctgtgttttctattttgcaaaatgatctcttatgttctttttcagtcctgagttccatgattttattcaaaacaatctacaaagtgttgatagagaaagaatactgatttctctagtattatgaaagtcaatttattctcttagacatcatattctgtataaatcattgtgagataaatgggaatctgttacgcatttctttggtgactgaatacatcttccggtgatacagttattttcttaagtcttccttagtcataccagcatctcaggatctataaaaatgttttaaaaagccaggtgtggtggtttgaacctgtaatcccagcgactcggcaggctgacacagtaggatcacttgagcccagtagttcaagacagaggaagaccccatcgctaataaataaataaaaatttaaaaatgtttaaaagatgctaagaatttcttttaaattccttatttttcactattattggtctaattgtttcacaatcacttaaatagattattggcataatcatttcatcatcatttagggataaaaatgaagccatgatttcaatttcaagaaatctctctctaatttttattactctaattttaggataaaagaataagatgtacagattcctgtgccatcttatgcagttgatcagctcaggaacgttgagggtataatttgaaagaccccaccacacaacacttgccacttttctcatcctgcaggcttttcaagtacactgtataatagcattcttacgtgtaggagagcaggcacaatagagatacgcatctggggtttattttaaacaggcaacggttctggcttgctgtccatcctccctctctgcagccgtgggcacggaggatggctcggtctacttcatcagcgtatatgataaggaatcccctcaggtcgtgcacaaggcctttctctcggaatcgtccgtgcagcacgtcgtgtaagtcctttctgcctccaggagcggctccgtgtcacacccgtctgttgaaaattctagtgaagccatcctttcttttaattttaagttttacgtgtttcatttgttttgaatgttaatatattcacacagttcaacactcaaaaggtacagagggctgtgtagtaaagtaccccccatacccaggtctgtccttgcaggcagcctggtaccaatttctcatgtctctcctgagatgttttatccatgaacaagcaaaacataataagcacttctttttacttgtatcaatggccatcatgtgtgtatagtgtgccaggcacttctgctgtattaactccatgaggtaaacactcttgttgtctctatttgacaggtgaggaagataaggcacaaggattttaaataacttgctcaatagtacacagatagtgaatggcaaatgttgggatttgaacccaggtagttgggctgcagagtcactgcctttgctcttaaaaggagaaaactatgtacaatgcctcatttcttttttcacttaatcgtatatcttggagaatgttttatatccacacataaagaccagcctgattatttgtatagccacatagtattccattatatgaatatactatcattttttaaaaacggtatattaatgaacatttagagtatttcaaaacttttgaagcaatacttttaagatgataatatagagacattagatttggacttgtaggtgctatcattattactgtttctttttaatttattatattattaggtattaataagaacagacatttgtattctgctttacagcttgagatcactgtagcttgtggcatgtgatcctcaaaacaccagtcagaaaggtgttattcttatccctattagacaaattagggaattcagggttagagaggtgaggaaaagcattgtccaagattacacattacacagctagcacactgaggagctggccctgccactgtggactgcccagctccaccaccctagctcagtggggaaggatggataacctccttccatttaccccctgcctttctgcactgtcatttttttgtgcctttcctttctcagatcctcttattctaatttacatcttcccactttttctaatttgataaagttgtagacatgtttcactacattcttcctcccactgccaggtaccagacacagggtaatgaaatgtcacacccaccactaatttgagaattgcttatttgcgcttgaaacatcaagaaagctctaccgacagacatgtttcattcacttatgatgaaccaactgcccatctttactgaatcttcttgactgtatttattaaagttgcaatttggaaatatcattggcctaaagtacaatgattatatccacatgtaatcactccactttaataaggtcagagaatattaaaaattgcaaaccgtaaaaatgactggctttgaacatatctctgtggccattcaataaacttgttcaccatctagctggtgaaacaattgggatttgatcatcagatttcttcttttctagttatgatcagcaaggaatatttctgttagttggaacagcagaaggaaaagtctttattatcaatgccaactcctcaagctcatttcagattattggattcacaggtacaacatagaatgctgattaatttaaaatattgattatttcaaagaatttaaggttatgaaaatggacttttcatattgaatattgaaacaattatttgtggcatattttctgaaagagaaacctttaaataactaaagttacttaggagaattctcacattatattttgatgtatttggaatattagagttatctgcttggtacatagttggtgctaaataaattttcttgaatcaattattaaatacattaatgaaatggctgaacatttctaatattaacatacagagaagttgggttgatttctcttgaaaatattttttaatattttatctctaatgaagaattttctctttattttctctctggctttacatgccaactgtatatgtgtttcccccccacacacacaattttttttaaaattctccttaaaaaaaattttttttttgctcctcacactttgccaagtcccactcctaagtttttaaatttgtttatcattgacttataaaaattagtgagtgcctacaaggtgcaaaatgccaaacctaggccttgtagggggatgaaaatattaaggagacaatttagtagaggaggaaaatgcagaatggtgtgtaggctcagatactgtgtaggctcagatacagcagcaattcattctgccaagtgtgaggagaggagtggaggtgaaggtgggcactggtcagggggtgcggaggattggaggagttttccaagggcttaaagtagtgggtttgaaggattttcataggtgtgggataggacatattagtattcctgctcaaaataataacccaaacaaaggtacttggaatggtaaaaaagtctggtataacaggtaaatggaagagtttactagaagatgactatggcaatgaagtctgaaagaggaaggaccttgaatatcattccaaagagtctggaattgttctgtggttaatgagccatcatcagtggtttcaagatggagctggcatgatttgacttcgtttttagagactgactctgataccagtgtgaaggatggagtagaaaggcaaaagaatgaaattaaaaagatgagattggaagctataatactagccaaggcaagagatgatcatagtcataatcatagcaacagccaacacttattgaggaatgcctgactatgtggtagccagtattctaagccctcagcatgtctccacccattgaattcttagacaactttcatgaaattgatactactattatctctccacatgaggcaattgaggcgaagcgaggctaagtacttgttcaaggccatgcatctagttagtggcagagcccagttaaggaagtccagtttcagggcgtgtgctcttatccacaatgcacaaactcatgctgcagttacagaaagagaaaagagggcacaaccacgagtgatggaattggtaggacttggtatttgatgcgaaaggaagggataagtgatgactccaaaatttctagcctgaatggtggaagtttgcaatgccattagttgaaagttctagaggttgaggaataggttgagctgatgagttccataggtttaaagccaataaactcttcatttgggcatatttagcttaagtttggaaatcgggatatgtagttcaaggcttaatgatagaattctgatcttgaaatcatggtagctgatgagatggctcaacagagtagaagtaaacctggatgcttaataaggcaaaagaggtaactaaatatgcaaattagatggcactgagtgtggtacagcctgtggctgacctcagagtggatgtatatcctgcctaaatattccatttcatttattttattttattttccagagtcttgctctgtcacccaggctggagtgcagtggtgcaatcatagctcactatagccttgaattcctaggctcaggcaatactgctgcttcagcctcctgagtagctgggactacaggtttatgccccaaagcctggcttgttctctgttttgtttttgtttccttttttttttttttttttttttttgagatggagtctcgctctgtcgcccaggctggagtgcagtggcgtgatcttggctcactgcaagctctgcctcctgagtagctgggcctacaggcgcccgccaccgcgccaggctaattttttgtatttgttagtagaaacggggtttcaccatgttagccaggatggtctcgatctcctgacctcatgatccgcccgccttggactcccaaagtgctgggattacaggcgtgagccaccacgcctggcctttttttgtttgtttgtttgtttgttttgttttgttttgttttttagtagagaaaatgtctctctatgttgctcaggctggtcttgatctcctggagtcaagcaatcctcccacctcagcctcccaaagtattgggattacagacatgagccactgttccctgccccatttttaatgtatctgtttggccagagggtgggatggaagaagctgggaatagaaccctggtccacattttatattgaagctgtggacagaggaagatgaggcagtgaagaaaactgaggctgggccagagtaataagagaactgggagtcattctctccagaaacagcctaaagaaggaaggcagatgaaagtacaggctgacacagaagtgtgggtagggagagggctgagataggctctcatatatttgccagtcagcaggtgatccctgagagagctacttctttggaatgaagaaggttagggagggaatagaggtaagaaaattaagtcagaaagtgccaaaactattttaggaagtttgcagtggagaaaagagagtcagatgttaactgttgtgggacagcagagttggaggaaggttcttatttgaagacaggggagtcatgagggctgaataaaaggaaccataagggacacaagaagctaaaaagaggtgattgataatgtatggtctaataggagattggaggaatgggctcaaaaatcacagacagggaggggttacattttgttcctacatcaatgtcaggaaatgaatggagaaaatggaaacagacaaggggaaagtgtgagtctcaggataagaaagttgagattgagtttatgtagatgtccttggtcttccttgttaaggaagagggaaggtcatctgctgaccgcctggggaagggcctgagaaagtgggcacctgcagcacagtcccatgaagaatgggagagtgaatctggaacaaatccaaggtgggctccaggcctggcacaccttgcagaggttagatcagctggctttctagtggagcaagctcataaagtcacgtttccaccacacccacagtccttgaccacagatgcaaagaaggccgatgcctaagtttacccaatcttaggattaggtaacctggctggagtggacttgtggggaccagctcatgcagatgctggtttggagggatagggggtggagatggtgcactctggggccaccctggctgggaaggaaacccagacagactgggctggtttaaatctgccagtctagacatctaatcaggagaatccctcatccattcatcaaaaatgtccctgtaacttatgtttaaaggtcactttaaatgtccagcaaataatttgattctaaagatatagtgaaggcaagtccatggatgatatcttaattggaaaggtaaaagatcatttaaacttatcaatgaccacttgtggtgttgatctctgtttgctttcagaggtggccaaagacattttacagatatccacagtgtctcttttagaaacagacatagtggaagtgatggtgctttcctcgcttccagaagcagggagaagcaggttggagatgttcacactgcctacattactgccacaaggtaaggaaaacataagcagccagttctgctcctgagcccagatacattgttgttattgttttttgggtttgttttgtttttatcttggcatgtgaagaggtaaaatggccaccttttgtctatctttacaaagtaaaaccaacatgctaaacagtttgaagtgtggacttttcctctgggcttcctgactcatgagtctgctttattaccataggaaaagagataggatcaacggacacatcaaattgatttgttatttttgtgatgtctcttgttttgtagctttgaatagacaaggttaaattcagatagattacagtgtagttcccttcactgacaaaattataaagacagttttctggataaaaaggtatgagaaaatagatactctttccttgttttaatgacaaatatatcaggttagcagttttgcaaatatataattatagagcagaagagagccgacaacctccaagtacttttatgtttttataagaatctctatactaccatgggtttcttttaatatgtctctaagttaattgattaaaaattaatcaaggcattacagaaatattttacccactatcagtcatttaatactcaagtatttctagggagacaagtgtttttaaatcatttttatcacctactagcttccgcaatattagttgagcatttaaattttattttgcttttcataattgttcataattttaaaaaaacaaaattaatttatggtacaagtgatttctcttctttttccaaatctaatagtttccacaacctttgctgatgaaagaggaaggctgaaagatgaaatcattcataagtacctgtatgagttggagcacgctctgtcctctgcagtcttgggctttcaaagtaaccaaatatatggcttctgtagtcaagtgccatacatctgtagctaccttcttcctgaagaagtatgtcaacacttaagtgtgctctcatttatcttagcaatcaagattgatacattatactgattagatgtgatcctcttgaccactttaacagaatagttcagttaacaaatgccttcattttattaatataattcccttgagctagatatatagtgttatttgttaatccatcatacaatatatttgagcaacctgatacttgtgccacatacatcatctttgtcagataaacatgcagatgacacaatattagtttagtgccttaaaaaacaacctagcattaggaaatctattctacatatgccaagggctacaaggtagatgatttgatttgcagtggaactttgcatctaagccataaccaaaattacaaaaaataattaaactgtgtttctgacattttttcattacactctcttcagacttctcatgcattgtgtcacctcctgctgcacataatggcccagtaccctcctgcttgctgccccttgacctgtcactttcccttgatgtctgtctacccactttgataaggtctgccttccttcctctaaattcttcagtcaaagctcttctttgacagagtagccaggactagacacagagaaggaataaatgattagtggcaagagagattcaagaaaagtttcatgaaggaagcaatatttgatctggactttgaaaagtaagtcagatttagacatggagagatattgcatacaattttggtgggcagcgctcatatagggaggtagggcaggactggtggggatggagtagagtagggcattccagacaaaaggaaggacacgtgcagaggcttggaggtaggaatgcatgaaacatacggggaatattgactacattattttgacttaagcatgaagatatgtgaaaatgattagtaaaagcaaagattatcagtgtaggctaggatttttaatggcaagtaaataaagaagactttacttagttggcagaaacaaacttttatttgcaaaagtgggaaacatgatgcaaacgcaggtgtccactttatcctatatccatttatttacaatgacaatgtttgcactttatgccatatcagtttatttacaatgacaatatacaacaggcatgtatatctgcaaacccaaaggtgctgtttacctgatcttttctataatgtggttattttctttgattggcaggaacataccggtatctacattcttaaaccatacaaaaaagtacaaagcagacagtatggacctggactgctctatctgtcttcacatggattgtggctcataacaatagctaaatgtggaattctgtgtatccgagacgtttatactttggtaagctgctttcttaaaaaaaaatattgtgggtgtatatattgatctcatataggaaacattttatatgtatataaaaatttgcttatatatgcataaaaactctgaaaagatattgaaggtactaattaccttgcttgccattggaagtattaggtcatgggaacaggaaggagatttcacagaatactcttttataatttttgaattttgaaccatttgaatgtattgcctatttaaaaacctaaatgagaaaaggcatcatggttgagaaccagtatgactcagaaatctcagtttttaaattgttgccctatataccaaattgatgatgcattttgtttaagttctaatcaaactggcttagttagcatccttcagagcatgttatcttccattcttcacagtgcccgtcaccctctctcattatactcagctacttcacacataaatagaacctccctgactcttgaagccatcggaactcaccatctctgcttgctgaaggccccttccctagctttatagacttctgcaatccattcacttctctgtgtctgatttcctattataaattggtgataataatccctgtccttccatactacacaaaggtagtggaagaacaaattagtattggtgaatgtggtttgaactggggattttaaatactatgtattgccaattgcctacttccataccaattaaaatgctgttagcaaatagaaaatgatttatccacaaaaaaggggcatataaccccattagaaaagccgtgtggtagaattgcatttgtaatttttctggtttatttcttaactattgaggaaacatttgcttggtgtcggagtcattctcaccagggtcatgggattcagtcaatgagaatttcaatggatggacaaaacattctggtgaatgggagagatgatggcacccttgtctacctaaagtggaagtacgtacagtattcagtaagtaaccccatgtagtatagtgtgttaaaatagagattttattattatttaagtacagcaaggccaacgtgctgggagaccactgccagtgcaaagaaagtttgttatactcacagatcccaagagaagcgtacactgcattctcgggtaccacatggggcagacctggggtgggtcaggaggctgagagagggaggaaaacgtggatgagatcctctagtatggttttcacagggaggattgggcaggtttaggattggctagtttgaatattatcagtgggttctgaggcataggagctggctgtagttgtctcatacttggccctggggtgattagggtggggaaatggtggccccgattgtgaaagcccactagaggaggtggttgggggtatggtctctggattgatcggtttgcttttgaaaagcgtgttccagagcaaattgtttactatcttcagagactggctagcctccagaagtcagcaaggccccagatatcagagcatcaaaatacaaaaaaaaaaaaaagacatagttaatatttatctgagagtgatcagtcctatctctcataacataagaaatgtggacaattctgaccctcagataactttaaaaactcctgtttatccctgacatatacatgtatgtatatatacacacactttcctaattagattttgcttagattatatcaaagacagtttcagtccccaaacaaggaggggatccgttttagggaggtactattatcatccttgcttccaagttaaactataaacgaaattcctcccatggttaggaggaatgaacaagaacatccagcctgtgagactagaaacaagatggagtcagccatgctagacttctttcactgccgtaatctttgcaaaggtggtttcaatcatgcaattcattttagaaaaaataatatttcgtgatacctcctgtgatcaaagcagtaataaaatacggcccttctctgcaacattgtgaaaatgttaaatgttgtggagattttgtatcataacaattttgctagccacttacctcaaaaactcatttcaggattgcatcatcatgcccattttatacatgggattctgaatagaatattagcttttatctcactatgtaagtcctaacatattgtttataaccagcgaacaaatactatctcaggcaacaacaaacaagtgctggagccttatttatgcagctcaaaaagaaggacattttgatccattggtaatcacccaaacttctgactcaaaacaaagctgggtttaaaacgatggtctaggccaggcgcagtggctcacgcctgtaatcccagcactttgggaggctgaggcgggtggatcatgaggtcaggagatcgagaccatcctggctaacaaggtgaaaccccgtctctactaaaaatacaaaaaattagccgggcgcggtggcgggcgcctgtagtcccagctactcgggaggctgaggcaggagaatggcgtgaacccgggaagcggagcttgcagtgagccgagattgcaccactgcagtccgcagtccggcctgggcgacagagcgagactccgtctcaaaaaaaaaaaaaaaacgatggtctaggacttttgactttgtgaccttggcaaatgacaacccctctaaatcatctgttacaatgttacttaaggtagggggtctgtagcatctgtgagcttgttagaaatgcatattcttggatcccatctggactttctgagtcagaatgtctgcaagtggggcccaggaatctgtttttaaaccctcccagtgatgctgatgcgtccaaagtttgcaatgccctggtgaattaagtggaagtaataataccactctcaatgcagggtggggtgatgagggggccacatgtgattatgtgtgtgaagtagcacactgcctggtgcattccgagagctcagccagtgcactggctcttctgtgcaatgaccagggcaggtacagagggcatgttgagtaagggtatgaggacagtgtgaggagagggtaccctagaaaggtcaagaagcttgtcatggcctggaacccatgaaagggtctcctgtaagaagcagagtcctttagccatgcatggtggtgtacccctgtagtcccagctactctagaggctgaggtgaaaggatcatttgagcccaggagttcgaggctgcagtaagctgtgattacatcactgtactccagcctaggtgacagagcaagaccctttctctttaaaaaataaaaattaaaaaaaaaagaagaaattctgcaaaagaagtaggcactgaagaagtttccacaaggcactgtgaagaattgtccacatatttccttggttagttacctataaactgaaatggttagttacctgaaaataatagagctaaatgtgattttttaaattatgatttttgtagcctctgtgttttcttttttattaatataggcgatttggaggacacctagccagtgaaattctggactattaccagaaactattaatttccctgagcagcgccatggacaaggagaatcattatttaagcacaacaccaaaagtttccgtagatttgggatccgattctgaacacacagttgagttcctatatgactagcttgcttgcttacatttctttctttgtaaatcagaagttttcggtttgtggttttctttaagcagatatttagtaatatttctctttatccaggtatcccatgattttcaaaaagggaataagctacgtctgagagaaaatattcagcctttctcaaagcaattgcaaatagtacatttcagatctcatttaaaccatagtacaagatccaggcttgcctggaaaaaaaaatcttctacccacacttgtgcttggtcaaaatggtctctctatactttcatattacagatattatttaggaagtgtctagctaaagaacagtattcactcattcaattaacaaatatttatagagtgcctacagagtgctaggctgtgggggatatagccatgaacaagaaagaaaaatttctgcttccatggagtttacatcctaattgggggttggagatgggcagggagaaacagataaacaagcaaatgcagaagaaacaatgagatagtaacaagttctattcagtgaataaaaataggttgatgtgatagtattgggctggatagcctctccaagcagacatttaagctgagatctgaattaaaagagaacaccaccatgcaaagacaatgggagggtagcaagagtattcagggcaaagggggaaagagcttggcgtgtggtatgttaggacctaaaaaagacctgtgcagttgaagcgagctagggagaaagtggtgggaggtgaggtcttcaaagtgggaggagaccaggtaacgaagggctttgtaaactaggtaaagagtttgaattttattttacatgtaatgagaactgagtcaggtgttctgaacacaggattaacaaggtatagttgacattattgaaatgactatttgatgctatgaggagaatgtttcctgtaggtgataagaaggataagaagcagggacattgctcaggaggctaaggcagaggttcaggtagcaatgatggaggtggaggagtcttgtgccaaggagagaagtggtggattccaggtgggtttcagaggtagggttgatagaactcactgatgaattggacatagagagagaggaaaagaaagggcccaagaactcctagattgttttacttgaacatttatgtagaagatggtgtcattcatggagatggggcagactctgggggaagggggcagctatgaagagaaagaagggaattcaaaatcagttttacccacattaagctcgagaagcctgttagacatccacgtgaagatgccagttcagccattggatagatgaaccttgggttctggggagaggtcaggactggatatgttgatttgagtcaagggcatgcggatgggatttaaagccataacactaggtaaggacatcatggaagcatgaatggcaagaagcagaagaggaccaggacagagcaacttctggagaggcaggagaagagttcagggatgcagaggaccctgaggaggggtagccagtgaggttacaggagaaccaggagaacatggcatcccaaactctttcaagacattttgctgcaaaggggagcatagaaacagggtggtgggccggcggggacggtggttggcacacacctgtaatcccagcactttgggaggccgaggtgggcatatcacgaggttaggagatcaagaccatcctggctaacatggtgaaaccctgtctctactaaaaatacaaaagattagccaggtgtggtggcacgcacctgtagtcccagctactcaggaggctgaggcaggagaatggcatgaacccaggaggcggaggttgcagtgagccaagatcataccactgcactccagcctgggtgacagagcaagactccgtctcaaaaaaaaaaaaaaaaaagaaatagggtggtgtctgaagaagaatgtgatggtcaagtgagagtagttttcctaagacaggagatagtagagcatgtttggatgctgttgggaaagatcctgtaaaagggagaaattgatgatacagaaggagatggcattgaaaaaaaattgtgttaagtattaagacttcaaaaagaagaaaaaagatcctaagcatagatggtgacacaggccctgatgggcaggaacatttgggtcacagtaacaaagaaggcaaagagtggtgacagtgtgactggtctgatcatctctgcttcctcagtggaagctgtggctactataagggcagactggtgggacttacctgaataaaatgttacatcttgggcagacaaaatgttggagattattttcaaaaatgcaacaaatacaaaggaattcaaagcagttacatgtggtagggtgggaggggaaaaacttgatgaattttaactttaagacatgtctgtctttttctaccatgtatcagaaacagaaggcaagcactgacttatcacaagatgaattagttctaaccgatgttaagaaggaaattccttggatacaacaaaaaagccaagaggtatttgtgaaacatggggtaggtttgaaatagtgctctgtagatgcaccaaatagattagtttcctatggaaacctactggaaagttagaagatggaatgagacaccacttggcagagcattacaacatacaggtgtaacttttctgaaagcaaataaacaccctaaacacagcccaatcatttagatcaagttatatgagctttaagaactgtacgtaggctgacatgcaacccaacaatggtgtccaggtaagccacagcaaaggatgaactgcagtactccaccgtggagtgagttttaggggatgcttgtcttcctctgtcctgtggaccaggaacaggggaagggatgctgtggctgcagctattcaggaaggtgactgactgattacagctcgtgtctggatttagcctattgatctagtctcaagttcccgataaaagtgcatactggttttccttaatcaactgttcactaatttttcactgcttcattattttctttccattggccatataattgacatcagtttcatgttgctttaatgtcacttacatagtagcagttagatttaagcaaggtactgcagtggtattacttcatgtacactttatattagtctttacaaattttagtttctgtttctagagaattgctctctctctctctctctctctctctgtctgatatttctcttgctttgttaagtgatatacttgttctgtttcaggccatcaaaaaggaggttaatctgttttccaagaaaaggaaagagataaaacaaggaatcaaatcactttccaaaactgtaagtgttgtaatttcatattctaatacctttggccctcattctaaaattactttttgaacttaattttgttctaccctgaggaactatacctcccttttctctgcttgtaagctcagttttctgaggttctttaacaagataaaatttctccaattcacactccatatcaacagcggttttccccatcttcccccaaattaccatcttatttgtctttataatactgatttttatcaaagttatgcatttatatttttacagattaaataatactgagttgtgtagttaaaaataatattttttaagcagcaactgccctacttctcttgactgattcctgtactcctgaggtaactgttttctcttctttctactttttcatttgggctgtttacctctgtctaaatagtcttcttaatactgttgttatttcttgatatttctgttttgatgctaactatgggtgtcctggtatggaacatgagtagttatgcttgttactgctccccatccccactatagcacacatataaatccgtgcttggaatacacactatgatagttatttgaatattcttcaatgctgagccacatggtatattattattacatttctgcttttacaacttgatttttcttagaattaatagttgcctttgttttgggtaagcccttctatgacctattcaaactcaaaatgctaacaaattcttctcaatacaatcaaatacctgaagtgatcaatctgtgagtgcattttttgggcaacctcccttctagagctttccatcctccagctccagtcaaagcaccttgctcttgctctgtagaccaggtgtatggctgccgtcctagagatctgccttctaagtcagagctcctgtttcctgagtcccacgtgattttctttgttttcttggtgtgtattcttcagtagcttcctatgcaggactgctgtgttgtgccatgcttgggaacatcctttataaaatctgtgcttctggggtgccatccaagtggaatccactgtgaatgatgccctgctgctagacctgtcagatgctttggctctgttcttgagaaagggtacatgagaggtacattttgtgagatgtggtttttcttaaaatgtgattatcctacattcataaccatttgatggtttgccttcagaatgttgaaggctttctccattgtctcctggcttccagtgtttcctttagagaatccagtgcctgactcccaattctttgtaggtaaccagatttttatctttggagacttatagaatcctctctttatccatagtgtttggaaatttacagttatgcaccttgatatgttcgatgagtattctaggtttgctggtacaaaccaagactctcttcccttttccactcttctttgagccccaagaggctggcctttatggacagtagcaatgcactctcttgccttctggctttctcttgggtttaggcaataagtagcatcagcaggagaaccccattgttgctattcatgaaggccagcctcttggggctcagattgcagggcagaagactaagaccagggtcctcattctcccagtttcctccctgtagggttatgagttggcaatgaccgccatccttctcctacatttatgggtctctccaggttcattaaccactcccagcctttgcccttcagacctacgagcagagatggcttcccgagcccgcagttggtagcctaatgctttatcatgtgttgctggctctccttactc

SEQ ID NO: 12 - DNA, 2020 bp, Homo Sapiens
tcgcggcccgcagccccgcggcggcggaaaggtaaccgacccgccctggggtgctgcgtgcgctgcctgctcccgcctgaggaaaacactgcccatggcgcaaggccgggagcgcgacgaaggcccccactccgccggcggcgcgtccttgtccgtgagatgggtgcaaggattccctaagcagaatgttcattttgtcaacgacaacaccatttgctacccttgtgggaattatgtaatatttattaatattgaaaccaagaaaaagactgtactgcagtgtagtaatggaattgtgggcgtcatggcaactaacatcccctgtgaagttgtggctttttctgaccggaagctaaaacctctcatctacgtatacagctttccaggattgaccagaaggaccaaattgaaaggcaacattctcctggactacactttactttcattcagttactgtggcacctacctggctagttactcctctctcccagaatttgaactggccctttggaactgggaatcgagtatcattttgtgtaagaaatcacagcctggaatggatgtgaaccaaatgtcttttaaccccatgaactggcgccagctgtgcttatcaagtccaagtacagtgagcgtgtggaccattgaaagaagtaaccaggagcattgtttcagagcaaggtcggtgaaattacctctagaagatgggtcattttttaatgaaacggatgtcgttttcccccagtcgttgccgaaagatctcatctatggtcccgtgctgccactgtcagccattgccgggctggtaggcaaagaggcagagactttccggccgaaagatgatctatatcctttgcttcacccgactatgcattgctggactccaacaagtgacttgtacattggctgtgaagagggtcatcttttaatgattaatggagacaccttgcaagtgactgtacttaataagatagaagaggaatcgccattggaagacagaagaaattttatcagtccagtaaccttggtatatcagaaggagggcgtgctggcttctggaattgatggctttgtgtattcttttattattaaagatagaagttacatgatcgaggattttcttgagattgaaagacctgtagaacatatgacattttctcccaattatacagtgttgctgattcaaacagacaagggatctgtttatatctacacttttggtaaggagccaaccttaaataaagtcctagatgcttgtgatgggaaatttcaggcaattgactttatcacacctggaacccaatacttcatgacacttacatattcaggggaaatttgtgtttggtggctggaggattgtgcttgtgtaagcaagatttatctgaataccctagcaacggttctggcttgctgtccatcctccctctctgcagccgtgggcacggaggatggctcggtctacttcatcagcgtatatgataaggaatcccctcaggtcgtgcacaaggcctttctctcggaatcgtccgtgcagcacgtcgtttatgatcagcaaggaatatttctgttagttggaacagcagaaggaaaagtctttattatcaatgccaactcctcaagctcatttcagattattggattcacagaggtggccaaagacattttacagatatccacagtgtctcttttagaaacagacatagtggaagtgatggtgctttcctcgcttccagaagcagggagaagcaggttggagatgttcacactgcctacattactgccacaagtttccacaacctttgctgatgaaagaggaaggctgaaagatgaaatcattcataagtacctgtatgagttggagcacgctctgtcctctgcagtcttgggctttcaaagtaaccaaatatatggcttctgtagtcaagtgccatacatctgtagctaccttcttcctgaagaagtatgtcaacacttaagtgtgctctcatttatcttagcaatcaagattgatacattatactga

SEQ ID NO: 13 - protein, 641 aa, Homo Sapiens
MAQGRERDEGPHSAGGASLSVRWVQGFPKQNVHFVNDNTICYPCGNYVIFINIETKKKTVLQCSNGIVGVMATNIPCEVVAFSDRKLKPLIYVYSFPGLTRRTKLKGNILLDYTLLSFSYCGTYLASYSSLPEFELALWNWESSIILCKKSQPGMDVNQMSFNPMNWRQLCLSSPSTVSVWTIERSNQEHCFRARSVKLPLEDGSFFNETDVVFPQSLPKDLIYGPVLPLSAIAGLVGKEAETFRPKDDLYPLLHPTMHCWTPTSDLYIGCEEGHLLMINGDTLQVTVLNKIEEESPLEDRRNFISPVTLVYQKEGVLASGIDGFVYSFIIKDRSYMIEDFLEIERPVEHMTFSPNYTVLLIQTDKGSVYIYTFGKEPTLNKVLDACDGKFQAIDFITPGTQYFMTLTYSGEICVWWLEDCACVSKIYLNTLATVLACCPSSLSAAVGTEDGSVYFISVYDKESPQVVHKAFLSESSVQHVVYDQQGIFLLVGTAEGKVFIINANSSSSFQIIGFTEVAKDILQISTVSLLETDIVEVMVLSSLPEAGRSRLEMFTLPTLLPQVSTTFADERGRLKDEIIHKYLYELEHALSSAVLGFQSNQIYGFCSQVPYICSYLLPEEVCQHLSVLSFILAIKIDTLY

SEQ ID NO: 14 - DNA, 81734 bp, Mus Musculus
  misc_feature (1)...(81734): n = A,T,C or G
ctgtctcgaaaaacaaaaacaagcaaacaaacaaaaaaaaaaatgaatctggaagttgttctgttggtgaagatgaacatctcagctgtctcaatatggcattgagggcctggagaatttttggagagctgttggtcttgggtctactctggaagtccaagatgtctggctctatcaagaaaggagtacagcagtaggaacaatgaagatgaatttgacagcaagagggtagtcaagtaagcaaagagcagcgttccttctttcggccctttcatccttgctctccagtgtccacctttgaaccacaccaacactcagtcaaaagaccccagagttccccagaacctagctgctgtccccgcatgtgtacacaggtcacacagaccccgagacacaatgcagccagacaaaaatggcagcaacttgctctcaggcagaaagcaaaacaaaaacaaaagcactggtgctcaccaagcttcttgttcctcagcagtagacatgattgttcaactcttttaactgctacccagtctccaagaacttccaagaaaagcaaggcttaagtgattcaggaaaaaaatttctcctgtgaaaggaaacacccagtggagtgagcagacagcctataggacaagagcgatacctgccaggggatgcatgtctagagtctaaaaagtactgaaaattaaacatccaaaaaaaataataataaacaaataagtgattgaacctgatagtttaaaaaaaaagaagaaggaaggaagaaagaaaggaaggaaggaaggaaggaaggaaggaaggaaggaagaaagaaagaaagaaagaaagaaagaaagaaagaaagaaagaaagaaagaaagaaagaaagaactacatttgggcatggataaatatgatataccttttaatctcagcactcaagagcagaatcaggaagatctctgtcaattcacgaccagccagagctacatagtgagaccctgccatatatacatacaaatatgtgtgtgtgtgtgtgtgtgtgtgtgtgtatgtgtggagagagagagaaagagacaaacagacagacagacagtgacagacacagagagagacagaaagagatagagagacagagagagaaaggaaggaaacgggaggaaagaggaagaaagacagccaaacggctaaccggtctttggaaaaaaaatgttcaatagtattatcatcaagcaactaaaaaataaaaattactttgagattctatctcaacccaattagaatagttattctcaactgtttactgctgataggaactggaataacttgcaattattgtggaagttcctcagaaaaacaaaaatagaattatcatatgacaaaactattgtactcctgggcacatacccaaaggaaccatcggtatatcacagagatacctgaacatccatgttttccgtgtttgttaaaacactagtcacagcagccaaggtaaagtctcagaccattaatggatgaagaaaaacatcaactagataaatggcattgtgtaattcagcaaaatgagtggacctggagatcatcatgtcaaataaaataatctagcctcaaaaggacaaacagtgcatgtctctctcataagcagaaccaagatttaactattatacacacacacacacacacacacacacacacacaaacacaaacacaaacacaacataaatatagagaatgataagaatggaagaagtggccaaaatggatgagaaagaacaaaagaggctcatgggagatagaaagacaaaactgcattttctgtcttccacatactgaacctagatttaactatatgtatgccatgatgcagaagagggacctttggcatgaaggaaagccatttaattactgtgcttgctgattttccacataatgagagctaaagtcaaggctttcctaagttcacagatgaatggaggtgacagatgaaggctgggccactagtccatggaatcccagcactcactgcttctcttccaccacacaggtgaatatctgtatgacaattaagcatccaatattaaactagtggctgcaaactctcaattaatagcttgtgtattaacacagagagattgcttttcttttctaatatgaagtgcaagactataacttgcaaactgggacagaaggaagccagttaagatgcagttgtctttttagtggaaaattaacatccctataaaatccacagacgtgttaaatgttttcctctgctttggtgatattgaattggcataagcttgatacataaaattaaatgataagtgaaattgaccatcagaccaaaggaacctcagaactgtgactattcattcatggaaaaccaaagtataagatttgtagactattctaatacataatgcaacttttctccctcagaggaaaggcaagctcgctcctccataaccagggatggtacgggcaggaagcagaagggtccatgctctcctttagctgcccctcgccagcttctgtgaagtgtgaacttgaggcttcgaggctgctggggcccatcctgttaaacagaacatagcacacctgcatgccaggcccacacctgcccacagtggctctttgtttccatctggctaggtaccaggaaagatgtaatagttataatcactcctgatcaaatcaggccagcaaggatcccatcaactctacagcctctggctacttcagttttgtagcctccatagtctccctgatggtcctgctggcttttagaatacattgccaatctgagattttacacttggtgaaaaaagacacttgtacttttgtttggttgctttgctttgctttgcttttgctttgctttgcttttgctttgctttgctttgctttgctttgctttgctttgctttgctttgctttgctttgctttgctttgctttgctttgctttgctttgctttgctttgctttgctttgctttgcgtcatggtctcactatgtatctctggctgttctggaactcactctgtagaccagactgaccagcctaaaattaacagagattcacctgcctctgcttcccaaatgttgaaattaaaggaatgtgccacctacccagatcattcaaaataaatgtactagtagaaaaaaaaaaactgatcctatcacagtctaaaataaaagggtttattcttctcattgaaagcagtgatgggctggtaattctaaggtcaggcgcatctcagcatctgttagtttccttgattttccagtgcttgttaaatcacagtggtaaggaggctgctgcggttgtgtaccatctcacgttggagactggaatatggaaaggatatttctgcctgtttcttgtttcaggaaagctacctcctaaaggacttcctagggagcccaggcagtctctgtggtgagaagaatgcattgtagctgcccgaaagcaagaaagctgggacggctgttccttctgatctcttcaaggggaggaagtgagggggcagggtttctggaatcgccatttaatcagcaaatcagcagtgccagccacacttacatctaaaaataatgagtttattacacatacaaatctaaatgcctacttcctttgaaacctttctgttttcagatcttgttctactcataatcttttaagatgggaaatcaccttcactttctaacttacaaagttcagcttaagttgagtgaactgagctccttctaacaaatagtcaccttcacaagtatgttgaactactgcttttgaaacctcagagcccacccacagtgacatacttcctccaacaaggcatacttcctaatccttctcaaacagttccactccctggtaacattcaaatatatgagccttgggaaggccattctcattcaaaccactaaggggctgtgaatatccccaggaaatgaacttaatgggtggtttacctttgtactctctcctggaagtagactggccccaaagaaagagtcaaccccagctttagttcccataagtttctgctgttactcagataaatgagctctgagaaggtatatttctccatctgctgagcttcaaatgtcttcagctcaaaatatcagctttggaactccaagtaaatccctatgcttgttaaaggatcatttaacaaaaattgagggggataagagataaaaatcatgaatcatacagatataaaatcaaaatgtcgtgaagacatttactaataagagaaccagtggtaattcaggagactgtgtgtgtgtgtgggggggggggttcttagtcaataaaaatgctggaataaaagcatacaaaatcaattagtaacatgggacaataattaatgtatctcaccatctcatttctaccacagaaaatctaacgacaatggttatttgcatttttatatatcagagacaaggaaagttgtcaggataattatattgaaggaatagaaagcagggtcctcactgtcagaaaagtggggagataaacttaagaggagaaaactaaacttagccttatggtacttcatgggagtgggggcaggtagggaaggttctcatagttcattattgagagatgtactgataagtaaatgcaggtgtctgtgttcacagtcccagtccacctgctgaggacactgggaacagcgacatcccagtagcaatttgtacacccagagtcttttttttttttttttttggcttctaaatatgatccaaccctggaaggaggcagaactcggagacatggtaaatgatagaactgcagcaaggagaataggtcattctgaaatatcattcagtgtccaaaagcatgcaaaagcagtgggtcctgctgaggtctgagaggaccaaagacagcttgaggttgttaccacaccagacatggcgaagtttgagagagggaaggcagtgagccggctcagcaggttaaggcacttgtcaccagatgagttcctgggatctacttagtgtgtccacagagttgtctcctggccttcacacatgtgctgtggcacacaagcccactcatacccacattacacacacacacacacacacacacacacacacacacacacaataatgatttttaaaagcaacgaaagtggtcccagataaaactaaggaattaaattatctcaagggacaagtccaaattagacccctttgtttaacaggtatttggaacccacagcttgaaaagaagctaaggattcttgggggatctgattgtgacggttgagtcatgctgtgggagcatgtctttgcttgtagggaatatatatcaaagtgtctaagggtaatatcaggtgagcactttacgctcagatagttcaaggaaataaaaaatttttatcctaaatttgcaagttctctgtcagtttgacaatttaaaattctgttagcattaatctaataaaatattagttatattctaattgtgacataatagctaaggcttctaatgtatatattgaactataatgttaaggaaacaggctaatttcatggcactgtcattgaaaagctgtatctgccattgaatataaatttaaatttaagagataagatataagctgggaatttgccttagcagcagagtgtatgatcagcattctggaggccatgggcttaaccttggtactgtcaagaacaaaaagatcataaaaacataatggtcaccaaagcaagtgactcagaatactcaaaacagcagcatgaatgtacaaccatgttcatgcagctaaaactttaagtgtaagactctgacgagccttagccaccagagacaccccctccccatccaagggagccacgtggagctggagattgatgcaaaagcaagaggagtttattgttccagcatgctgggattgtccagcacccgaaagagaggcagtgaccctgggcagcctgttcagacagtttttatacagttttcgggggtagaatagagcaagagccactaggcacaatgtgattgacagaacagtgtgacttttatattgacaatttgttgtcaaagaattttttttaatcttgatctttaaagttcaaattttaaagtttaattaagaagttattaaaaatcaacgtcaacacaaatgtgcttttgatatctctgttctgggatacacaaatcttagtttctaatgtggtttaatcaatagttgggggaaatgatgacctgattaatttggtgatagcttcccacgtgagaacactgttcatagcgtcatgtgtgacacaggagttaggattcctctgccaggtttcttctgggggtggggtggggtggggctgcagatgcgtgtgtgtagtctgtataggagaatgtgcaagagcacaggtgctcacagaggctggctgcatctccctgaagctggagttataagcagttgtgagctacgcaacattgctgcctggaaccaaactcaggtcctcagtaagagcaatgtgctcaaagccacaaagccatctcccaaggtcttggagtctagttttacatcacaacattacagttatggtgaatacacatttacacatttgctaaaatcccgtttgccaagaccaagaatgtactatgctgtaaacaacagtcaatgactcatgtctgttcatcttgtttaacaaaatgtgccactctagtggaggactctgctggtagaagaggctctgcttgtgtgtgtgtgggagcatacaggaaaggcaccctcccttctatttgctgggcaatgaaaacagctctaaagaataaaatctactttaccctcctatgtggttacccttcaaagtcggaatagggtagacaaaaggttctcaagtatctggacttttccactctttcaccagcttcaagacaaaggctctaagttcctgtgtttactccacacgctctcttccaagtatctatggacaactgttactccttgggtctgcatctctaatgttcccattcagcatgtccctttccaaacccctcaaggagcaaacaatgtcagggactttgttacaatgtgtttcttcctgtgtcatcataaaatgaaaaaaaaaatacataagaggatttgagagccaagctgtaatagactttggttaactccctttggtttaagttggggtctagcaggggcaaattaatgtgtccaactctttgaagttccaaagttctcatagtcctcgttgttttattgtgtgctcataggggtatacatcatttaattttaaattggtttgggacattcagaacacattatctcctaaaaacatgatttcaaatagtaactaattttctatcaatcgataaatgaaccacttgatatgtactcactgataagtggatattagcccagaaacttagaatacccaagatataagatacaatttgtgaaacacatgaagctcaagaagaacgaagaccaaggtgtggatactttgcccttcttggaattgggagcaaggcacccatggaaggagctacaaagacagtttggagctgagatgaaaggatggaccatctagaggctgccatatccggggatccatcccataatcagcttccaaatgctgacaccattacatacactagcaagattttgctgaaaagaccttgatatagctgtctcttgtgagactaggccggggcctagcaaatacataagtggatgctcacagtcagctattggatggatcacagggcccccaatggaggagctggaggaagtacccagggagctggggggatctgcaaccctataggtggaacaacaatatgaactaaccagtactcccccccaccccccaccgagctcgtgtctctagctgcatatgtatcagaagatggcctgttcggccatcagtggaaagagaggcccattggtcgtgaagactttatatgcctcagtacagaggaacgctagggccaagaggtgggagtgggggagtgggggagtgggtgtgggagggtgtgggggacttttgggatagcattggaaatgtaaatgaaataaatacccaaaaataaattaataaataaataaataaaaatttaaaaaataaaaaaagagtagaatctcaccgagaagcaaggcagtataatctgaggcaggaattccaaaacgacaggccagggttcccaggaagtgcagaagggacgagactagaaagtacggctggaaatgggggatgggcctgtgggtctctaaaaggtggtacggtggggagtggatctgatgctgagtaagaaagccgcactgagtaagaaagaggctcaggtgaaggatggaaccaagagggaatgaatgtggcacccattctcctcgcagcccatcatatcccaggagactgagtaacggtgccgcctggcccctggctgttccagctacttccactatctcttctacctgtgtgtgtgtgaactgtgactccaccctgtaactccaccatctttcagttggatcaccacagactcctcagaggtggctgagagcccactctcaccctttgagatctatgaccatactccagtggccaaaaacaatgttaggaaagcgcaggccctccctagcttgaaggggccgggtccaccttccgtttctcttgcattttgaacaaagaccaacgtcttctcccttgtctgcttccccagcctcagcttaggccacacatgtgcccactgtgctccgcaggacctgttaagttatctgatcctcagcctaaacatgctcacctccacacacacccatgctcatcttcccccacatccctacctcctcttgctgcccaggttcttctctttgttttcccctccgtttagtcagacccggttctcagaagcccaccttacagatcccagcagttatgccacgagagctcaggtttcatttcttggtgcgcctcatttgggaatcacttattgacttattcagttgtgtccttacaatggagaacagcccttgccaggacggcagctgggagttagccaatgcccggcacagtcttgccagggcctcacacttaggaacatccgatacacaaatgagcaggtggcgcttgcttctccatgccctcaaaccagagcagccttgattctgaggccatgggaaagacacagtaaatgcttgatttaaaaaaacaaaatgtcttagggttttactgctgtgaacagacatcatgatcaaagcaactcttataaggacagcatttaattggggctggctgacaggttcagaggttcaatccattatcatcaaggcaggaacatggcagcattcaggcaggcatagtacaggaggagctgagagttctacatcttcatctgaaggctgctagcagaatactggcttccagacagcaaggataaaggtcttaaagcccaaacccacagtgacacacctactccaacagggccacaccttctaatagtgctacttactctctgggctgagcatatacaaaccatcacacaaaacaaaaacaaacaaacaaacaaacaaacaaaacaactgaaaggtttctatagaagagaggaatagaactggagttaaatgaacatgcgttcattaaaggggaagctaagaaaaccttcccagagttgggagctgggaacaaagtttagtgatagactacttgtccagcatgaagtaggtcataggttcaatcctcaccactttgtcactcgaaggagggtgaggacagtggactaagaaataggagttggtaagagaaccctaggaaaagaagctggtaagagctccctcgtgaggcagaggcactggaaagcagctatgggccctggtgatagcgatgccatgtttctacactaaccagatcagggacaaacgtgtgggagcattgatggggcctactttgggtgctacattaccctttccaactgtcgtatttctctccctctgcccccagtcactctcggaagtgcacaggatgtcagttgtcccctcggctccttcccctgtgggaacatgagcaggtgcctgcctcagctgcttcactgcaatggtgtggacgactgcgggaaccgagctgatgaggaccactgcggtgagtgagggggctgagccccaggcagcagggcctggctgctctaaccagaccaagactggaattcagcgctcgctcgtgttggcacacagctgatttgcctcaggatctactcgttttggttttgtctgtttgttgttttgaagtaaggtctaccgtaaagcccaggctggtctgagctcactgagaaactcaaacctctaagatgtccaagtatgtggtggtgttgtctctccaggctagagcagcctggaaggctcaggaagagcagcagaatttcatcaccatctgtagagtcaggtgataaaaactcagaacttgagttatttctgactcccgttgttctcatttccttggccagctgtgggttgtttgggttttttttttttctttttcttcttttttgagtatctttatgctcccagggctgctcattattaagacatccatatgtaaattcttgctaatgctaattaaattaaaccagaaatttggccttttcagaatatacaaacttcatgcatatttgaagaagccatattaaatatatttccaactgtataaaataaaatatattagactatctaaatgagatgactatgcagtaacttttaaaatgatcattggcagttaaaagtatatcgtcaaataaaacatctttttttttagtgggagagaaagtttttccttaagaaaaattcaaggtaaagcttaactcaaaactccagcatgcaggaagcagaggcagacaggtctttgtgagctgggatccagtacggtctgtaattttaatggctgactaaaactgtccgttaacaagatccagaatcatctgggaggcaaacctctgggaacagctgtgagggggtttctagatggggttaattggggtgagatcacgtatcctaaacgtgtaaagccccttcctgtgtctaaattcgagaccagcctggactacagagtgagacagccagggctatacagagaaaccctgtctcagaaaaaaaaaggggtgggggagtgagatgtatacacaggacgatctctcccctaaacataattacaatacgaccagctgctcagactcctgctacaccaagtttggattgtaccctcaaattgtgagccaaaagaaacccgtccttctttaatcacttgtgttagacattttgtcatagcaatgaacgttaaaggtaactaatacaggctctagagagattggcttagtaattaagcacacttgctgctctcccagaggaccagagtttgagcctagcacctacaccagagtctaaaaactgcctgtatttccagctacaggaaatctgcttttctttcttggcctacatgcacacacataattttttaaagtaactaatacagaaaataggtgccagggagtggcatctttgctgtgattaacatggccatggtttacaggtttttaaaactgttttgtgggaggaatgtgggacagtctgcaggtgcaggattaggacgtcctgggccacagtgagcagagtttaagtggccattcttatgggaagttgaaagatcagaatgccaagggaaagacgaacattggagacccagctcctgaagttttttgaaaggacaaggctagaagtcgttttgaaagagattctgacttcattctgcctgcgtcccgaccttaactctgatcaaacctctaagatgtctgggtatgtgatgctgtctgtctgtccatggcagagtggtttggaacattcaggaaggacggcagaactttatcatcatctgtagagcgaggtgataaaaaaaactaggagttctaatgaaccccatttgctgagcaaaggatcagatcaggctgtggcatgactactcctcactcccttactcagatctacagggaaagagaagacacagcaacacagttgaggctatggacaaagtgtagcagatgcactttaccatgtaaattgattagcaccataaaagataagcatcgtgttctgcaatggaacaataggaaatgtgccctggacaagatcctacccagtaaagcctccaacttgtaaaacacaaattaatttggaaggcgagagaataaactaagaatgcttggttctttgctccaaaataatcccctaaagaagaattacctcagagccagcagcacacagccatggctacggccctagttgaagggagccagactacacctggagctggcagcagaacttggcaacagccatctgtgtggtactgattttataagcatgaaagatgcaagagtgagggagtcgtgtaggcttgcagcaagctccttaaaagtggatcaagccatccaacatgtgctagctagggttagagtccctggaaggagactctgaaaaagagttgcacgaagctgcaaaggtaaagcctacattgcatttggagactccaggatattggagacgccaccaagaaaagctgcaggcagagagcagaggcagcgcaagaaagaatgtgtgctgcagctggcagagctggtgaaacggggctaataaacaaacccctgtggagcccaggtgatttggtcaagagtcttagttgccgaacagtaggctgcaggagttgatgttttctctcctgggttttggtctgatttggtttgcccttctctttctgtgtccccattctttcctgttggaagggaagtgtttagtctgtaccattgtatattaaaggtgtgcactgttatccatttttataataggaggtcatagttgagtgattgtctttgagtcttagacatgactcggattttggacttttgtactgtgttggaactgtttttaaaaaaaactatgggggacttttgtaattgggctagatatatttttttcattattagatggtcatgagcttatgtgtacaaaaaacaagagtggctttaaagtgatatatttgtgtgtcaagcttccaagagatagatttgcagtggttaaccttgattgtcaacttgaaagaatctagtattaccaaagagggcagtttctaggcacttctgtgagacagtttctagactgagttaattgaggtaggacgacccacctccccaactgtgtggctatcataacatggactggggtcccaaactgaataaaatgaagaaagcaagttaatcacccgcgttcatctttatctgcgttctcactgttagatgcaaggtgaccagcgcccttcatcttctaccatgactcccaagccatgattcattcccctaactgtgagacaaaatgcactcctctttctttatactatttttatcaggaatttcatcccaacaaaaagaagagtaacaaatacagtaaccaagtctcaagaacaaaacacctgatacaaaatcatgaaagcactattaaaccattgaacattttcatgggcatgattcaagccaaaaaaaaattttgttttgttttgtttttcgagacaaggtttctctgtatatccctggctatcctggaactcactctgtacaccaggctggcctcgaactcagaaatccgcctgcctctgcctcccaagtgctggggttaaaggtatgagctactactgctcgacttaaaaaaaaaattataacctttcagttggggttaagaattggaaagaatcccatctttctaaaaacttaaggaatgtagagattacatttgtaattcacttagatagattagacaattattgcctaattgtataattaatgactgattacaattagacatgtgtaattatttagataaaaaaaaacatacttctccaagttcacatatttaacatagttcccacatagctcctgttctttgtaccatgtgtcactaatatagttttcatctctcctgagacttttcataaacacattctgagtacaagccaagcaaaactccaaagtcatcagagcaggaatttggtgtgttggttgcaaatcagagaaacctttcatttgttgagacagaacgatcagacatttgggaggacaagcctgggttaaacaccaagggaatttggttacaaaatgttgatggttctcatgcagaaaccacgttacgttcattcgaaccgagtgccaactcagtagtaaatgtgcaaagttaaaatagcatcaaatgcctgagtgaaagctggggttgaaactcaatgatagctgttgcctgacaagtacgagacctaggatctcattggccttgtggtccatcctaatgattaattctgagcatggccttgatccctgtctttattgtcttttcagagactctgcttctgaataaggtcacattcttaggttcctggaggacacaccactttgttgggtactgtctcaattctgtacaccattccaaatatattggaagaggtttcatcccatttcttctatgagagtgcccttgcaagaaagagaaaatgactacagaggtgtagtagccatgggcagaaagaggcaaaagaaataagcaacagcccaaaggggcaagagaagatctagagctcaggcagagtgagtgaccctgctgacaccttgagtttagatgctggcctctaaaaccatgacataagacatttctattgtttcaagccaccagagtgcaggaattccttacagcagtcaaggcaggggacacaaaacggaaaaaggtcctccttctatagaactgagtcccagtctagatgaacacaatctggattctagacactatttccagtgactcaaccttataccttactgcacatggcataaactccctgaagataagttcccttcatacagagttgccctatacgtgaaaaacaggtttttctggatattctattttgttttgtgggatgaatagtaatacacagccatgaggaaggcacaagataggaatagagaaaaatattccttatgctcatagagagaagaggcagaggtgcccacatagagcacccaggaaagacatcaaggtggttaggggacagatgggagaaagggaaagccttagaccagagtctttggtgagacctccattggaaaggaaaagcaagctgaacaggctaaccttggataacttcaaagaactccacacagtaggagtgatcattgaatgtctttggtctccctgtatctaggcttggatgtttcaggcagagaaagttgtctcctgcatccgtggaccaaatagataagcaactttggatccagactggttgttccacatgcaattggacaaaatattttttttccttattagatggccatgagcctttctcacagctgtgttctttgttctttctgagaactgtctgggccctggatagtcagctgtccccagtcagaaaggttagtagcatagcattactgggcaaacacacacaaaaattagtatgcagtaccacagatctttgtgggttcagttgtggattccctgccttcctgctcacaagcaaacacacaaaagtgaaataacgagttatcagtaagcagaagtcagctttgatggcagagagaaaactgcactgtgcttcaccagggaagctccccgcaaagacagggatggttgcttatggaatttctattgcagttgtgtgtcagcttcctggccctatacccagatcctaagaaaattcattaataagagaggtttactttggctcacaaatggctcacataccagttggacccagcccagcccatgggttctgttccatgactgatggaccaagtagaagcccatagcagggtacagctattcacttcatgtccagaaagtaaaagataaaaagtaagggatggcagccctctcccaggctacatgcccaaggatctgtagacttcctgctaggctccaccacataaaaatctcattagcagcactattgggaccaagcctttgggtgctttgggagatggtgaacacttgaacctcagctctttgcagactttaccttacctgcttctcctttgtgcctccctctacacatcaattgttaataacacattctatttggcagcatccctgtgcactggaaagcccatatttgaatagctttcttatgattcttcttgctctcttggcagtatttgattttatctaataagagatataactaaattatcttctatgtctgagtacttctgtgtgccagacacaatataagtccttcgtatgactccttttatttcatcctcgctgtaattagatatactggaatatatccattctataaataaagaaaatgaaaatgcagaaggattacgcagtcccctgataacaccgtttcgtcagaatcccatcccaattgtttggcttgtgtggtcccttcttatcactaacacacactttagtcagtcagcccgttaacagaaaatgactcatttgggaccagagcttgggaagtttcagttcatgaccactttgcccttattgcttttagcctacagtaaggtagaatgtcatgacaggagcatgtggccagaaaactgttcgcggccaagagcccaaagggactagggtcccgttcaagaaccatctaagtggcctaaaattcccaatcagtccaagttcttaagagttctgttgcccctcaataatggcatgggctaaggactaaggctctattagcacatggacccttgagggacacgtgtccaaatacagaagcttcccacattctgcttttgcctgagtggaagaacaatgtccgtgccgttattcattagatgatgatcatatgtgcgccttcaaacaaatcttttgttcataaaatttaaattggatggagcctccccttacatgaaatataaaaccttttaattttttaaaggaaagtattttaagtttcttcttagaaaagtaatatatgaaaattaaatatacctccagatttaaaatggcaagagtgagttgatgtttttaccatagttactaaatataaaatactagtttaagtttgcattttgcctcttttaatcctcctgacaatctttgagacaggaactgtttcattacctttcaagtggggaaactgaagccttatgctatgcatgaactgggaatgtcagctcacactcccaaatgaataacaatctttattcatgcaaacctttctgtgtgcaaaggttgttgctattacaagcttcccacccttccaagagacagaaaccacttaaatgtctcaaccatttcccttctactgggattccagctgagctcatgaatctctgtgatgctaggatacaaggtccacagagacagaggtctgattggctctcatcatgtgaaaccacaaaagcccctgagatatgcaagaatcaacctgatcttctaccataaacacctctgaataatcactagcctgtcacagacaccatcacacccagtctcctttgcctgcatccttagccctttgggcatcaaagccgtcatttcattgttcctgagacagctgtggccctagagaacttttgcagtcatgttgatgctcagcccttgtggccatttctactctgctgctccaaatgtcaagccaggctctgcaacgattgtccaatggtccccaggccaccctgctccagatccagagtggaaaatatgattccaaaaatggggaacccttaaactgtccttttctggcccaggtttgttgtctactttgtgatcagaaaagcccaatgcttctctttaatatgcttgcaaactcattgtcaaaggtcagactttagtgtttgaagataaagttccagcatttaactcctctgtgaacctctgaacttctgtatcatcctttttcagatgacagaagtgtgaaagcctagctccctaacacaggaaaggggtagagagcaaggagttttagaaaagaaaaacttttaacaccaaccccagagtgtgcttctgacgctggcttggcatttgctaatctatgagaactagataaacagtgtctattttggggtgtgatggtgatgatatatatttttaataggattagaaaatggaagtatattcaaggactcttaatgttaatttgtcctgcatttaaaattcagaaacactaaatattccatagcttttaaaataagcttcttatgttgctctcaggagggcggctgtgcccagcggtgtgagcaggagtcagttcccatttcaggatactacactaaagttggtagtttgtcttttttttaatgtcaaaaacaaaggaagggaagtgaccttggtcatgattctggtattgatgtacagttgtgcttgggtattcgtatcttctgtggaactgagaattgatcctaggtactaatatgagtgagcgttctcgctgagatatgaccctgccttcttcttacttttatcttgagacctgaccccactaagtttcccaggctggctgtgaactcactctgcatcctatgcaactcttaaacttagtctcctctagcttgacctcccacatagctggaattataggcctacaccaccatgcccacatgtattttatgttcaaaacaaattggttttatattcagtagtctcaaaaatataagtaccagaaatcttggctcttctaaaattatcggcccgatcttcactttttgtgtttatctactactgttcagagccaggcacgggagcacccaggtactgtcttagatacctgaaagactaaagaaggaagataacccaggcatttgaggccagtgtagagaacaaaatgaaacctatatcaagagaaaatatctaatagtaatacataaggtataaccaggcgtccccatgggattttcttttcagaacaaatcttactagataagaagtgaggggtggtagttcttttctctgaccttagtttgcaataaaagctgcccaggataatgacacactccttggtcttcaaatatttgcctctggtgtcactaagaccacagatagaggcatgttcattccatacaacaaactactgttgctgttaaaattcagagactccgtacaactgctttgacgaactgctgagctcactctacatccccaggctcatgccagtagtttggggcatctctctttttaaggataatcactttattcgaaaaacgatgccccactctttgccaagaatgtgtgctgaatgttgaatgactatgtgagcaccaagaatgctctggtttgcataagttcagatcttagtaatgaactcctacttgttcttcaaccaatatggtgtatgctttgtagactaccagatgtgctcctccatcttaatgaaggagcagaccatttaacacaagatggcatcacaccctgctttattctaggttcctctccaatgggaatgtctttcaatttttgattattcgaaattaagagttgggtgtcccacaactataaagcacttgccatgtactcatcacctctaaagagacatccaaacatcagagaacccagaatcaacctctgaaatatgtagggcagacttccaaagtatataggggcccatgtaagcagtcctgacttacaatggtttgctccaacttttcaactgtacaacagtgtgaaagtgatatacatttggtttttaaaaaaaaaacacaaattgaagtctgaattttgctcacttcacaagccagtggtatgtcgaatattatcttataatattgtgcagtagcagtaagtaagccttggtttgatgtcaagccatacacaagtagggaaaaaaaatccagtaatctcaagtgttctatgtgctgacctgtgatgttcagtagactttatatatattatatgactttaaaatatgttcattatgtatattgattgtagatggaactgtgttattgaaagatttttataccagtatatattgcgcacagaacacatcttcccaaacccccatgctgtgttttctcaactgtctccttactctttttccctagacagtttcactgccactttcacagcatttatacaagtgtgattttatgtatctatataaattctaggaaccaaatatgaaagaacatcttaatatttgtctttctgcaggtggcttaattcactaatgctatctgaatgtgtcttcattttcctgcatgtggcacagcttttcttgtttgtggttaaaaaagttccagtgtgtacataaaccacatttccttatacattcttctgtggttagacatctaaccttggcactataacacagtgattgcatgtagtgctgcagtaaacattgatgtccaagcatttctgttatattggctttaggtccttctgctatacacccaaggtggtgtaactgagacaaatggtagatctcttgatttgagagacctgatagtactttctataaggatggatgacttttcattcccccaagcagagtaaaaggttacccttctgttcacatcctcaccagcacctgttatttgttttcttaatgactgctattctaactgggtgagatgaaacctcaaagtagttttgatgtgtacattctctgatggctgataaggtggaaaaaattttcatatgtttattgaccatttgtattttatcttttgaagtctatttatttgctcaaaccaacttggtcacggtaaaggacccttccatgtgttcttgaattgaatgtgcaagtatttttttattgagaatctttgcatctgtgctcatcagggatgttggtctatcatttcttccttttttcttgtttcgttatctggatatcagcatagcttcactaaacgcagtttggtagatttcctattctactttggactagaatgagaagcaaatgtgttagctcttgaaagatttggtagaattcagcaggaaatccatctggacctggactttttttcagttgggaaattttttattcatattctagtcttgctgcttacagattcattttaaattgtctcagattaagttaatagatcatatgtgtctagcaattcatctatttcttttaagttttcctattttatgaaatttgcagttttaagatacatctcccatttcaaatttaattttattaatttcaatcttccctttctctttaggtttggctaaggatttgtcaattttaacttgtcttttgaaaaattaagtcttagtttcatcaattctttgtattgtctttttcctttccatttcactcatttcttcccttatctgttttttttcattctttcatacattgcatactaactgaagtttcccctatctctactccttccattccctccccacccactcccctcaccccaaaatccactcctcccccattccccttaaaaaaacaaaaacaaaaagagcatacctctcagagttatcaactgaatatggcataacaatatacaataagactaggcacaaaccctcataacaaggctgaaagaggccaccaggaggaagaaaaagttctcaagcacagaaaaaaagagccagagacatccccattcccattgtttggagtcccacaaaaacacaaagctacacactgtaaggtacatgtagaggacctagctcagaaccatacagggtctcttggaggccctatgagccctgtttagtagattctgtgggccatgttctcctgttttctttgacctctctggttcctgcaaaccttcctgctcctcctctgaagggtccccctgcctccacctaggatttgactgtggttctctgcatctgctcccatcagctcctggacaaaacctctttgatgacaattggcttaggcatcaatctttgagtatagcagactatcaatagtggccaactttttcgtttccattcaattgtaatagctagtttttctgggtataatagtctaggttgacttttgtgttttagagctggaaataacatcattcaaagccctctttactttaaaggtttggtttgctttgctttattttgtttgcaaaatctactgctattgggatgagcctgtctttatatgtggctctgtattcctctcttaaaatttttccacactgtttctttattccggatatttaatccttcttctaatataatgtaggaaaattcttttctgatcttgtttcgttggtgtcctcactgccttttgtacctggatgggcattctttccctaaatttagggaattttctgctataattttattgaaactattttctaatgccttttgcaataaactcttatcatttgtctatgttcatgattctgagatcttctcttttcataatgttctaaagattggatcttttagaactaggtttaccagtggttgtaagctacctgactagaaatcaaactcaggttctctggaagagcaacactcattcttaaccagagccatttctccagctcggatgaggtttttctattgagtttttccacttggctcatagaattcttcaatgtttcagtttagttcttcttcagtgtttctatctcttgtttgaattctactttgcatcccatgctgacttcctcttgtcattcatgtgattgtattctcttggaattcacttaagagtctgttcctctttcatttctttgtacaactaattctcattctgtttaattctttgtctgggattctatctgattcatgctcatcgaagttggagccttagatgctcatgcttcttgttgcacttagacttactgaaacaggtcactggtggaatttgttggtttgttagtttgggttttgttgttgttgttgttgttgttgttgttgttgttgcttagttagttggtttttgttctcattttttactactcttctttcaatagaactatttgcaaacttcaaggaggactaggttgtagtaatattgaggtttccttttcctctgttggactgttatgtagggcatcaggcttattcctcattataaccctgtgagaagaatactgccctcaaaagcaatcactatcaaagagttggctcactttgaaaatacaataatatcaaattgttccccaagaacttgacttaaaacccagccatactatagaaaatgcagattcccaggccccacactggcaaaatagatgagaactgtaacaaagaagtctatgttcttgaaagtgtcttgatttctaaagtctactagcacaaagaagactggattttctttcactggcatatatctaagtactccactcatttcgtgagtattcccccaaactcttttttcaatataaagtgctctgtagattactctagatctcctccccaaaaagcagagaattaaattcctgcaatagttactaatgtatgaaaaaactgtgtgtccttaaaatatcaagcatatatgagttaaaatatagaaacacataatactaaaaagctgttctcttaaaaatgctaactccaactttgcaattctggccgcatgtctcgtgttctgtgtgcctgccttctgctgggaggaagtaaagcctaggaaggagaaaatgccttggcaagcaaaagtaggtaaaaaactaattatcaagaggcttgtttctgtgaatattttactatttcaagagaaatttctataaaatatgtgtccagatctcaagaagaataagcaggtttgtactgtttctactagccaaaaattccttgcagctgctctgacttcacctttttctgttcttgccactgctctctgtatgtgtgtgtggtgggggagagaaaggtaagaaagaacgaaaagaagaatgagagcgagaaagaattggaatggctccattccaacctcaagtgtccactcagtgtgttaaagacactatcccagacatggcaattggtttaaagtcacaacactttatcgtgagcctatcatggatttatcattacagcagctcagctttagcagtcaccgaaattgacaggaagaagttcaaaaggaacagcagatgtgcagggattcccctccataatggtgcatgctgcccagcaatgtcacctctgagaagttcaccagcacaacagtcactcatgctgaaggggaagaatcctcagcaaaatgaacacggagtccaccaacaccacagttaacgactacctcagtgacccctgtgctgcactagcagttagttcatctgtatccagttcttccaccaccactcaggcttcaggcttccccatctctaacatccaccaaccccactccctctccccctaccactcatgctaaccataacaataatagatgccattgccatcccttccccgatggtcagctctacactcagcctgtcacctgcagaagagttcttccaccccatgactccataaaggagtatgatgagagtgtaaatatttaagacatttttatacctgttatgaggcagacagcatgtggtggagtttatggggacacatatgtttcggtaacacctgctacaaggtcaatactgtctgtgggtgcttgtccccaacagtccacctggtccaagatggtgtcccagcaaaatcccctctaagggcattttataacagaaaaaagaagaagaagaagaagaagaagaagaagaagaagaagaagaagaagaagaagaagaagaagaagaagaagaagaagaagaagaagaaagatagagcaagcaacaagacttgagtaactacaccatttgaacttgtttgacaaaattactgaaacaaaggccacagtgatggccaatgccaattgtcactgggacaaaatctagaactgtctgataaataggcctctgagcatgaccataggagggggtttattagactagattaactgaggaatgacaccattccctcggcaaagtattctgggtcttgtaaaggcgtcgaaagagagctggggtagcggtatgaactaattcggtgcagtgtcaaaggctgacaaagctcctgtgtggctatgacttcctcaaagccatgggctgtaacctggaagctaaaataagctctctttaacttgcttttgtcggcgtattttatcacagagcaacagtaaggaaactaagataatcacatacactgcatgccttaaatcagaagaagggcaagagggcagtcatgagagacgaataaccacaaaagggcaccaagcccacgatgctaagtcactccacagtgtatagtaaaaatgtgacaacttaaaatagtccacttgtaaaaaaaagctgagttaaatataggacctgctaaagaagtactgcaaataacatcgtgtcagtcactggcatgcctatcactcttagcagcaaggaaatgtcacctactaaacagccctgtgttccagagagctgccttgtcacctgcttcccctcagccccaccccccacactgcttctgactaggaatatctgaccaggtgagctgcagccacccaggaccacaattacacaaggctctgcagcctgaaatgttagatctgcagaccctcctaagatttggtcattctctcactaagtcctctctgcagccatgacagggaaagcaaccttggttgtaagaacaagcagacttgggtagagcactagcctagtgtgtgtgtttgtgaatccctgagttgatctatagtaccacatcaaaagaagaaagaaaagagggagagaagggatgaggggggaaggaaaaggggaaagaagaggaaaaaggaggaaacggcagtccctcaatgtcaccagagaccagtgagtcatctatttccacatttttttcataaatacataataacacgtcacaatgctacttggaaaaataaacatattttgaaaatttttggtaacactttataaatttcaacactttcctcaagtctaataataataaactcaaatttcaattcctcaatgcctctgcattaattaaaagaatagaactaaatgttcacaaaggagtcaacaaacaaccaagtctagaaaaggggaaatggtaatgccacacacctcaaaacctaacagacacatatggacacactatagattcaatccaaagacacacacacacacacacacacacacacacacacacacacacacacacaaccagtcctctaccctagtctgcttgttcatataaccaaggttgcttttcctctcacagcttcagaggactccgtgagaggatgtgcaagtcttaggaggagggtcttgttgcttcaacaaattgtctggcaaatgtgactaaccaaacacaggtttagtcctcaagagaacggttcattagagcagagcagccccagtggacagaggcttgaggcagccagtcacattgtatccacagtcaagacgcacagagtagtgactggtagaccattggcctcataggcaggaatagattcagtcctcagtgctgaagaaaaagaggggacagagggtgataagtgattatactcagcttactttctttcagtaaatcagcctggagccctaacctagttctgtagttgttctacatacatctagtgggggtcctcccacttcaataacccagtccaataatccctcacaaatatgcccagaagcttgggtctttagtgaccgaggggtctgtcaagttgacagtataaactatcacaagtttccaccttaccagcttgacacctaattatatgctaggcaataactgtctgttctttgtccctgtagactcatggccatcccataatacagaatgagtccattccaacttcaaaagtctatacaggttctaacagtttcaacatcatttaaaagtccaacatcttccgacgctagagccaatgccttaacttttataaagttacatatgagttttaatatacagtggcacagaataactgcccccattctaacagaaaagcttcatagcaagaaaggggcagaccagagcagaaccaaagaccaacaggccaaataccaaattattcagttctatgtccagcctctagagctcttgatgggacagtctgaactccaaaagtctccagtggccactttctccagttctgctgcctgcagtatggtctttctctcgagtcagctctcttccttatattcactttttctgtcttctcttccctaatcgggaatcacaaaaacatgccactgaaagtataacaaagtaaaaacaaaattctaggcctttaagcccaggcttgggaatgtgacctctgtgactccttgctccaatgtatgctaatcataaaacagatattgacattcctccacccacccccttcctgggttcaaagagtgttcattcaaagaaagtcaccctgaccattgccaaaacccgccatgcaaatgtgctattgttagggcctcttagaaactgtcttgagaaataaccttcacaattaccaggtattcctcgtgactcttgtaactttgcacttccttgtgactcttaactggtatttttcgtattttccaacaacgcccttcccacctccttgagttgtggtttcttcctttaaatacccccttatccagctactcggggcaccaaagtcctctacccctgcgtggtgtatgaccgtgggcccgagagcgctcttgaataaaaatcctcttgcagtttgcagcaagaccgtttcttgtgggtgattttggggtgtcgcctctcctgaacatgggggagtcctcatgttgtgggtctttcaccaccacacccacgtttgttttatttcattttggttttggtccttggttttgtttgtttgtttgtattaatgtggattctggaaactaaactcaggttcctgaatttgtgcagcaagcccttttccaactgagagacctctctggcctgctgctttgtgcgttaagtataatcatcctacccgccttggttgtctaatattattaagagatatcatgaccaaggcaactcataaaagaaagcatttaattgggggcttgcttacagtttcatagaattagcctatgatcatcatggaaggaagcagacaggtgtggctctgaggactttgcatcctgatttgaaggcaaaggcaaagatgaagagacactagacctggtgtggccttttgaaacctcaaagaccacccccagtgatgctcttcctctaactaggccacacccactccaacatggccacacctactccaatgaggccacacctcctaattgttcctaaaccacttaccaactggacactaagcatgaatggttgggagccggtctcattcaagccaccacagccacctatccatgcctgtatatctccaaaaccagtttagatgaataaagacatttcaagactcagtttcaggtaatgaagatggtttagggaaacataaaacaacgtgaagaacgaatgatataccacactgcagcatatatgaccatcgctggctcgagtgtggtaaataagacttgcaggaagctactacagagcttgataaatatggagactggggccaccccaggcctccgactggggacagaaacgcatacctgtagctagtccttgatgataattagcaaactaccttcgagattcactgccttattttagaggaactattttgtcaagatagcaaaatatatcagcttgtttttcttttttaacttcttcgctttcgaatttttcttttcaggagacaacaatgggtggtctctgcaactggacaaatattttgctaattactataaactggcttccactaactcctttgaggcagaaacttccgaatgctgtaagtaaccacgcagctgaggcccctcttttatatggtatatcaaaaaacaccatgcttttaccttttggctacaacattttattttaaatgtttgcttttgaaagtcaagtatggttttctagttgcaagcatcttaagtgagaaagcttcaatttggaattctgtttttaagagtaattcatcaaatcaggtattgcaaacaaaatcaatgtccgtggtcagggttgctattttatataatgtccttttggccatcagaggtgaattttttcctttttcttttttttttaattttaattttatttttattttcttttcatgggggaggttacaagggtggaaggtggatacagaagggctgggaaatgagtgggactggagtgcatggtgtgacattcccaaagaatcaatttaaaaaattatgatttaaaaaaaaaaagacaggaagaaagaaaggaaggaaggaaggaaggaaggaaggaaggaaggaaggaaggaaggaagaaagaaagaaagaaagaaagaaagaaagaaagaaagaaagaaagaaagaaagaaagaaagaggaaagaaaaacagtgcagtgagggaaaacaagaaaatggagaggcagagcagctgcttgggtctacacgtgaaaggcacctgcagtctccagccatggcgccaatgggcctttgagagcctttctccctacagctcacttctgcagtccctgcagagcacttgcaggtagtgcctgcggtgtgggagggagaaagcctggagagtggcttcatcgttttcaaataggaatctgtactaaaataatttcttttaaataagttttgtctagttaataaatcctgcaaatatgcatgtgtgcctgggacctgtaattttcaaaactctactcataaaccaagggtttggggaggggcgacccttttgctgtgttctttcccttgttgttctactataaatctaaagtttagcttttcacattgataccatgtctttgtcttcactactcaaatgagattaaaagactaccaacaatccccaatgtaaatgtatgcccttctctcccgtgagtcatacagttgcccagcaacctttgtcagcatcacacctgcctctcaaaggtggggagtcaaataatttgatcatcagaaaggtcaaggtttagctggtgatgcagctctctggcagaacacttgcctagcacgtataaggttctaggattaattcctaatattgctgaaaaaccttttggaagcatagcattgttgttaatatattacaaattcataaactaaatatattatgttaaaatgtaatttcatttttgtattttatgtgttttcattccttacatttaaattaaaatttcatcaaaccctatccaaaaataaattgaattgaatcttctatcttaccatattccaaaaatattttattaatttaaagaatagttattaacagaattaagtcatcaacacacattaacgagttataaaagacattgttaaatggcaaaagaaggtaatagcaaaaaaagaaaatccgtaagaaagagctccatttggtctaatggtgcacgcctgcacatatgtcaaacataagatgtccagtggtacaatggcgtaaagtcagcagcaccagaagccttcgaagcagatctggtgttcaaggtcatcctgggccacacagtgggagcctgtgtccaaaaacactggagagaacaaggagaaagaaagaaagaaagagacaaaatgaaagagagggagagggagggaggaaagggagggaggaagggagagaaaatggaggaagaaggagagagagggagagggggaggnnnnnnnnnnnnnnnnnnnnnnnnnnnnnnnnnnnnnnnnnnnnnnnnnnnnnnnnnnnnnnnnnnnnnnnnnnnnnnnnnnnnnnnnnnnnnnnnnnnnnnnnnnnnnnnnnnnnnnnnnnnnnnnnnnnnnnnnnnnnnnnnnnnnnnnnnnnnnnnnnnnnnnnnnnnnnnnnnnnnnnnnnnnnnnnnnnnnnnnnnnnnnnnnnnnnnnnnnnnnnnnnnnnnnnnnnnnnnnnnnnnnnagagagaatgaatgaatgaatgaatgaatgaatgaatgaatgaatcagcagctgcatccaaagttcagaccattaaggtcaaggagggaacggcagctgtcatagctcacactatagtttgtaaagcaaaaacagtaggagaaaacagagggagtcagaaaagaacccagttttgcctaccctgaccctgtggaagagatttgtcacaagtaattattcaagaagtatggcactacacaataagtgatggatcgagatcaatacaggggtaattttttggtcgatgcttagaagacatcaaaaagctcaatttttaattagatttctttagagtggggattacaactgctaaattaaacatctcaagcagtacatgaaataacagtggggtgaaacttaaattaaggttcctgttgtaacactttcctcatgttaaaaacgaacctaagatcagctcaaaaatatttcacatacttgaaagaatgtgagcaatccgcatgttaaagtcacctcttcagagaaatgtcatagaaagcaccatatgcaagatagccagtgcataatcaaagtttaactttgagggatttgagagagaaattatgtattcattggctataagcattgacctgctcgtgcagtaatccttttttaacccagttataattcttacatgaacatttttaaatatattttttaaattattagggtgcctttgaacccacaatccccttgcctctgtccccccaaattctggatcatgggtgtgtgacaccacattctgcagaacgcgtacaattttggaacatgacagcatccaggagtttttcaaaagatagttttaaaatattgagaggatttttttgtcacagatagtctgaataactcctaaaacttcacttgggggacgaatgcttctctgcccaacctatttccactgatactgggtgttgagaagatgaaggatgggatggatacttttggccatcctgtggggctgggacatcttacagatgggattcaacaggtctagaatctactagagcccccccccccattcacaaagctaaatagtctagcagcagttgtaatccatgtaattcctacagtgtggtttctgcttaatgtagaatggacacttccaagacagtgagtgtatttcccccgccccgcatcatctattgagtcctggtgctgggaaccacgtagcagcagctacagctataaatattcagtgccgcggtgcaccagagaaaccacttctagctgttgtcaaacaggaacatgtgtatccatgtctcctgacttcttccgagacactaaaactgcaatgctttacatatacttgcttatttttaaacaataatagctcatttaaaactctgcaggaccccgggagctgctgccaggcttctgtgctctcagccctgagctgtacagggaaaaccctttcaaaaggaggaaagcctatcactctgtgcttatgtctccttgctagcttctggttaaaatcatttagtctcccaccaaagactttatttattactttcagtacttattatcaaacagaagctttcaaatggacataaaagcctccccctccacagacacacacacatacacacacacacacacacacacacacaacacatacgcatgcacagacacacacaatcacttctccctttgatgagagaagcagaagatttcactcattttgcaacaaatggaatgtcagttctctattaaaacaaaaccaatagacaaactagggaagatggttcctctgctcctgctccagtcactagtccatctcactatgcaagcctagggaaaacttaaaagatggtgagaaatccaggaaactccttgctttccccaccccatgttagtcagcatctgaacaaacatctggcatgggagtggaaatgtttctcagtggttaagagcacttgcttctcctgcaaaggactagagtctggctccccagctcccatctgcagaggcccctgtaaccagtcaccaccagctgcaaggggtccggtgttctctggggcacccatggactcacagacacacacacacctattacactcatggtagcacacacagagagagagagagacacacatttttaaaatctttttaaaaggaaaagaaggaaagagggattggctcctcgccatgtatattatctgttactcctagactggcctggtcttgaccttaaattcagagcaaacaatggaaccttaatttaaagcattacccaagtgcttaggtaaagcatgatagacttgcatagcaggcaatactcatggctctgcctttctttctcttcgtcccccctcccacccggccccccactttgttactccttcccgcttcctctctgttcagtggttggctctgtgcccatgcattgtttgtgccgagatctagaacttgactgtgatgaagccaatttacgagctgtcccatcagtttcttccaatgtgactgtaatgtaagtagcaaagattggctcgtccttaataaggctgaataaggctgaatagtgctgcagtggacccctggggctgaccctgggtcatcactaagaatgcgtttttttggttcaaagacagtttcctccctaaatcagttataatgaatttttcacgcatggcttgaaacgcttttaaatattagacctcaccttaagttacttcataaacaactctgtgaagtgttgactattcacggtatttcatctaagcaaaagacgccatccgtttcaattgctactggggggtggggagggtaaggctaaataaatacttcttacagctttctcattacacagaatttttattcgatgcttattgcaagagctgttttggagtttattacacacaaggaagttttcgtgtatgcttgtgtacaaataaagagaaacaaataaaataaattggaaaaaatattcccagaacttcatatttaaattaacttctaaatcacattttgatgctgtcatattgatgttgtcatcttttcatacacaattcagacttacatatagaaaagaaaagaaagagtcatataaagagtatcctgctgagcttagcatttgtggtgctaagtttctagtcaaggttatttgacttagccagacttcagcagcacacaagcacacatgttggtccagatttttttttaaagacttcaatggaaaatagaaacttcagtatctttttattgagttggttgggctttgggttttgttggtgtggggacttcatccatgtgttttaatatcttgtgactctggctttttggttcacgcagacacagtaagagtaacccttgactatacaggtgttggcaagtcttgcctttctcaaacaacctacacggcaactcagatgcttggcacccaggtaaaggagctgcagcagagcccgtcaagttcacagaagtctgggtgttacccagtggacctcagtccgggaacatacactgagacccaggggaatgtcatgcacaaaagcttgctctctgagggaagttgaaggaagtgacatttcctagaatgaagaggaagcatcctctgtgtccttcccttctcacctccccagcctatcctagtaattagtcctgctagagaaaaaagtaatggtaactctaaagaagctgatggaggtcctagaaagagtttctacgaattcgtttctaacaagagagagagagagagaattatcaaccccactactttcatcaaattactgcaaaatccaaatgaaagtctgatgtagccaacctcagttgtttttttttttttttcattttcccacaagtaatattggaatttatttgccagtgaaccaactaatctgtgaaagtgaaagaaaggaacagagaaagaatgctagagggatggaggtgggggaaacagtaaataatgtagataaattattatggtatgcatacaaaattagatatgtatcagccagctttaacccagaaaggaaaggaagaagggagggagggagaaagggaggaaggcaaagagggagggggagggaggagaggaggaaggagagttaaaaactaaacctaagatcatattctacaagaagacaagtgaagaaactataaagtggattcagggcacctgccctggacttcagattgatggaagagtgggaggctaggtcccagtaaatgggaacgatcataacaccactgttagatttgttatttcaatttaactttaacaggttgcttggtagatattcaacaggcattcgtagttgtaggtataatgctcagagatttaaatctacaatatttggctatttctgaagaaggaaagaagaatgaaagaaagaaagaaagaaagagagagagagagagagagagagagagagagagagagagagagaggaaggaaggaaggaaggaaggaaggaaggaaggaaggaaggaaggaaggaaggaaggaaggaaggaaggaaggaagagaaaagaaaacagtactatcagacttgaagtattgactcagtaatattgtacttgcttaatatacacagggccttggattcatatcaggactgtacacacacacacacacacacacacacacacacacacacacacgtacactgcaagtctgactctatacatagcgataaatacagttatacagcattgtcttttgattccagctgtccatatagactcttcttgcagatccctggctctacttcacaccttgttccagtctgtttgttctgtcccagagggggtgaaaagctctaggctttagtgtaaatgcattacaagactaaatatcacacatttccctagtaagttcgttcttccagatttgaagctgcaactcttctagggaaatgtcagaaatggcctaagtcacatgtaagtaaaatatcaaagaagctaatcacccaatgagtgtttattgaagtcaaggctttttgaaaatgtttcacataaattctaaagagtgaggtgagcaaacacagatagctataaatatttaaaccttgtcccagctcaataaatgttaactttgtttgagagttgacttttagatccctgaacatagccagtaaaaaggagagccctggcttgtgcttcctccgtacaacatgcgcacactgtatacaatgcttggtgaagaaccaaacagggcgtctaaattcaagatataaagatatttgacatgatgaaagtatgcggggttttcctggtcaatgaaagtaatatccatccctcttcgcttgtatcatttagaaagaatttgtttagaatccctaggcatgtgctaataaggatccagctttacaagagaggtttctcgaaagttcctaaatgaacctcccttcctgcattcaaaccattccactcaagagtgcttgggggttctcatagaatctcacttgtacccctttttagggatattaagtgcgcttcctcacagtctttgaagtcctaatctcgcatgaaaaggggaaaatgtatcagctccatactctcctagataccccccaaaattcccaacacactgaaataatcactttgaaacaaacatgtaaacgaacaaacgcaatagacaacaaattgcctcctaagccctagggaatagggataagattctctgagagaatcctctaatttatagataaattagatatcagtcatccacagagagggcagagatgctctttacaaaagaacatggtgggagtttaacaggcgtttattgagagaatggataaatgaaggaaggaaggaacagaagggtggataaataaacactcttttaagagcacaccaaactttcacctgggtcattaaaccaaattcaaatagttaacaatttctctttccacaatataaacacagaaagtctctaaggctgcctttggttcggaagctaagtcagaacgctggtaggaagtctcagtaagctaggagtaagaagagagatggtttagtggtggctcagactcccagactgacttggagaaagtgtgactagtcaggctttctgagtcattcattcaaaacacatcattaaaccaggctatagtgcatccggttcagaatccagcccaggatcgtcactgtcataatgagaagtaagatatgaaagtgaagagccactcagcaagactgaactgtgtgtgtgtttcaggtccctgcagaggaacttcataagaacactccctcccaacggcttcaggaagtaccatgagctgcagaagctgtaaggaaaactttaactctgggcttactgtcaaccttcagtcttgtgtacctgtttacttctgtaacagcatcatattacatattaagtctgacaattcccacctcgagaaagtatttatcccttagctgaagacttgcaagtaaaacttctgagtgtctcttaggagacattctagaaaaacctccctaagtaaatgggagcatgcgtgctgtgggtcctccgccatgcttcacagaacggaaatatgtatttctgctttcccctctcatgggtcagctcaatgctcatctcagagaaaagtgtgtcaaacttagggcaaccatgatggctcagtgtatattaatcatatcagtctgttaaggcctaggtaaaatgttaaggcctaggtaactgttaccttgctaccctgccattataaggaaactttctcatacatttctgctgttgctaggaaactttctaatgataaattgattacatattctcttatgttttgtgcccttagaaaccaatcatgatagaagtcaataaaactgtatatatatatatatatatatatatatatatctccacccaaaccaaccacccaatagcacttgctgaatatatgtataaacttttatggtatagccttcctttgggatggacccaaacataagacagacaccttcaccaatataagaaattatttccattttgtgtagtggtcaagtagagtttaagttcccaagacctccccaagaactgacatcctacttggcagaaagagacatgtacgtgggtaactgacatcctggttggcaagttaagacgtggatgttagatatggcaagtcccctgccacagctgaataccccaacagtgggaacaggataagggtacaacaacagacatgttcctaaggaaatccccctacctataaacccagattggcagaataactcggcacagatatttgtagatctcaggctttaaaagccctgtaggatcttaactcggggtcacagttcagttctcaaatctagaccatgaccctggtcaaccagtcctagggtggatgctcaataaagtatccctgtctgactgagattagtattcctgtggtttgtgaggtgattcgtgaaccccaacaggtcagggttctctagagtaacagaatatgtgtgtgtgtgtgtgtgtgtgtgtgtgtgtgtgtatgatttagtagaataaaactacccagcacaggcaccaaacctgatgatctgagaacaacccccggaaggagagagatgactcccaaaggttgtcttctgacttctgtgtatactgaatggtgtgtagtgtgtgtgtgtgtgtgtgtgtgtgtgcacatataataataaataagtgcaaaagaaaaggaagaagaaatagggactgtagaggtgtgtaaattaagaatgagtattgctctttcagaagaccagagttcagatcccagcccaagttggccactcacagctgtctgttactccaccttcaagtgatccaagagctctggcctctagggagacccactcatatgcacatatgaacacaactcccccccccccatagtgtaactaaaaataaaatcaatcttttagaagaatttttaaagatgtggtgatcttcagcaagatccggtatcattattaaatagtgggcaagggatgtagctctggggaagagcacttgctcagtatgtgcgagactctggctttaaacagcaccactagtttttttggttttttttttttttggtttttttgtttttaaatgtttaaatcatgaagtatttgtcttagtcgatattctattgctgtgaagagacaccatgaccacaacaactcttataaaggaaatcatttaatcggggctggtttacagttcagaggttcagtctgttgtcattatggcaggaagcatggcagacatggtgctggagaagtaactgagagtttcacatccacaggcaccaggaagaacaggacactgggcctgacttgagcgtctaaagccacaaagcctacccgcagtgacacacttcctccaacaaggccacacctcttaatccctgtctccactccctaatgaccaaacattcaaatattgtgagcctatgggggggacactcctatccaaaccaccacagaattttcccatatgttagcaagttcagctgaggaagttcactctctatcttggccctgatcagcattgggctgcttgcctctcttcaggtgagcttcacgaatgtattctcaacatccgcaatatccaaggtgatctctgtatgatttaggtcaactctatgattgagccataaatagttatttacttcttggacttagaggctctgtccctgaaacatactatcaagaaaacatcctggaacttatggaccctgcttatggacaccttgatttcatcttggtgtactaatacagatgtgcactttcttaagaaatagatggagttagtataaacacactacaatcaacagtatatccccagtatataaccaacactgcgcagcctggagcaggctggtcctgaagagggctgaggccgatactaaagcaggaaggggtggcattttcttactctgtcagtcctctgggtttgagactttatttccaaagtcacatcagaaaaatgtgaacttgattgacacatacgtatgatagcgaagagttcagccaggacatatattcaacagcacacatcagattggcctctaagaggatatgctggtacctcatagccctcaaatgaccaagcatcagccatgagctacctcctcctgcttgcaaagaccatctcccaagcaaaacacccatgattctgctcatgatagtctatgtaagcagcttctcctggagggctgtctgtgggaagagatttcagggtgtactctagatggcctcgtcacaatgtggatgacacaccagcagctaatctaggttcttctctctctgagagtctctgatatgagagttgaaatgagcagagtatcaagcaaatggcctatctaaggggatgctgacgtgggagtcgcctctgaaaactttatccatgaattgttggaactctttccaggaaaagtttttaacgaagaaaaagtggaccggagcccaaccactcctcagaaccagtgggagctcttccaggaaaagaccttagtccaggagtggtcagccagtcagtccaggacagcagcagccagcactccgatctgctcatgttgctcaaaatgaaagatccactatttccaggaaggaaccagagcttgagagacaccatgggacaggttgcaggttgcgatagcaccatcaggaaaagcatctggttagaagaaagtgattttgaccacgcccggcagaaagtgattttgaatgggtttatatcacctcacttgatcaggactgaaggatagagggctccaaacccctctcctcctccaaacacccaggtgatacctccgcctataggattgaagacagtgtagccacgctcccaaccccgtccctactcttgccaagggaaagaatctaagtccttgcactgttccttgccctgagtggggcatttaaacaaggcagcagcagttggttctggtttgagtatggaagcagaggcaggttatcctgcctcagggttgtggtttgaatatgaattgaacgccttaggctcaagtgcttaaacaactggtgtccagcgggcggcgctgtggtggaaggttatggagcttgaggagttggagtttcactggaggaaatggatgactgggattttgtagcctgtttcctgttctgcctcagctctccttggctggagataacagctaacaagctgcctcctgctcctcctaccctgccttccctgactcgaggggctgtgttccctcaaactgcaagccaggataagcccgccctctgctaagttgttccttgtcgggtgttttgtcacagtactgagaacaaagctaactaaccctatcaggtctgtgtgcatacacgccactgcctgcccatcgcaagccgtgagacactgactgataagcaacttacttgtgcaagtgaaagaaagccacctaagttgtttggggatttgtgggtgcgtggtgtattcagaccacagcatgaagtccagacttactgaagcaccagaccaacagagagtgagacatcctcagctaaacctgtcgtctgaccatcctgtgctaggccaagggacccacacacagggaactcccagctgtcccaaggatgtcagctcagcacagtcaccaacaattgacaagattcattcaggttgcctcccatccatccttccaaatctagcatttcgcctcctcctattcctgtgccggtcagcactgactctgtgcctgccttcagcaaatctccaactatatttccttatgtttcatctaaccatctctatcaggtctgtctctgccttcagtaaagccctcatgaattacagcctccttaacctctttataatcctgtaattccctgcgtgtgtgtgtgtgtgtgtgtgtgtgtgtgtgtgtgtgtgtgtgtgtgtgtgttgtgagttgggggtttacctaagcgttaatattggtaatagaagaacctgtgattgccgtggttatgttgtagagcagtggttctcacccttcttgatgccgtaacccattactacagttcctcgtgttgtggtgacttccaagattaaagttattcagttgctacttcataactgtaattttgctactgttacgaatcataacataaatttctgatgtgtgacccacaggttgagaactactactgtaaagagctatcagaactattttataaactacagccaacaaaaacaataaatcttacaaatgtgttgttattcagtaatttatgatggggtgaaaagacacaaatatgtctgtccatgtttctgacatcatgtgctcatgacagacataattcttcagttttatcttctgatagcaaaataaaaagaaaggcataatcctcaagaggccaaggtcctgccttatgttgtcagagatttgtctgtctttctgatagtttaaactgtgtaataaacttggtgtttttttttaataataaatagatggaaccagagggaatccaaatgaaaaattagttagttcataaaaataaactattctaaagtgccagatattttaaaagatttatttcgtgttcgaaaataaaactccaatgacaatctatttttcagaatttctcagcttaaaaaaaaaatgcttttcagggcaactccctgaatcctccaatgcccaaagactcttcctgatatctagctccccctggtggccacatatttagatggcatcggtatcagttctatagcatttagatacacaaaaacattttggtgtttgtttgtttgtttgtttgtgagtgctttacctgcatgtctatctgtgcaccatgtgcaagccttgtgcctgtgcaggccagaagaaggctttggattcattggaactggaattacagatggttgtgagccacattgtagatgctgggaatggaccctgggttttctgggagagcagctaatgctctcaactgttgagccatctctccatcccctgcttgtgttttgaaacaagtctcactgtgaagatccagctggcctagaactaagagaagtcctcctgcctccgtatcccaagtactcgaattataggcatgagcctttgaatttttgcaaatcacttcaaacaacaatccaaagagcctaacgacaaaaccttctgcccggtttctagaggcacaccttggctccatatacagacagtgcaatctgctgcttactagacgctcactacaggtgaaaacacaacactccatcttcaagtctccccgtgtatcaggaaataggatgtgttacctttcacgtgaccgggccaccacatgtcacgggaaagaatcaattccgtagctgcgtttttctggtggaatcagggggatgcctgtgaatcaaactaactgaagtccgttcacattgctttctctcttttactgctaacaagtcatatataaatgtgagacagtctccagaacgatagtaatgtggattccagacccaccatctttgcttcatcgtccctcgcaaccacagggctgcaacactgcgcacgggtgcacggaacgggagagcttagccctgggtcctgttccttctaatatgcagtcatgtatggagtccaaacgtccagggcgactcgaggtcactctgtaagcctgtgtgacgttccagtctagttcactggccgtttaaaccccttacgggttgtctcaatggcttttgagaccaaggtttacggtgtcagattactcagactcaattcgatttactaggatttggggttgctttgcgataagatttgtggtatcatatgtcacaaatacttttttgtctgtttctatgtgagcacttataaatctgaatatgtaacaggaaaatgtaaaagcctggattttaggcccatgtgatcagtgcgtgcttttctctgcattagttcttgtctagaaaattaattctaaataaccactttagctcctattggtgtagctttacaacttcaaagttttgcagttgttttactaattgagaatttcgtgcaatatatttttatcatatttatcccacagatccacccccgcctccatatctctcccagctatgtgacttctttctgtgttttttttaatgacccactgagtctaatttgtgttgcccgtaaacttggggtgggggagggggcatccactggagcagagttaacctaccagggcccacacttgtaaagaaaactgatttccctcccattgggaaccatctcctgccagtaccttaccagctaagggcaggggttcatgaccccctcacttctcctccccaatgctaaaacattgactggcttgcttttgttcagagcattggcttccctgagctcatgagcagtggttctgtcaagtacagagcacactctgtcttcaagacactccagaagagggcatcagatttcattacggatggttatgagccaccatatggttgctgagatttgaactcgaccatgtggttgctgagatttgaactcgggaccttcggaagagcagtcgacgctcttaaccactgagccatctcgccagccccggctcttacagtctttgtacctcctcctccacaacggtccctgggccttagactgggctgtggcagagacgtcccagttagccgaacgctccatgacacatgttctctgcacttggatcagttttgagaatccactgcacaaggaaacctcctccctggtgaggtctgacagctgcactaacctgagcagagaaacaggcacggagggcagcttgatattatttccatgtatagcttcaacttgcaaataaacaccgacccaagcacacaagaatttaacagcaaaatgccagtttgggccagttatcccactgtctctccctttccactcaggtcaatttctaattccagtaaaatgcatttaaggaggtttaccagcggtgccagggacaaggctgttggcacacgcgtgtgccaccatcacctccgattacatgtgccagggtcttttatcttgtgaagctgacactagtgtattgttttctttctgactactcttggtcacaggtgcctgcaaaacaataggattcactccgtgagcgtctctgccttcagaggactgcgcagcctcactaaactgtaagtttggtggctaaacggctccctgcaccatcagcattccaggctagtccagtccagtccaaaccagttctcctgctcaggagagaggcaggggacctgcaagtagtgctgaagagacagtgtggcaggagggctgggagcatgggattgggggcacactgtgttccagctaagccttgatgtcactaggcaggaagtagccttgggcaccggctccctctactttcctgtgatagtggcgactcccggctgttatgggaatagattttaaaaacacccagggcaggcggagtttccagttgagtgacaactagatttccccatgttctgtgccactggtgtggtatctgcagcaacagggtgttagtgtccaattgtggaacctacctaatagcattgccaatagcttctagtgtttgctgttgtctatggaacctctctggccaaagtccccccaaaatatatctcattcctggtacggggagcgagggtcgggggacatggtagtgtatgatgtctcctgaaggcatcgttatcctccaccgtgtggtgactccattcaaactctttttatgtctacactttagaaagtttctacagtaacatggatttccaaaggacctttggagttagttactcccccaccacacacactccctcctgtaccttgacctccatccccacccccctactcctcctaccctcccatctccaccccttcactcactgagttctagtttctccattactcctttatagcactatcttctacactccttcctccacaccattttaatctcacacaacaacactgaagagttctagttgttcttgcccttgccggcacctttcgccgccccacccctgccctnnnnnnnnnnnnnnnnnnnnnnnnnnnnnnnnnnnnnnnnnnnnnnnnnnnnnnnnnnnnnnnnnnnnnnnnnnnnnnnnnnnnnnnnnnnnnnnnnnnnnnnnnnnnnnnnnnnnnnnnnnnnnnnnnnnnnnnnnnnnnnnnnnnnnnnnnnnnnnnnnnnnnnnnnnnnnnnnnnnnnnnnnnctctctcactctcatcctttccttgcttggcatggtgtctgagttagggttttactgctgtgaacagacaccatgaccaaggcaagtcttataaaaaacaacatttaattggggctggcttacaggttcagaggttcagtccattatcatcaaggtgggagcatggcagtatccaggctgtcatggagcaggcagagctgagagttctatgtcttcatccaaaggctgctagtggaagattgacttccaggcaactagggtgaggatcttatacccacacccacagtgacacacccattccaaccaggtgacacctattccaacaaggccacaccttcagatggtgccactccatggtccaaggatatacaaaccatcacagatagtttgttttgatactaactatccaaatgggtatgaagttgagtatcgtggtggaaaaggaaagccatcttttttccttttaaattctgtgtacatggatggtttgcatgcatgtgtgtctgtgccccgtgtacactgagtgcccgagagtgtcagaaaacaggatcaaatcccctagactctcaaggcaaggtggaagtccgaatccacatgaactaccatgtgcatgcagagaatcgaaaccaggacctctggaagagcaagcagcaaatgctctcaatcactgagccatctctccagcccagggaacacttttttttttaagagactttcaaagttctgtgcatccgtccacatccttacaagcagcctcttacaaataagtgtatctaaagcttgcgtgaaccaatgattccctgcctgcgtctcattcttcccatttgccttaggttttctttgttctagttgtatttcattcttgcctgggaggggtggggtggtgcactggtgggacatggcaagcatggaagtcaaatttgtcacctcagttttctcgctctaatatgtgggtcctggggattcaactcaggtcactatgttttggagcaagcacattgtcctgctgagccatctcaccagtcctatttatttagcatcttatcctacctgtcttgctccacctcctcactactccattcttgatcgttacccaacaaatctgtttctaccgtctttacagtctgtggtttcaaagtgttagattcagtcttcttcatccgagacgcttcttaactgcgcctcctttttttccccctccgtccccctgtagtcctcagttcccaatctttacagatcaggtgccttctgcaaatgagtaaccacgtgttgtacacgtccctctgggtttttcatgtcacctaattacctttccacaccctgtctgcctctccagattcaatgtccttcgacaaataggctgatacacttgttaaaactaccccatttgttaatcctctgtcggggatataacaaaatccttgtgataattaagttataatgaggaaagatcttgactctcccttttgatgtctgcctgtgattggctgactccatgactctgagcctgtgataaggcagcccaagggggtgggaactcgtggcagaacactcacccacctcatggctgtaaagtaaggaagagaaagacatcgtttaagaacaccacagaaaaggccatcccaaatgacctgaagagatacacagggttacttcctaaaggtcctcagccactcccaatagtgccccccggggacaaagcctttgagtgactgatcacaggctgatacctatctagaagacagcagagtaggtcactaaaacgtagaccaattcattagccaactgtgggaaatttaaagctagaaatgacataataaatgatataggcccttagaagttcaaaggcaggaagtgatatgtggtgaacgtggtataggagaagcaatggctggagttactacccttcttgtaaaacatcaaaaataataaactcactgctgttatgtctcctttccaggtacctcagtcataacagaataaccttcctaaagccaggagtttttgaagatctccacagactggaatggctgtatgtttcatttgtgcgtcatttccttatactgttttttaaggttctgaaaatacccacataactctgttgtcttgttgctgacaggataattgaagacaatcacctcagtcgaatttccccactcacattttacggactaaattctcttattctcttgtaagtactcagttaaaactaacagggatgtgagatggctcagtgagagaaggcgattgccaccaagcctgacaacctgagttcaattcccagggacctacatggtagaaagatccactcctgcaggctgtcaactctgcatacaaactgtagcatacggtattacttagggtgtctattgccgtgaagaggcaccgtgaccacagcaactcttagaaaggaaaccactgggactggcgatggcagggaacacgatggaatgcaggcagacaggcgctggagaaggagctgtgagttctacatcgtgatcagcaggcatcagagggagaactggcttgagcttctgagacacccaaccccatagtgacacatgtcctccatcaaggccacacctcctaatagtgccactccctatgggccaaggattcaagcatttgcatccatgggggtcattcatgttcaagacaccacagacacacacacacacacacacacgtacacacacaggcacatgcacacacacacacacacacacacacacgaacacacagacacaacaataaataagtaaatcagtgtaataaaaattttaaagtattccaactgaagagacaaaaataaaacagcaaaagtttaagcatcgtagcattaatttataattactaaagcctgaaagaagctttctccgctaaaccaccttgagcatattctctaaggccatgtaaaggtctgcctggttggtgaccagacctgagcacaggctaccattgcactgtactgatgtgtgcttaagcacctgccctcatgtgcagcagcttcagcaaaggaaaagcctccgacacaggtcacctcatttgcccagcctgctgtggagggtgcaggcttttgttcagagaccaatgttactgttccctgagggaaaaccgatgtatgtaaaaatgttcttactaccaaagcacttcagtactgcagggtgtgcccagaaaaagtggtgggaaagacttgtagtagggggttctcgaagtttctgaacagtaacgataacactgtgtttgcctggagacataaaagaaccagaaaatgtgattttttttcatggtttctttcctttttagagtgctgatgaataatgccctcacccgtttgcctgacaaacccctctgtcagcacatgccccgcctgcactggctgtaagtcaatcttcctcgccctgtctgtctgtttgtctgtctgtctatccacctatccccccatatatccacctatgtgtctatctatctatctatttatctatttatctattcacctatccatctatccacctatccatctatctcctatctaccatctacctatctacctatctatccatctacctacctatccatctacctacctatctatctatctacctatccacctacccatccatctatccacctatccatctacctatccatctatcaatctatttatctatctgctacattttctgaatttgcctaactcatattggataccaagggtcttctgtgccaggtaactagtgtatcaagtttctttacattgttttattattgtatttttatattaacaccctcattggccaatgtctctaaactttcaccaaaatgcaatacctgaaagagaaaagtattttggaatgtggaagaaggaagcaggaggggacgttacgtggtctgtgtcacactggaagaaggaagcaggaggggacgttacgtgctctgtgtcacacttcctcttccccctgtcagtcactcacctattaagttgatgcagaaagctacactgtttagttttatccctaaattctgagtgatgagaatgtattgattagcactaatcatgatacactggggctgtgggatgttttgagaaagttccttacttgttctgtgtaatatgttgacacagtggctttgcatagtagtaactatcattccacgagttagcattcagtcagtcagcaaataagcctgttatgggtttggcctggtgtggtggcgcacacctataacctcagggggctaaagcaagaggatgaagaagaaagatcactagaaattcaaggtaaccaggggtacagagtgaggtccttgttttttgtttgtttgtttgtttgtttgttttcctaaagaaatgaccaaaattactattgaaaagttcaatcaacaaactgcctaccggaatcaagaaaacttcctttacctcctgttttgtaagaaattttcaaaagttgactgttttgtatccaaatttacagcaaagtagacatgctgagcaataaactcaggaagataatgagagacttaataactaaacacaatcgagcagtgctttacagaagcgatcaacagttaacattgtggacactgtgcggctggagaggcagcttgatggttgagtgctaacttagtgcaaaggatcctgggttgaatcctaagcacccaaaaagaaaaatgtgaatcgagactattttttaaacaagatttcactatgtagcccaggctggccttaaactcacttgcatgtatcctcctgtcccagtctccctactgctgagattacaggtgggagctgcggcaggcaactttaagagagcatactttgatttgccatggaacactgccacctggtggtatgttcatgaataaccattagcaataagataaaaggaacaggaccagaccaaaagcctgaaccaagatgactaacgaaacagttctcttagcgtttagcagccactttcatagaatgaagaactcttcctccagaagagcggtctgctgttcattctacagcctgacttcaaatacgctccttttatgttgctctccaagagtaaacataaccttctccaatgtattcagtgttgagatcccttaattcttgatcttcccaatctttcggatatatttaactctgtcaatgtcgactaaagtgtagttcccaaagcaaggccaacagtgtccttggtgctgacaagacactggcttttctctagagctttgcaagttttccatggaggttttagtagctctcccacacttttaccctgcacgagtcactgttgcttctgagtaacttcatgccatctggcaaccagtaaactaagtatgtgatgcccttagacctaaggacagtgttgagggcaggatatccatgtgctctgcaaagttctagcatacccctactgctggggtcaaaggagaggtgcaatgtaagaacaattctagctgagaatatagctcagtagtagggcatccgtctactatgggcaaagtgcacttggtctccagcagtggaagaaataaaaggcaacttctgatgctgtgaagagactccgtgtgtgtgatgtcagctccccacagcacaggcattccaggggaatgtctaggcagctccccagcttgaagtgaagaacaagggatgcttgcctgaaaggacagatacgatggctcacagcaatggcaggctgctaggaatcttttctaggactacttaagttggggaaacaggaactaaatattctctcagaaagactaacacaaaaaaacaactgtaaaaatgcagaaaacaactgatcatggtgtgcccagccccaacacagcttccacacccatgtcactaaaagaacatatcacaaggggaaggtgcagaaagagtgccaaaactaaatgatatcactaataaacacactgaggccaaaggagaaactttcactgggccccacgcctagagaagtacaggcaactagtgacttctaagagagggagaattagtcttccccagtgatgagcaactaattggttatccaatagcaagtaggtagctctgaaattatatatatatatattgctgaatatatatattcagaagattgtatttatttatgcatgtatatgtgtgcatatgtagcagtaaaaatcaaagaaaaagaggccagcagtttgaccagaactaaggaaaaatggaagagattagagggagaaaggaaaggggaatatgataaacctcatatcattttaactattgctacagatgacaggcaataatactacatgtatacagcatagatatatatagtatatatgtatattcagctgctatacaaatcattgtaaacagaatgtaaagaaacgatgttttatttggtagcaaataattcctagccaatttatttttgtctatgaatttaatttgtgttccatttttatgttgtagggactttgaaggcaaccgtatccataatttaagaaatttgacttttatttcctgcaataatttaactgttttgtaagtactatcttttttaaggttatgttgaccttccttacaaaccaaatgaatcctttatgtgaaacttgggtggatagataatagacagatagatgataaataggtagtgaaaatatctatatgtaatgaaactatatatatatgtatatatatgcaatatacatatatacatatatgaaacaatccgtgaaaaaagagaatatggattaggggaaaagcaagaaggggtatgaggaaggaaagggaagggagaagtgatgtaattctaatctcaagaataaaacaaacaaacaaacaaacaaatcagtacctttaatcctagtactccagaggcaaaggcatatctctaagagtttgaggctagcctgatctacatagtgatccccaagccagccagatgtagatagatagatagatagatagatagatagatagatagatagatagatagatagatagatcttgttaaatataaatatataacccactcataaatataacctgctcaatctatgtagtctcacttatatgtatgttctcaggaataaccattggcattgacttttaaacatctatacagaaaaataaaatcatttgggtttctcccggtaggtgtctatggtttaggtccagagttactgggagaaggtggcaatgttttgtagtgatggacagagttaaatatgtagagctagcacaaggctacttgaagacatgtcacatagtgtttaaatatcttcaacgagtacattagacctcaggggaagaagatagatgtccatttctcacttatactgagataaagcaccctgacaacgagcaacttagtggacaaagcatttattctagcttacaattccaggttatagttcatcatgacagagaattcatagtggcaggacttattaaggcagcttgccccatcacctccttgctcaagagcagagaaaaataatgtatgtgtgcttaatcttctgccagacctctctacttctatacagtcctgggctccaaggaaatgatgcggcccactctcaggctaggtcttcttatattaattaaggcaattgtgatggtttgaaaatggcccagagagcagcacgatttggaggtgcagccttgttggagcaggtatggcctcggaataggtgtgtcgctgtggatgtgggctttaagaaccccccatcctagctgcctggaagccagtcgtctcctagctgccttcagaacaagaggcagaactctcggcccctcttgcaccatacctgcctggatgctgccatgttccttcctgctttgctgataatggactgaatctgtgaacctgtaagccagccccaattaaatgtcgtccttataagagttgccttagtcatggtgcctgttcacagcagtaaaaccctaggtgacttcatcctaatgccatgcactagcaaataagaggtctgtggtgcatggagcgttttgttagatagatacacctttcagactgaggaggcaagtcgaaatgcctgtgctcatagctgcaagacactcagtttttgttctgaagcggtctttctccgtttctaatcacagatttgcattatattttcatatcgcccctattaaaagatttgagaaatttaagaatgaactcagactgaagctaggcatgttggcacacatctgtagtggcaacactcaagaggctgacacagaaagattgtgagtttgaggccagacagggctgcatagttgagactgtgtttcctaaataaataaaccagatattaatcaatcatactattcaaaatatcctaatatgagaatgtactctatattcatgatttttatgttatctttcaagagttacatttagtaatcatattataattatgtccacatgttaacatgttttttttttaattttcagggtaatgaggaagaacaaaatcaattacttaaatgaacatgcatttacacacctccagaaactagatgaattgtaagtctaactaaatatgcattaagaatgttcttttccagttttacttcatattagttacacatataatatttattatattaatttaaaatattaatttccttttcccaaacagtatatgtgcccatgggtcacagaacaattcagatagcttacaaacgtaaatacaaaataaaatatgaaacaaatatttgagataagttagataaagaaaacatagctttgaacaaagaataaagccagggtaaggttaataaataaaatgcatcgtacaatgttctgcttaattgctccaaagaggcaggattcctgcctttaactttcccacaggttgttttttcctcctgcctgacccctggaggtgggtgggagaagtcacttttcctgttgtagctcacaatctcctaactcaagctcactgagaccttttcttgtttaaaagaagctagagcttctctcatgtcaacacttcacagaccatgctgctgaaagccctttatagctccaaggtgacatcatgttaggttccccctctgcacacatatgtcccgcccaggagagtatgagcctgtgcatctctctgaaagaaacttgaacctcaaattacatattttgaggtaactgtaagaaacccggacaaaagaaaaatcggggcttcaaattgtatcctttctctaacagaaaaggagaaagggggaagagaaaggatgaaatatggactagaacttacaaaatggagagagaagatttttagacccattctggcttcgagtacattgtagtgttgaggatatccttgaatttctgaccttcctgcttccacttcccaaatgtttgcattagggatatgtgctaccatccctggctcatgatagaacagcttttatttcactccctcttctaaagcctcttgacttcatgcatgtggaggcggagctcagaagtagggcacacattgagcaggatcaaggctgtgagttcaatccccacaccagggagatagttcttctcttggtatttaccaaaggcactgttggaaagttgtaaatggttttcaaatgacttttctaccaatgaatggagtcttcaaaaaccaatatgacatgtttgcaattgtctccctagggatttaggaagtaataagattgaaaatcttccaccgaacatatttaaggatctgaaggagctgtcgcaattgtaagacattaacttacctcttcatttctttatcttatttttcaactgtggtaaactatacatagcattcgggttatccatctgtttctgtatcactggattacatcaagatcttccacattcctgttcaactctcacctgcatccacctccatagattttttttttacttagtacaaatatgaaaccccataaccatcaagcacgaattccacatccatcaagccccagtcctggcaaccaccattcttcttgctctgtgtccatagttgctattttgtgacgggcttgtttctcttaccataccaacaaggtacatcaatattgtagcatgtgtcagaattctctttgctcttaaggctgcagtcatcctccagcccatggacacttggattgcttccaccttttggctagtttgcataatgctgttatgaacacatgtgcccgttcatgtctggaggtccaccttcagttatttgggttctatgttccttcttaactcacagcaacctttaagtttacctaatgaaggcatcataaatcagaactattcactttaaagctcatttaatattaatactctctccaccactgtgaattaggaacccgtgtactgtagagtatctgctttgtactgttgagtttcgatggctgtctgggagctgcagcccgagagaagatcttagaggagctcccctttttactaatccctttgtacctccctttctcaatagtactgtatcaaggcagtaatactgtattcagggatgaataatgcatattaggcaaaggactctaccgctaaaccatacaactacccttaaagcatggcttccagtagcggtacattgcttttacactgttgtaaagcaaaaaaatcctgaaccagagaccacttgtatacccccagaaattaggtgactgggtcacacggtagttctagctccgctctgtttcactgtatttcccatcagagctgtgccagtgtacatctctctcggtgcacagggctccagtttccaccatcttccaacacctgttatttgcacttctctggctcacagtcaccttagctgagaatctttgaggatctgattttcactgctccgcaaacagtggtgttgaggattttttttcccacgtgtttggtcacttacctgtcttccgagggaaaagctactcacgtgcttcattcatttttatgtgatctccttttgcagttgttgagttttaattctttacgtatcctgtgttttctacagacagtcctatgtcctacagagatctcacatgtgttttcccctctattatgagtgacatttccttaattttaacatactgccacttttctatcttttactttcttgtctaaactttgtttcatatctaagacactgtcaaatccactcaatgaaattctcttctatttcgatagctttacctttaggtacatccttttggagtaagcttggggacatggtccagtaagcgtctaattctattcttttgcacaaggttatccaattttcccaacactggttatttaaaaaaaaaaaaaaaaagtcctttccttgttgaatgcctttgacacctatatcaaaagttatctgattatgtctgagtcaggttgtctgtggactctatagttgagctctttggtctacccagctgtacattactgtgggaaccctaatgctgttcttttcttccaatactgcttttgctatttgggcacctttgatgtcttatataaattcgtaaactttaatatggactgagttttccaatgccatgaacaagaatatctttccctttattgctgttgatctagttcatcttctgctactataataaaatacagcagcctgcctaatgtataaccaatagaattttatgttaagttaagaagttcaaaagtcaaggccaaatctagtgacatacaatgtcatcctcagctattctctgtctctaataaataaattagtaattttttctgatgaatactgattctgaggttgctttatctatctgttgaccatttgtgtgtcttcttttaggcaatatctactcatgttttttgtctatttctttatcagattatttgtcttttttcaattgcatttagtcccctatatttttttagatattaatccatcctcaatggatgctctgcaggggtagggatgtggctcaaaggtggagtgcatgtttaccacagtgtgtgcagaacaaaactagagggagagagagaaaaatgagagagtgccttgcaaatcgtttttctatgctgtagtcgcctcctttcatggtgtgaaggagcttttggggttgatgtggtcctctttggctcttgttgcttttactgtttatgttttggaaatcacatccaaaggaaatcactgccaggccagtttcatggaggtcttccactatggtctcagggctgacatttaaattttcaatatactttgagttgtactacatttttttagtaaatatctcaaattcattcaaagtcaacaaatatattctctttctccaaacaatttttaggaatgacttatggctgtcttttttttttaactcaggaatatttcttataacccaatccagaaaattgaagtaaatcaattcgattgtcttgccaaactcaagtctctgtaagtatatgcttgtacagttttacttcaatactaatagcatacatgctcttgtatcttttaattatgttttatttcaagctccacaaaaatatatgagtccttgatggactatagacatatagaattgctcctatatcatgtgtcaataaactaaaaattaaatgaaaatgagcctctacatctctctgtggcaccaagattaagataccgaattgtgcacttgtgttctctgaatgtatggggcatattcattgctccattaattctgggtagttgagatttactgtaagtatctctcctagcttgttataaaagaacattgatgtaatgaaacactgaccaaaataaacttggggagaaaagggtttatttggcctataggttacaatccatcattgagaaaagccaaagcaggaactcgaggcttgaaacagaaaccatggaggaatgctgtttactggcttgcgggcacttcgatgtcaatcattaatcaagaaaatgcaccacagatacgcccactagccaaaacaatggaggctgtttccacaactgggattccctcttcccaagtgtgtcaagatgacaacaaagattaccctcaaatgcaattttctagactatgttaatcatgactcccaacacacacacacacacacacgcacacacacaccaaaagctctgttaatgtctaattgtctttaaaagataagcctcggttcctcttatctaactattctacagtaaaatagctctttattagataaaaagtatgacttaaaaggcattggaaaaattaaagatgtccagaatataatgtatgcacttattctacaaacatttattgactcgttagcatgcattaggtattatatcatgaactgtgaagatatttttttaaggatatacatggctatgagccaaggaagtgtctagagaggctgagactaagtatttcacttagaacaatgttaactaagggcacattgctgcattgtctttcacaaaaataattgccttactatgctgtggctaacatatgtgcttttgactattacttggtatttttagcagccttgaaggaatagaaatttcaaatatccaacaaaggatgtttagaccgctcataaatctctctcacatgtaagtagatgtcttcttgttgttcaccttgattttaatttttatgtccccatataatatatacatactaaatataaataaaatattaacaagttctattactttgtctctgtatggttagtatttgtgtccctcttccagattgtaggttgcaatcctaaccccaaagtgatggtattattaaaaggtgaagcctggaaaagctgattagctcctgagggcagatccttcatgaagcgtcagtatcccttttaaagagaattgaaaaacagggtggtggcacaccaccttcaaacccagcaactgggaaacagagatggtgcatcgctaagttgggagtcagcctggtctatatggagaattcaaagctactcatggcttcatagtgataccctgtctcaaaacaaaaatgaatttaagaaagactagagctagtacatcaaagcactgggtttgatggattcccacaagaggaaggagacagggggagagggaggagtcctgggtggggagatagctcagatggggaaaatgctatgaaaacatgaggacctgagttaaccagcacctgtgtgaaggaatagaaatttcaaatatccaacaaaggatgtttagacctctcataaatcctagaaccgtgtaagcctagaatcatgtgagcctgtgaccatgtgaccctataaccatgagaatctatagccatgtgagcctatagccatgtgagcctagaatcatgtgagcctagaactgtgtgagtctagaaccatgtaagcctataaccaagtgatcctataaccatgtgagcctatagccatgtgagcctataaccatgtgagcttacaaccataataacctatagccatgggaccctataaccatgtaaccctcttaccgtgaattacacacaaaagagggaaaacaaaaaagttgaaagtatcaaactttaggagagaaaagaagaaaagaaggaggaaaagaaagatggagggagaaagggacagagggaggatctctcttgcaccatccactatgtgagttcacatagtaaaaatgtatcaggaagcaggacttcaccagatatctaatatgctggtgccttgaccttggatttcccagcatggggaagtgagaaataaatgttaattgtttaaattcccagtctatgggatttttcagcagcctagatagtctcagacatcagtattcaatagttaaatgcttaaagtttgacattaaccggacagattttagttttccacactctgataaaattttatgggaaaaattaaaaataccaagaaacacgaatgtaagaggggccaactgaatcatacagagcacacacatcatctctggtaccaggcacagatgctgatatttacccagcaagctagtgatgtgtacactttgcgtaagtaccaccagatgaggacataagaatgtatataaaagaattacaaagaggctggagaggtggcccagcaggtcaaagtgcctgagttcagattcccggtacccgagtaaaacacagaagaaggggcgtgtgtgtgatctcagcactcctccagtgagctgggacacagggacaggacagtccaactggaagcttgggagccacataacctggaaagtgaagtgcagacacaaacaagagaaggtctgcctcaaaaccaaggttgaaagtcaggatcaacacctgaagctattctctgacctattcatccatgcatggaacacatgagtcagatatatacacacatctcacacaatataacacaacacacacattaatttgtagcaattatttattgttttaaatatgcatttatatgtcatataaatgtataatatacatatatgatgtacaaatgtacaaacatgtttttaatagatataaataattgttacaaattaatgaagatgggagaacccgtcctcagggaaaattgtccgtaatatcagagtatggttggagaaagtatgtggatgaaatgataacctttgtgaattctatatgttgtgtctggttttgcattggtgatatatataccttatacatattttgagttgagttgctatcatagcaagcgctagactgttcttcacattgtggtaattttcaatactttagaactgtcttatcaaccattctgtattcttccttgtgctgtaagtctagcacagggcattgtttctatttcccaagattcctcagagacaaagctttcataagcttttttgcttgctcacaacaaagcagtctggtcaagaagagtttattgcaagaaactagtgcagctcacagaatctagaaataagtaaaaagaagagccagacatggccaggaatcatgggaacaagagttgaacagtggtcttagccaagccctgctgaaataagccatttgcatgccatcaacaagactcaggggttctcttagggtatttgcctaccctgagctagggaaggcttctactgaacacccaccaagattcctgtggctggaggatggctcccctcagaagagataaagtcattattgctaaaagatgagtctatgctaggcaagacccactgagtttctgttgatgaaagtggttcagcttcagactcttaaacaagaagaaacagcacacccatccttatattctgttccaccccatcatagctcatagagaaatgcagacaaccagatggacatagcagcaactgccctgcccgtgtgcaaggcacaaaatgacttccaccttgtatcatttactactgcagctgttgatgctatagagatcgtttctgttttgccaccactctttgcctgtaaggcagactgacacagtctgaattccaatctctactatcactagaaaatttcctgtccaacaattctcctccactgaaggcttaatctcctattacgatattgctagcactgatctcatggagttcgttagagaacttatttctggtatctaaaacacacccaggaagtggtgttcgtattgctgctgacataagagcaattcttgtttattcaggtgatgtcgttatcctagcaggtatctctctctatagatgaaaaaattcaaccaacatgcaattcttcatcgtgtttcaaaatctagtgtgagtggtggatgtggttagtagttatagataataacttaatgtaatgttgtattataacttttgtaactgaaaagccatgggagcagcaaatagagagaatttaattttccccctaagagctaagcagtaagatcagctatggcaaagctatgagcttcatgaccatgcgtttataccagttctagcctttaacacagttgtcatgttgtggtgacccacagccataaaattatcttcagaactacttcataactgtattactgctactgttatgaactgtcatgtaaatatctgtgttttctgatgtcttaggtgacccctgtgaaagggtcattcaactctcaaaggggtcgtgacccacagtttgagaaccactggtttgtatgggctgaattctggaaacagccattgaaggcttctttggataagtcccttctcttgttcactagctaatcagttatgcatatgttaagacatgtctagcatgcattcgtcatgcctgcttgtagttcttacccacacatgcttttactataaagtcaagtgattgattaagagttaaattttgaacttcagaattatgagagattggtaaggaaatattttctattccactgaatcttatatgaatacattttctaccaagaaatgctgaaaacatatgtcaatgatgacattaagttaaatatgttataattttgtctccgctttgtaaccagctattttaagaaatttcagtactgtggatacgcaccacatgtgcgcagctgtaagcccaacacggatgggatttcatctctagagaacctcttggcaagcatcatccagagagtctttgtctgggttgtatctgccattacctgctttggaaacatttttgttatttgtatgcgaccatacatcagatctgagaacaagctgcatgccatgtcgatcatttctctctgctgtgagtatttcctgaataaaaaagaacaaggcttgaaatcgttgctactagaaaataaattctgtggggctggagcacacacttccagaggacccaagctgggtcttttttaaggtctctgaacaactagaataattttcactcacagcttaaaatatgtaaatatggaaatgtctccaagtgagattgattttatttttaagtttttaaaaagtgattgtaaagtattacattaaatgaggactataaagaaaaacaaacaaaacaaaaaaatcagacttcaggatgttacagcctgggtcccagagctgagggtgtacctgcagcccctcgagtaagtaagccctacaacgcccaccattgtgtgagtggccacgtttactatcacagacactgtgcaaagtctgacttctaatttattttctctgcaagctatgtgagaaacaaaattcacaaaatgtctacaattctgtatggttagctacaaaattctgagtcaagttcaattttcctacacagggctgaaggataactacactgttaaaaaaaatagagagtcaacgctcacattggagaaaaattagttttttccaatggagtcacatttgggtctattaactacacttgaggccaggcccctgagggagtatttggtcaacacaagcaaagtcaatggtctttttgtagactttggtctcatattgctttgtgttggcttttttttctttattgttcttttgcttatatattttgagttgctttttagttctatgtgtatttcttgggttttttgttatttaaaagagaaagaaagggtatggagttgggtggatagcgagttaggatctgggaggagttaggggcagggaaagcataattagaatctatggtatcattttttttttcaattaaaaaatggatttcaggaggctggagagttgactcagaggataagaactctggctgctcttccttattcatgctcagaaagcactctactgccaagctgtctaaccaacttatgaattcttaatagaataaaatggctggtgagatggctcagtggggactcgactgctccagtttgcattggcggaccttggcaatattgagaagaaggtcatttaaaatgttttgtgtaaagatatgcgtactatctgtttctctgaacctataacttttggacccttgtaggtgctgactgcctaatgggggtgtatcctatttgtgattggtgcctttgacctcaagnnnnnnnnnnnnnnnnnnnntgtatttcttgggttttttgttatttaaaagagaaagaaagggtatggagttgggtggatagcgagttaggatctgggaggagttaggggcagggaaagcataattagaatctatggtatcattttttttttcaattaaaaaatggatttcaggaggctggagagttgactcagaggataagaactctggctgctcttccttattcatgctcagaaagcactctactgccaagctgtctaaccaacttatgaattcttaagagaataaaatagggctggtgagatggctcagtgggtaagagcactcgactgctcttccgaaggtccaaagttcaaatcccagcaaccacatggtggctcacaaccatccgcaacaagatctgactccctcttctggagtgtctgaagacagctacagtgtacttacatatattaataaaataaatctaaaaaaaaagagagagaataaaatgtcttggcaatattgagaagagggtcatttaaaatgttttgtgtaaagatatgcatactatctgtttctctgaacctataacttttggacccttgtaggtgctgactgcctaatgggggtgtatctatttgtgattggtgcctttgacctcaagtttcggggagagtacaataagcacgcacagccgtggatggagagtgttcattgtcagttcatggggtcgttggccattctgtccacagaagtatccgttttacttttaacatttctgacattggaaaagtacatctgcattgtgtatccttttcggtgtttaaggcctcgaaaatgcagaacaatcacggttctgattttcatttggattattgggtttatagtggcttttgctccacttggcaataaggaatttttcaaaaactactatggcaccaatggagtatgctttcctcttcattcagaagacacgggaagtactggagcccagatttattcagtggtaatttttcttggtaagaaatcctgcattgcaagccttcctgggtcccagctcttgctagggtatctcgcagtatgaaactcatttatgacttccattgcttacaaacttctgtccttctaacccaatgtttatcaactttctaatgctgtgacccttaatacatttcctcatgtgtggtgaccccaaccatagaattactttcattgctacttcataactataattttgctgctattatagatcataatgtatatatctgtgttttctgacgggccttaggagacccctgtgaaagggagatttaatctcaaaggggtagtgtttagtgacttctccagaggatttcatagataaatgtggttttgttggggatgtttttctttctccatctattctgactggaaagttttgctggctatagtaatctgaaatggcatttgtgtttgtctcttaaagtttgtaaaaacatccatttagcctcttctgactgtcagtctccactgagagaaatcaggggttattccagaaggtttgcttttatatgttaggtggtttcctttaatgttttgattatgtgtcatagggaatttcttttctggctcagtctatttggtattctgtatgcttcttgtaccttgataggcccttccttcttaaggttagggaagtttccttctatggttttgttgagaacattttctctgtctttggcctgggtttcttctccttcctctattcctaccagtcattgatttggtcttttcatgatgtcccagatttcctgttttgtgcttgggttttttagagtttacattttctttgatcagggtacccatttcttctatatcttgtgttgaatgccctaaatttcctcttcatgtcttctattctgttgaacatttacttctgaggtttttgtttgactccctaaaattttcatttccagttttacctgagttttggttttcttcagtgattctattgctacttcatgtcttgaatcatttcattctactgttagttagtgttctcacaaactgattagtagacttattcatatcctctttgaggtccttgaatatattcatagtagctattttgaaataattgtttttgcagcacctatattgccttcttttgttttaagggcatactgcagtggggttactggattctggagaaacattgtcttggctgctaatgactgtggggttgtgtttgcgctggcattcaggcatcagggtttgggatcattgtgattctatgcattgatatcaggtcttgtccttgttggctgagtgttccactcctcagtttctgttgccctctctggatcttagaagagtgtggtggctatgggttgcctggtaaggagtgcttttgattcccctgcatggtgtggccaccgggagtcccaggctgaatgtgtttctaggttttgggagctaacatgaaggaacagggatagactgtaaggaagatggagctgaaaggaactagagggaggaggaaagctgggtctgctgtgagggttgtttgagtttccagagagtggaatcaaagaagaacaggaagggaagaaggcagatggtctgctactaggctagggatgagactagggaactggaatcaaagacaggaaggagagtaaagattgcctatttgattctcactggccagcatgtgcctaggtagagagcgcctctgggtattggtggctgacacaaaagagatggggtgagagaggaagcctgggtccagaggagctgcagaacccccagcaaatggaggcagagaggaaagacagagagaccctttgagacaatattggaggtagtgctagagatgagactgtataattggaaatggaggccaggaaggagatctgatacacatttataatctgaggcaggaggactgtattttggtgtccagcctaggctacctaatcaagttgaaggctcatctgaacaacacagtaaggccttgtcacaaagtaaacaagtggataaataaataccactttattggttctgtggccttaatagtaacatctaaagccatttttttaaatctgtttgtcttaagagaatgctaacatacactactaatgttcttcatggtctaaacaggtattaacctggtggcatttatcatcattgtgttctcctatggaagcatgttttacagtgttcatcaaagctccgtaacagtaaccgaaatacagaagcaagtgaagaaggaggtggttctcgccaaacgctttttctttatcgttttcaccgacgcgctgtgctggattcccatcttcatactgaaatttctttcactgcttcaggtggaaataccaggtacaatctttccctggagagagtaaatctgtgcggagctattctttttaaaaagacaattactactcttaaacatcaactcgtttcaggaattattagtcagagtggtgtggactctggctccattgttggtgaagtgcttacccggaggaactgctcagttctttccataaatgcctaatagcacagttcttaggaacacaaactatatcgtgaaaacaaaatgaccaaaacaaatggtatgcattgcttaaattgactgcctgcttaaaacgacctcaaaacaacaacaacaattacccaatcatgaatttatttactttttagacttggagaaatgtttctccctacaatacatatgctagaggacactgcaccagatggtgacataatagataacaacacggcattgtaaaataatatacatcacatgcatcacaatggctgttactttgagtgacataacgtgaatatgttggtgaggaggaaaaatttgacaccttgtacattgatagtaggatttgagcatggggtggctactgtagaagaatgtgctagagattgcaaaatattagctatagagttgccatacaatccagccattccacttctgggtaaatacagaaggaaattgaaagccaggactaaaatagatatcagcacgcctatgttgacagtggcatatataggcagaagcagtatggtgtctacagatggatgggcaaataaaccaaagcaaacaggtacatggatcatagagtgtctactgacggacaaacaaaatgtagcaagcatatacatagatcattcttcgggtttataaaaaacgaaagcgctttttaaaatttcttacatttatttactttgtgtgtgtgtgtgtgtatacacctgtggaagtcaggggacaatctgctgaaatcaattctcccctttcaccatgtatattctgagcatcaaactcaggttgtcagacttggtagcaagaacctttacccactgagccttctcatcagcccttagaaggaattctggcatgtactgcattatacatgaatcttgaaggtattgtgtggagcaaatagccctgacaggaaagggccacatgttttatgattggtcttacatgagactcctggaacagccaaattcatagactgaacatagaccagtggttgctagaggatggaaaggggagagtgggaaacatcgtttaacaagcacagtttcctttgggaagatgagaacattctgagaccagggtggtgagggatgctaacaatgtagatgtactcagcaccacagaactgcacattttgaaaggttaatgagcaaagtttatgtcatgcatattgtatcaaaaaatatacaagtatccctaatgactgcatatgcaatccagtatatattcacatttttgcatctacatatgcataatttagttttgtttgatcacatgggtgatgataatagaatctgacaatttatgaagaataagagggacaatagtattatgacaagaacctgagcatttggtagttatatatatatatatatgcaaaggtgatttttaagataggtttaggaagttgcagagatggctcagtagttgaaagtattagctctccttccagggaacaaaagttcagttcccagtgcccacatgaggacccttacatccaactgcaaccccagctcctgggtatctgactcccttctctgacctccttggatacccacacatatgtggcgcatacacagacaggcagacagacaaaaaaaaaatcaaaattattctcccaaaaatgatggatttaaatatgtttggggattctgtttttgtaatgctttgctttgtactttgggttgttcatttgtggtactaggggttggacctagagccttataacactaggcaagtattctaccgcccaactatatctctacatctttctccccactatgttgaggcatagtcgtgttaagttgcttcattcattctatagctcagaatggccatgtacttttctcagcctctttttttttggggggggggcaagggcagtatttaagacaggagtttctccatgtaactttggcagtcctggaactgattatgtagatcaggaagaccttgtactcacagagatctgcatgcctctgcctcaagtgctgagattaaagatgtgcaccatcacacctgacttgtctcaggctcttattggttgggtctttaggcctgtattgctaatctactcaacaatatttcactgaaataaatatttggtcaaaagcctcaatatattgcaaagctggctcagtctacaagatgtttgccacacaagcaggagtcaggttccctagcaaccacaagcaaagcaaagcgtgcagtagcacatcaataaccccagccctgggagggcacagagatgaggggatcccaggaatcactggccagccagcctagctagcattgacctctggccacatgcatgaacacacatgaacacacatgtgcatgcacacatacacacacacacttatgcaagactttaaaaatgtgcctacttttaaaataaacaggtctgggagccagttgggtgttcatctagcacatacaatgcactcggttcaatccctagctgtgccataaaggaaaacagaaggaagtcaaatacattaacaaacaagaaattcattcaagataaatctacatattctgagaaatacnnnnnnnnnnnnnnnnnnnncccaagcaaagcaaagcgtgcagtagcacatccaatacccccagccctgggaaggcacagagatgaggggatcccaggaatcactggccagccagcctagctagcattgacctctggccacatgcatgaacacacatgaacacacatatgcatgcacacatacacacacacacacacacacacacacacatgtacatgcacacacacacttgtgcaagactttaaaaatgtgcctacttttaaaataaacaggtctgggagccagttgggtgttcatctagcacatacaatgcactcggttcaatccctagctgtgccataaaggaaaacagaaggaagtcaaatacattaacaaacaagaaattcattcaagataaatctacatattctgagaaatactgcatgtatcttctgttggttaaaacatttgcaaatgatgataaatgctaaatagcgtggttggtctttaaatagactcataatgctatgtcataactgcataaatgccccccagtagtgttcttttgttggcactctgatgtattcagagaaagcctccagagcactggcattcctttaaacactgacactacagaaagacatcctgtaaataacttggtgtttaattatgtcaaatgaaagaaaagggaggctgaagacgaaggatgcaagatatgccttacaacccccaatcatcactcagctgtttcatctttctcttccagattctattacctcttgggtggtgatttttattctgcctatcaacagtgctttgaacccaattatctacacgttgaccactagacctttcaaggaaatgatccatcaactctggcacaactacagacaaagaaggtctgttgacaggaaagagactcagaaggcatatgctccatcattcatctgggtggaaatgtggcccttgcaggagatgtcctctgggttcatgaagccaggcgctttcacagacccctgtgatctgtcgctagtttctcagtcatctagactcaattcttattcgtaactggatcttagtctcaagaatgctgtgaagtgcttctagagggatttgccgatatgaagggatatgccgacatctaagacaagttagcttagagtggcccaaggtagggacaggtagctggtgttcatacagagagaagtaattatgctgacaatgtgtgtgtgtgtgtgtgtgtgtgtgtattattacatatttgcatagctgatgaagggaaatctatttctagcatgcatttatgcacactgcatggaagtaaagtgctgagcacacaacatagagcctttttaatctatatattatgttgaactattaacagcacaaactaagctctaaagtgttatgatactcaaagataacggcatcagataaaatgtttggggtcagcgagatgctcggtggagaaaggtgattactacacaagcatggtgacctgagctcagtatctggaacccacggaagggtagagggagaagagactctggaaaactgtcctctgacctccacttgcgcaccatggcatgtgtgtgcacacatgcacatcacacacacacacacgcaattttaaatgtggttgtttgcaaaatagaaacattgctgcttaatgaatcctttgcattcttcattgagtcaccacacttgagagtcaacacagcatatttattaaaggaggctttgttgccagatgtcatggacagacctgtagtcctaacatgggagaggaaaaagcagaagggtcacaagtttgaggccagcctcagccacatcgaaaaatcctggctctcacttggaaaagcagatcttacgatagggttcaattgctaaagtacttgttgctcgcacacaaccaactgagtctgaattcctagtacgaccattaaaaagccagctatggtagaacatacttttaatcccagtgctgaggaggtagagactggaggaccctgaaggcttgttgcccagctactgaggaagacacctactgccagcctctgactgccacacacatgtattactcatgcccatacacacacacacacacacacacacacacacacacacaggagggaggcaagctttgttataaacccagaaccagcatttgttctgtcactccatactgagttctccagtggcttcgctctaagttagtgttatcatgaggaaacagaacaggacggtaggtagaatattgcaaaggggtaagccagagaagcaggactgatggcatttagatcaatgaaatccaattcagaaataagccttcatgtttcaattgattgtttaaaagggttacaagacacatgtaacctaacaaaattaaatcaagaagatataaacaacttatatccacaacctgcaaacaaaactttaagaaaagctaacactagtgctactcacactgttcctcagatgaaaatccaaggaacacgagcaaacacactctacaaacccaacacagccctgatcaaaaccttagggaaaaaaaaaaacaataaaagaacaaaactatagatcaattctttgatcatagatgtaatggttctcaataaacatcaatgaatcaaagtcagggacagattacagattgggaagattgcacaccatgactaagtttgttttatccaggtaggtaactttgttaatccattacacaaataaataaatctaatataatacataggatagatatcatgtgattatttcaacacacacacacacacacacaaaacacctttgaaaaaatttgacaaccttcataataaaagccccgtggaaactaagaattgaaggagccaaaactagcctaataaaggtcatataaaacaaagctgtaagtaactgaactaaatgggaaatggcatcacctctaacacagggaatgagataagagagcctgatggagacctgggcagcatcatggccagcaggtaaaccatccacatgaggtgaagaatgaaactcaaatcagcaccaattttgcaggtgctggccctaaatttccagaacctgaccttggagtttatttttcttacacatttaagcaccgtaaaactttaggggaaggtttccatgtgacagttatcacgatgaaagtccctatagaagtagcaaagcatgtatgatctttacaataagaatggattggattggctgataaacagtgctcaggcctaaggaggaaggatttgtaataatgatcgattactgatggaggatacaaaggactttgagcctcctttgtaagttgggttctactcactgagagacagactcaggattagggcctccgcaatgctcaaggtttggcaggggtgggaggattcaggaaggcctgctccacagcccagcaaaaggatcactaggttgtcagacaacacccatcccagcttcctaggcaaccggtgtcagttattttcttcctttgaagaaataggctcgcatgtttaatacgtctggttcctcaaacactttgtcctgtgcctatgttcctgtttctatgcagtgcctcctacaagtgcccacttacataattcttattcagtatatctttcaaagtggtagcttgaaataaaaaacaaaaagaaataaaaaatggccataaatatgatggagaagttaatatatccctattgtagacaactcagagctacatttaaaagaccctaaagattccattagaaagttcacggacctcaacattttccctataatgttactcaaaatataatctatacaccatgtgacctagccagtcaactcatgggcatacacccaaagtactcagtgttaacataacccagagatacttgtatatccatacttattgtaatgttcaccaaaaatcaggaaaaagggaacagcctagacattcattgaaagaaaagactttacatattgacaaaatattcagtagccttcctatatatctgtaagaaacctcatttgaagtaagttcatcatgtgtacatagaaacactactgatttttgtgtttattttgcatcctattttttaacattgaaatctccagttacatgaatcttcctgaaaatgtcttttttttccccctgctcggtggctgaataaagtttcattatgtatatgttaaatgaaataatccagactcaaaagataaattctataagttcgttttctcactctctttctcatatgtgtgtgtgtgtgtgtgtgtgtgtgtgagagagagagagagagagagagagagagagagagagagcatgcaaatgtatgtgaaatgaaactacaaaggggaccatgaagggaagaagtactgagaggtactgagaaagatggggaggggagtcggggaagagggtagtattcatgtggaggagtcaaagtcgcagaggctggcagggtgggaggtgagaacacagtgcacacatgcacgaaaatgccatctaaagtcattactttgtatgtttacctaaaagtaacttccaaagttcttagaaggaaacacagggataattccttgagatatgggatttggtgatggattcctcacgctgaaaaactgagaacaacaaaagggggaaaactgcttcgtctaagttcaaaccttaggcatcaaaaaggttgggagagctcttgctacttttcgtggaaatccagattctgtttccagtactctcattggtcagcttacaacaacctgtaaccctagctccagaggacctgacaccctcttgtggtttcttgggaccccacactcatatgcataaacccatactcagatgtgtacctatgcaaaatgacaatcactgtaggaaaatttggcctttccacaaaaagaaaatttagaataaaattattatatgacctatctcactgcaagacacaaacccaaaggaattaaaaataggactcagacaagtactttcatgtattatttcttacagtattttttataagagccagaatatggaaagccaatatcaacaactgaagaatgggaaaacaaactgtggaacatatccatttcctgccattaaaagaaatgagggcgtgatcaatgctatagcatgaagacataatggaagccagggatcaagggacaaacgctaagtggcctcacttacatagcgtggcaagaattaagtagattcttagagatggacagtaacgtagagataactccttgtaggggtagcagtgaaacggaacgcgtcttcctgggtttgcataatttaaattgcacgtgagaatgggacttaagacattacagtaaaagccagtggattgtacactttagatgggtggattttacagtatatagttataatctcaacagttttaatttcaataaaaagaagaaacttgttggtttaggcactcagctttataaagagtttcatattctttctgcatattttttactccaaagagatatggctgtcatagtaaggtggctttgccttgtttaaacagccggtacatcagacataacttgttaactagtttttttccagtcaattagatttgggaaagggagagagaaagggttcaagacagacagacaccatgttggattttcctttaggcagacgcaatgccacagcggatggtacagcctgagtctgaagcgggaagcttcattctcgtcagccaaagcaaagcatctgctcttaaaggtttcggagggaagggagtccttgcaccactacacagcacgcttatcagatacacgacagaggcagaaagcgggtatatgacagtgatcattcagtctctgtgtagggaagtcacatgtcacacgtcagccatttctggctatgtgacaacttccaggtcagtctagcctacattaaaagacagtgtctcaaaaacaaaatatctgtaagtataggaaatttcaaaacacaaattaagggcccagggagtgcctgcttagcacacacaaggccctgggctcagtcttcagcagggtttgaagtagcaggggatacaaatcaacaactatttaataccatttaatcaaaaattaacaaaaaaattaatacttctgagtggctatggtgagaaaacaagggatgggtgtaagaggtagcaatggaaagttccagtgagtctaacacttagggtgaggggacagctgaaaaataaaactataaacttaattaaccctgcatggaaatacacaagaattctttaaatcattggccttttctctatggttgaactatctcataaagttttaaataatgagtctaaagaaacggaaatttacttgtaatatttatttttataaatttttaaattgcattttcagaatatataagtatttctcttatacagaaataagcatcctttggtatagaaatcacactatatgtgttgtgtgagcttaatttaaagaaaaaaaaaatcactaactatgactatgtcgaaactagtctttgtccatccatttgtccccatcatagctccccagtgagacttcagaatagagttctattcacatcaacatatctacacagacatcacatcaatacttcaaggtcttgtgcatcaaggtagtccatggcttgaagacagatggacagatggacagaaaacacagtacagataaggtggggccttaaactatcctcgtctgacaggaaaccaacattagaattctgtaaataacttgcaaaactccactaagtagtagctagcatacagccataaattagataaggtatttcaaacacagcaactgaacatatatagaacaccaacaacaagagaaatattaactatgggagtagttaactataaaaatagaaaaacatgtattattctataaaagttttcattttatgaagtaaaagctttttaaaaatggactcgtagaatgagaaaatatatattttttggggggggggggttcaagacagggtttctctgtgtagccctggctgtcctggaactcactctgtagaccaggctggccttgcactcagaaatctgcctgcctctgcctcccgagtgctgggattaaaggtgtgagccaccaacacccggcaaaaaaatgtatttgaagatcatcatcaaaattcaaaaccgtcttgcgtaccagtagtcctggcccctaagacaggagcctgggcttcccaggaagactgcttcaagacagaaaaaaatgtcagcttcccattaaaatagagagaatgaaagagagaatttttccttcaagtcaatgaagcttagattcatacagttttcttagagaaacagtcttcatcctaaaagacaggagtcaaaagtagctttaattaactcatcgagtctcattcacagacagtgagtgttgtgacctggctgtgggcactgggataaggaagtaagtaagggccaccgccagttttccaataggtgtcctgtggagctggaccacgcacccgaaatcctcatcgcccgccttaggagacacaccgcgctcaactcccaactcaagcattcttgtcatcttctcacaaaacaaatgatgacctgggtgcagggaggcactattgcgacattacttacggatggaatgagctctcataaaggagtcgacaaaagcttagagggcagaaagcatctaaggtaaaatactgccatatcagagaaaacacacaagcaaataaaagagcccagtattctgctttcaccaagtcgagaataccaagaaaagtcccattctcagtctaaatgcctggagacaggcagccgcgtccatgtgctctacgtgcaaataggtcctgtgcaaggctttacgcgactacatcggcaagtcagttgtcgggtttcagggaatcatagccttctttcaggaggtcgcgccacgtcttaaggaagcgtgcattttctgtacatttcagggcaagttcttccacttgagctgataccgcagacgtggcttccagaagtttagttaatgaaaacgccgcctacaatttaatgaaagaaagaaaagtcaagcgggtttgtttgtggtactggtacccaggacctccagcactgagctacaccctgaaccccacacacgctttttaaaaaaaaaaatcctcatctaacttcatagtctaaatatagcttaaaaccttcaatcaaatgcccacatgtttttctttaaaagaaatgaattttcaaaaaaaaaaaaaaaaaaaaaacactggttctttcttgaagccgaagtctcagaacaggggaggcacacagctctacccaagctgcactcagagcctctaaattttttcataacgtaactttaaggaagaatacctgccataaaaatactcactgaatatgacaagtcagtatttttaacagaaaacacatccaactctcatatatttccccaaggcaacctggaaacctcttgactaaaagtggcagagccatccaaaggacttcctcactttgcctggtaacgaagtaagaaaagccctgttccactattttcacccatgaacacttatttttgagctataaataagtaaataaataataaaatcaaagaacttatactctaagctgagctgacagaacatctaaaatcacacacagctatgaaaaactcacttttaaatcaaatgctttcttcaccaaaaaatataaaataacactttttttatatcatgtcagcatttattgttcacatttatttgtaacctgtattgtttggggggagggacctggactaatacttcagccatctcttttgacaaaagaataaaaacctgtcagccagttctagtttccaaatcttttgtgtggttattccacaaccctctccaggaagattgtctgctacatacttcagtcctttctccctctcaaagagtccttataaagtgccactgtaaacacataagtggatgctcacagtcagctattggatggatcacagggcccccaatggaggagcttgagaaagtacccaaggagctaaagagatctgcaaccctataggtggaacaacattatgaactaaccagtaccccggagctcttgactctagctgcatatgtatcaaaagatggcctagtcggccttcaatggaaagaacggcccattggactggcaaactctatatgcctcagtacaggggaacgccagggccaaaaagtgggagtgggtgggtaggggagtgggagagggtatgggggactttttgggatagcattggaaatgtaaatgaggaaaatacctaataataaataaataaagtgccgctgtgaccctccaacccctcagcgttatacgtgttggggtcaggaagttatttctgggaattcgagattgaacaaaaactttacagaatttttgcattgcaagattctgttctaaactgtcctatcaaatccatctgccggctgtgattagccctggtccactcaagtccaacacagagccaagtaagcgacacacaacagcatcaccagctggccctgggctggtggccaactagaagcacaagctcgagtcccttagaaagcaccaatgggcaaggaggcaagctatgaccgcccaaagtgctccgagggatgggaggaggcggagagaggatcctggcagcggggctgcggatgaccgctagcagaaggagaaggaaagaaagatgcgggaagagagagccgaggctagccctcaactccaagaaccgcaggcaggagcaccctagctgcaatcagctctcagccgcaacggcgacactcacgtctccgatctgcagctccacttgctccagcgggtccacggttggaccgggactcctgctcggatcccgccagcccaaactcactggcatgctgagggacgacgaagaggcgcctgacgacggagatgagggaggcggcggcggcggcgaagaagcccgaaactcctcagagtcagccatgggagtgagctggggctactggaccggatcaagcaaccgaaccctcaccaactgcctttcgaccgctcgcgcccaaagcccataggctccgcctcctcccacacggagtcccgccccatcttctcgtttgtctctgccctggaccccaagtacgtctcattttttccagacagccaatcagatatcaagccaggcgtcaccaggctcctgcgcacagctccaggagctaaacactacaactcccagaatgcctagcaaatcagcctcgctatgcttctagggcgcatgcgcacacgcgagagcttgtcggcctcttctgcacactaggttcctggctgaggatgactgggagatggagtcttctgccttttcctggcttgtatgtgacccggaaaccttactggccttcgtgtcctctgtggcgccggcgcaaagcagaagaggggcgggtacgccgcgaagcaagggcggtcggcagagcccagacgctgacagaagctgagcagtcggggcttcttggcaggtgatggcgcccctcgtagcctagaagtccagcaccctcggcaagccgcagacccacgcctctctcctttgtatctggtcaagtctccgggtcactttgaacatgttggtgcgactaaccaagctgtcctgccctggtgagacgaaactcctggtggggacagaaggagcaaggtggataagttgggacaaaacaagactggggccacacccggggtactgccagcatctctttccttgtctattgtcttaggctaaactagggcaaaggtcaatgctgtcagcgcctggtggccgaccctaccttaccgaccttggagttgccccagttggcagaattatcatctaggttaaaggtcatgagaagagaaaattgtcaacactgccccctcggtggagttcccccaaatgccgctccta

SEQ ID NO: 15 - DNA, 1493 bp, Mus Musculus
atgagcaggtgcctgcctcagctgcttcactgcaatggtgtggacgactgcgggaaccgagctgatgaggaccactgcggagacaacaatgggtggtctctgcaactggacaaatattttgctaattactataaactggcttccactaactcctttgaggcagaaacttccgaatgcttggttggctctgtgcccatgcattgtttgtgccgagatctagaacttgactgtgatgaagccaatttacgagctgtcccatcagtttcttccaatgtgactgtaatgataattgaagacaatcacctcagtcgaatttccccactcacattttacggactaaattctcttattctcttggatttaggaagtaataagattgaaaatcttccaccgaacatatttaaggatctgaaggagctgtcgcaattgaatatttcttataacccaatccagaaaattgaagtaaatcaattcgattgtcttgccaaactcaagtctctctattttaagaaatttcagtactgtggatacgcaccacatgtgcgcagctgtaagcccaacacggatgggatttcatctctagagaacctcttggcaagcatcatccagagagtctttgtctgggttgtatctgccattacctgctttggaaacatttttgttatttgtatgcgaccatacatcagatctgagaacaagctgcatgccatgtcgatcatttctctctgctgtgctgactgcctaatgggggtgtatctatttgtgattggtgcctttgacctcaagtttcggggagagtacaataagcacgcacagccgtggatggagagtgttcattgtcagttcatggggtcgttggccattctgtccacagaagtatccgttttacttttaacatttctgacattggaaaagtacatctgcattgtgtatccttttcggtgtttaaggcctcgaaaatgcagaacaatcacggttctgattttcatttggattattgggtttatagtggcttttgctccacttggcaataaggaatttttcaaaaactactatggcaccaatggagtatgctttcctcttcattcagaagacacgggaagtactggagcccagatttattcagtggtaatttttcttggtattaacctggtggcatttatcatcattgtgttctcctatggaagcatgttttacagtgttcatcaaagctccgtaacagtaaccgaaatacagaagcaagtgaagaaggaggtggttctcgccaaacgctttttctttatcgttttcaccgacgcgctgtgctggattcccatcttcatactgaaatttctttcactgcttcaggtggaaataccagattctattacctcttgggtggtgatttttattctgcctatcaacagtgctttgaacccaattatctacacgttgaccactagacctttcaaggaaatgatccatcaactctggcacaactacagacaaagaag

SEQ ID NO: 16 - protein, 498 aa, Mus Musculus
  VARIANT (1)...(498): Xaa = Any Amino Acid
MSRCLPQLLHCNGVDDCGNRADEDHCGDNNGWSLQLDKYFANYYKLASTNSFEAETSECLVGSVPMHCLCRDLELDCDEANLRAVPSVSSNVTVMIIEDNHLSRISPLTFYGLNSLILLDLGSNKIENLPPNIFKDLKELSQLNISYNPIQKIEVNQFDCLAKLKSLYFKKFQYCGYAPHVRSCKPNTDGISSLENLLASIIQRVFVWVVSAITCFGNIFVICMRPYIRSENKLHAMSIISLCCADCLMGVYLFVIGAFDLKFRGEYNKHAQPWMESVHCQFMGSLAILSTEVSVLLLTFLTLEKYICIVYPFRCLRPRKCRTITVLIFIWIIGFIVAFAPLGNKEFFKNYYGTNGVCFPLHSEDTGSTGAQIYSVVIFLGINLVAFIIIVFSYGSMFYSVHQSSVTVTEIQKQVKKEVVLAKRFFFIVFTDALCWIPIFILKFLSLLQVEIPDSITSWVVIFILPINSALNPIIYTLTTRPFKEMIHQLWHNYRQRX

SEQ ID NO: 17 - DNA, 151790 bp, Homo Sapiens
  misc_feature (1)...(151790): n = A,T,C or G
gaataacatatgattaaagacactgttttacctttaaaaagcaactgaattaaaatttacttcacatatgtttatagattttccaaaaattccaaggcaaactcaaactgcatagaaagttaattttttctaaattcatccatgagtatatgggtatggtttactatcacttatgcatacctcttattagaataagagcacattctaaaaaatttccaattggcaccatttattatatcaccatttatgtgataatctaataaatagcatctaatgaaaaatacatttaccttggaaaactatacacatactatatgagagaataattaagatgatgattgcaataaaaacagtactgtacattagtttcctaaatgttatggtataaattaatgtccaaaggaaatacttttcattcatcaaagatttgaaactacaaattattaaacatgtgtgctaagaagctatttgtaactgattttaggctctgtgtatttttatgttcattgaagcacttttttaaaagaacaacacgtgcttgtttaccaccactcgctgttcaactctctgaaaactagctcctctgctgcatactgactagtacagataaagacaattctgttgtaacaagattactttttaggactttagggttttttttcttattgtttatttaatgttgaagcatagttttaataacaaccctgatcagaaactcattttaatgatgctaggagtactaattctcccagcctttcagaaggatgtaaattactactgtggtgtggagacttgggaagcatttgggcacaatgaacaaacatgagaaaattgctggaggtaaagaatagctactgtttactggacagaagggaaaaaatggcgaatccaataatggtcatgatggagatgcaagtaaatagagtttgccatcaattgactaatttgacaaagtgcacctagattcatcatctttccaactctgctctttctaatcttttaatgcatcaccatcatccaaggctcctttcttctaggacaataactgggcatccagaacagtaccagcataatacccagtacaataccagacaatgtctaaagtatcccatcagctggttaaaatagtctcaaacacagtggtctggcacatgaaatcagcccatttagcagccacttctagagacccatcctcctcccacctgcccttcttttccctttattgctcaataatgtccaatagtcttctaagcttttgttaagtccctgttgattcttggtgtttctgatttttactgccctgattctgcttgtctttattctatggttcagccctttgtaccatgactgaagctgctatgtcctcctcaccaactccctttggttccaacacttacacacatcttacaatatttcacccagaaaatgttttcttatgtacccttaaagcagatctggtaagatatttgaccctaacaaatatgtgactattgaatatatttatagatgggcaagttgtggagaaaacccagcttcctatttcacaaggtgaacaggaagcagtaaacatgataggaatgaggaactaccaaaacctatctccacttggttcttacaactagacccaattatgtattgtgtttagttagtctctggaaaatacaatcaccgagaaattccctgtaactattgcatgacatgtaaacatgaccaatagtcagttaaccggggaaatcatttagaaattccaggaactccaatttgaactccagtaattctaaaggaagattaaatgagaaaaaggagacacatttttgttttcacaactaggatttcttattctgacacctttttatttcagtagcacagcctgaagagtgttatctcaccaggaggaaagtaagatgacaaaattgatctgtcttcacaaagcaaaattataaacttaattacataattattttttaatatgtgcatttatgactattgtgataatagcagttacatttcatgttcttcacaagcttcacatataccagttcataaagcctaacaatattctcattcaacatacaatagttaatgacccattcgcttgccatttgtcttttcctctgccaatctttatttttctcagtacttacccatcctgttacccaaaagaggcatattctgcaatattcactttagatgtagccagttcaaatcaatgcaaaggaaggatcttccagagtgtagacaaagggccataataaaagatgaattgggcagcccctgctagggaacagtctctgggcctaattaaggaatatttcctatcctcaggttaaggagccttaccttgttctacccagcaggatttgctagccttctcctttctaatcagaatgttattacagttatttgtaactcttatagctgctccaaattgtgctgtgaaacatagatcagggcagatagcttatctttttagttcacagatattaaatcaagagaatccacatctagatgtcatgtaggagccacctactatgcatcacccagaaatcccgaagtgtgagcttgacaccgtgactaggtgtaacttctagaatgtctctcttgaaaaagaggttagtgtattatgcctagagatcagaaaggcagactgaagttatccttagtaatgttcatcaaaatacttctagctctcctccttccaggctcagggatggattgtcctttccctatcactttgaagttaggccaatgaaatgtaaacagacatgctgtgggtcccttccagatagaattcaccgtgtttcctgtgtcctgccttgatagtcatggatgtgtgtgtcaatatagaatttccatcagcctggtgcctgagagactatggtgatcagagccctccactgacttgtgataaccatgatggtcatgtaaaatgagaaataaatttctgttgacttaagcaactaaggttctgtggttgttgtattttttccacagatcatctaacctatgctgactgataagccttctaaaagcaaaaggaagaaaacagctttgttaatcgaggcctcttctgcaaagttcaccataggtaagaaaatatttctcatagcattgcaaatctgcacccaaatctatacccaaatcaaaagttagtgctacctggaaggagccaaagaaatgaggaaaccctgacttcccagtctttatccaatatgccccacagggcaaccttggaattatagaggtaacaagcccctgttcctcaagtgtcaatccctggaatgtggcagattagctctgcacatgaaaccatctattattccccttgtcttgaagcagaagccaagatagcagcctttaaactaaggcttagggcctccaacagatgctaacagggagacatacaaaggcagtacctagattcgttgaccatgacccaaaacattggttaacagctaacagaatgcattctgtttgaagctactgtgtcctaccacgattttaaaggacttgtgctatcagagagaccctgagcctggactagatcagtggttcccaaatcatggtccacagacagcgtctatgggactttttactcatctgcaatgaaatgagaaaaataaggacaatttagtcatttttagtgaaactaaatatattctatgtagaggactgtgtttgaacattatagctttcctaattttgtgatattaaaatgtctttacatttatcaaatgatggtaaaagataaatggtagggcctttgttgttgctattactgtttttatttgacaaaattaagtttggtaaccttatgttgtccccattgtttttattaaaatttgacttaattatggaaactattatttttacacgaccatcaggtttaaaaactactgaagctctataaatctttatatgtaggacacactatggttatgtttaatatgataaagtgtaacatgatggaatcttgaaacctcttgccccatcctctagagctgcaccatccatcggggtaacaaccagccacatgtagctactgagctcttgaaatatagctgctccaaattgtgctgcatagtaaaatacatactgaattttaaagataaataataaactgttagttatttgagaaatctccaaattgctctccagtggctgaactaatttacattcccaatggattcattcacacgctaaacatcagcatcacacaatatacctttgtaacaagcctgcacatatacctcttcattctaaaataaaggtttaaaaaaagaaataaaatatctcattaataatttttatattgatcacatgttgaagtggtaatatttttaatatcctgagttaaataaaatttattattaaaactgattcatctgtttctttttactttttaagtatggcttctagaaaactttaaattgcatctgtagctcacattgtatttctattggacctccctgttctaatgtcagtgtgttcatgattaaccactattaagattatgttctttctggtaatgtattgtgtttgcatgccttctcagtcacacaaatcgtaatagctgacttacttctgttactcacagcctcatttacctagagtctctgctctttctcatcttttgtatcatatggtcatgaaactagttttcttagttagtctccttttgatcatatcactcctttgcccagaaattgaagaacagggaagtcttaggcaccggtggtgagaatgtacattagtacagcaagtcctcacttaatagcatcaataagttattggaaactgtgactttacgttaaaggacatactgtataacagaaccaattttatcataggctaattgatatataaacaggagttaacttcctatggcttacagtttgcaatttcacttaaagtcacagtttccaagaacctgtcaatggcattaaatgaggaattgttatatagtcactgtggaaaagagaatgaaggttcctcaagaaattaaaaatgcaactaacataggatccagcaatcccattactggagatatacacaaaggaaaagaaatcagtatgtcaaagagatatctgctcttccatgtttattgcagcaccatccacaatagccaaggtatagactcaatctaaaagcccatctacagatgattgaagaaaactagatagatagatgatagatagatagatagatagatagatagatagatagatagacagacagatagatacaatggaatactattcaaccataaaacgaatgaaatcctgtcgtttacagcaaaatggataaagctggagaacatgtcatgtgaactcaggcagatacagaaagacaaacactgcataatattatatgtggaatctaaagaagcttgtttcacagaagtagagagtagaatagtggttaccagaggctgggaagaggttggttgacaagtacaaagttacatttagacagggagaataacttctggtgtttctgttacacagtagggtgactatagcaaataacaatgcagtgtacagtcgaagatatagttgaagagactagaagattttgaatgttatcacgacaaagcaatgataaatgtttaaagtgatagaaggtaattaccctgatttgaacattataaaatgtatacaagcattgagacataacataagtatgtacaattaccatatgttgattatgaatttaaatttaaattttaaaataaaaaataacctaatgtttgacactttccaacaagtaattattccatagctctccaataccaattatgttattttctggccataaacccatccagacctgctatgtgcacatgctgagcatttgcactcacttgtctttgatatgaaatgttgtttccattattctctctcagtctatgtctttctttgtcttccacactcagtacacagctctccttctctaaaaaaccttccatacttgaccctacccggccctccaaaccaggctccttgatgatctctcatatctcctttaatacattatgttcatggcatcaatttatatttattgatagatgtagaaaaaatatatatttcagacaatcagctatgtgcattccgtttccataattcataaattatcttaaagcagagtatcatatttcataaaatgacagggctataatgcagctaaaagattgactgtttgttttactagtgaggtaacaagactaaagcttttaagtgacttatcagagtttacatgtctaattaggagcaaaagtgggaccagaactcccaatgttctactggtattcctggaacaagccacttttacttttctaatttattctgtcttccagcatgtaggaaatgcccccgtataaatcaggtagtctcaaatgaagcacgaagaagcatcagcaggagatagtgcccaaaggagagaacattgagattatcaggatagggcaaagagcaccagatctccaatggggtgatcccatggggtgaaaagcaggctagatgataggcaagtgagtgggcttagagacaaggctccaatcatagcagagtggctgaagtgcagtcaagaaatctgaagcagctgaggcttaaccacagtgactgagcatgcgccttaaggttgtgagggaagaggaagaaagatggctgcttagggagcagacaggttaccagacatgaaacagcaaggttaatttccagatcccacccactaacccagtcaacagactatatcacttattttatcccatcagtcttgatagatagtctagatagaatgaacctaaagcttgaatatgttcaattaagggaactaagtaagataaagttaatattaagctctgcccagagtttgcacttaccgtgtaagatgatagagagatggatagataaggggcaacaaaaaaatccacatggcacttggcttacaatgtaatggttgattttctgctaaaatgacaatagcttctggtcagttttcatctagggtgaaattgtttagattttatataaaatattttctgaaatacctgtgcctactaactgtctgctccagttgcacattttgctagctatcactccctaaaagtcatttcatttcagaattgtttaattaatgctaaatcaagcagctagtatttttggtgtgacacagaggtgatgaattcctcaagggtcttgcctgactgacagctgtcaactagaaatggatgcatagaatgaacaatttggcagcatgcattttagcccttagattgcacttaatatttttaacgtatggttgttttactattatctgaatatctctacatgatgaagctcttattgaggttttaccagcctctcgcactgggactttctcaggtctacaatcaaaaaaaacacataataaaatggctttttctactgttgaaaatggtgattgtgaatagattcagaaacgtggacagaagccctcaagtgtcattacccagttttaaaacatgatgctgaaaaaaagaaagtcgtggtttatttccgtcatggtaggatgaaaaagctgcaagattactgtggatgtgtatagtgcaaacaggttaacaatgcttgtttggtttgactcactaggttggttcgagaagtaattttcaaatagaaggttttgttattcaaagagcctcaacgaggttttaagaagagattcaaagataagaaagggtatcagcctctattagcctatgtcgagggcagaaacccctgacatgctcagccaagtggaggcgttgacatcacagattctattgggcccagagtgcaagtttataattgaacaatataggcaggaagtgaaggctaagaacatacaccatctgtttgtttttaaaactctttaatatgtgtcttcaaactgcaaaacaagagaatgagaaaacacactttaattcaaatcttaataagaattctatttcagtaatctggtaaaaataataataataataataatacctaaacattactgaggggagtcttttgctgcaatgcagtggttctcaaccaggagcgattttgtccttcaggaacatttgccaacggctggagacacctttaattgtcgcaactggagagtgctacaggcatccaatgggtggaggccagggaggccactaaacgttctacaatgtaaaggacagcctctcacaataaggaattctccagcccatagtagaaacagtacctgcctcaatgtatggccagggtgtgctatattcacttttgggttttgccaccaaaatacttctataaaactaatatgccagattcactgtctttgccaaaaataagacagaagtgacaccctgagaaaacaaaccatgaaaattattcattcagatgaatatctattttagtaaaacctaatagattcttaataaaatgagaggtgatttggaaattttgccctgataatttgagatattaaaaatacattgttaacgagtacttcctggctacccgcccactaattgtatgtatctgtgatattcgctcaggcaaaattttcaaagtttgcaaaataacatcagaatgattttgaagacctctgtatcaacagcttactttttgttgacaattcccaaagcaagttcttcaattttactattaagaagcttcttatgggtcccccttctgaaactgcccttgacacgttccacagcatccttccaaaaaactactatttctaaataaatttaaaaaaatccatgaaccactcacataataatcttaaaatacttcaagtattattaaaaatagtgaacattttatgggactaaattcagttaaccataagcatgtccatcaaaagaacagtgtcttcactaaatctactactaaatgaataagggtttgtgaagatttctatattaaaattcttctttcatggaattaattatatttatggagggaggaagcagtgttagtataaccttttagccctcatttagaaataggcttattatattgaagtcaatgatatacagatatgtaattcaagcagattctacatgtatatctacgagtagggagcattaacctcaaaaataaattcctcatgtcaaagggctactactcacttgttccagaaattcattagcaagttgaaaaataagaatgacccagtcttgttaaaagaaaatgcagtctacagaaatgttcattgcattttcatacttttccccccactggtccaataataaaaatcatcatatgaatgactgacacttagtaatcacctataatgcagtaggacctacacccctcactatgccctgtgctggccatcacagctaccttgctgcatacatattttgctccagaaaagcaaggctcagccaagagtcagcacctgcataactctaaagtcacaggggacctacaattcaaacccaggccagctttgctccaggacatccactgacatgtcatggtctccattgtagcaaaattcacaagttcaaaaggattttaagttgttttattcctttgtattcttctttcaacaatatcctattgttcgaattcccaaactcaaacagtttataaacgattgctgtagttagactttaattcctgtcccacagttaattccacaaaggcattttgccctgtgtaattccattcttttcctattcctgtgtcattaggggaaaaaatatgtttttgcttatgagatatctctagctcaatttctttctggtagtgtgtctttgatcagttcagacatttctcagacttcgtatacgccctcgtttgtagatagcgttatgtgttctctgaaactttttattgcttttcagctttgtgtgtgtgtgtgtgtgtgtgcacgcgcacgcgtgcgtgtgtgtaaagaaggagattaggacatttagagaaggagggcggggaggagagatcctgagaatagaaaggaggaaagaaaaaaagaggaatggaaagagacagagaaaggaaatgggagtggaaggagggaggactgctttgtaactgctaagattgcagacagaaatagcacacaaccactgtgagctgtatgcgattcagaaaccaagaccaaattttgctcactttcattaatcagttgctcagatagaaggaaatgacatctggttctgtcttcttctacatcttaatttttggaaaatattgtaagtatgctcagtatctaattttgtataccttagtattttgtggaataaccacaagcacaaatgtttactccttatatttatgcttttaagataaaatgcacttgctgataaaattgtaatctcacttcagaattgttcttcttagtatatgtctggtatttgtattaaagaccataatatcttatcatagtcaatagtgaagcaagactgatgtgccgtgtaaacctaggcttcataataaccaattcatataattgatattataagcaacattataatatttaaagagtagtaattcttaaactgtattcaaggaatatattcattgaaaactcctaggaaagttctcacatttgtgccagtttctgtatagttgtaatgctctgtcgcccttattctttgtcatttgctatcataggtgtgcttctgggcagggagatgcattcataaaactctttttatttagcaaggtttatcactgttccttgaaagaaaaacaagggaaagcacaaagcaatgaaaaacataggcacaaaagaagctccaaatgggcatgttatttttactataatgacaaattttgttttctctgtgtgtgctatggtttatttttcagaaaatcttttttaaattcaagggaaacagttgttgtgtgttaagctccatttgaattatagtatgtagacagaaataaagtgtttttgtttcttaggtaataaatgatgaaaaagtcaaagccaaaccaagaacaaaactttctgggtatctttaatactttatgattccgggaatgtgggcttttactaatttagaaattaacaagcctttttatagtcctgtgtctcttaaaagtttgcataagttttgttaactctgagctcttctattaaggaatgtctcagggtaactttcaatcctgactctcccaattgtaatatgtcaaagtgattatatcttccttttcctccttctttcctccttccctctgctccatcgcatctaaagttaaaggacagcatcaaaaccacagaaactattcagaatcctggggaaatattctagtcctagccttctccatctctaatcttgattactgacagtcctattttttaactgaagggaaaacaataaattgcaaaccaccataaaaaatgtaatgtttctaattataattgcatgtttaaactaccagagcttttgacatttgtggccaacagcttcaaaaattaatgccatattttaccatccctattccatttcaatgaaatgaatagattaaataagccagaggaatatttccaaaatagtctttctagtatgaagaatttaagggtatataaaaggtgtttagggcaggttgggaagcaactttggccactgtgttaccagtcatttcaggttaggaaaaaaattccatgtttacctgtacccttttgttaataaattattttcatgagcagaaaataataatgatggtggtgatgatgatgccaaaaccctctgtctctttaaatttaacttctcttttgattcaaaagaaaatttgggagtgtagtgtaagttgagagctccaagttctcatccttccacgccttccccaggaaatgagggcataaacatttgcagcaaagtttggcaaggcaattcctcgctacatggtattaactgcatgttagggtgggggaacacttgtcagggacgccctgaaatagcacccacagccgtggctcaccttgagtttagcccctcacccaggccccacctaagtgagaatttcctgggcacatagcaatggaaatcaacagccacacataaggacaaattcttaaacctctgtaaatgccccatggttgttgtttctttgtgtgttttctttgttttgttttgtttttatatccactttcctgtaacgggaaaggcgatgtgatatcatggaagacacctaacctaagacgcttagctgcactaccatgtaccggttctgtggttttcagcaaatgatttacctcttctgagcatgtgaaatggcaatcaaatcctttaccctgtctacctttcagaaaccctgtgttccattctttattacaaaaattacttcctgaatcttcacaacaactctattatgtggatacaattaagcacacgaggtaggacattcagtgccttgtcacaagactccagctaataaatgccaagattggaatgctttcagggcccgtgctctctcccctagaccatgataattctcagtagccataatgtgtataaatgggctttgaaaactataaagcccgttacagacgtaagcaactattagtcatcctttcaaccaaaaatacctatgcatgccagagcagtgaccatgctttattcacctaccttgttaaagtaagcatggtccctgctctaaagggataggatggagaagacggcacgttgatctagaattcaattcaataagacaagtgcaaaaattgaggtccacacaaacagaggtgacattaagacttagaaaagatttccttttagccttgagaatttttcattctttaaaaatccttctgtccatagtctaattaattgtattgtgccaatgttaattttttagttttgtaatgtactaaatttatgtaagattaaggaaagctgggtgaaaggtgtatgggacctctctatactattttttcaacttcttgtaagtatatatttcaaaatccgtggttaaaaaacaatccccaggacaacttgtattataagttcttatcagaaaatgctgtattatttcttaaatgatatcactaagcaaaacaattcttttacttaatgttttagataggcaggaaacaagtgaagatataggaaatagaaggagttcaaacataagcttgatccactttagtattttgccaaggaccggcccagcttagtaaggtcttctctttcagactcctagagacacttaccaggctacctggcctttgctttggatcccagcactggcataacttgtaacagattttttctgtaactatgaagaagagaaaaggaagagacaattccagaacagaccattagcttggttagtacgtggaaaaagagaatgttcgcatatttatccaattccaaaagatgggagaataaacataccaatatgcagaccacagaggtatactgtgtcccaccttatactttggcggggggggggttgggttttttttttaatttgtataaatttatggggcatgagtgcaatttggtacatgcctagattgcatcgtggtcaagtcaggacttttagggtaacatgcgtggtaccaattaaataacttctcaccaccttatattgtggaggctgctgacaattttgtgttgtttttactacatattttgaatcatatttttaagtttcaaatggaaggaaaattaatgaatctgtgcaaatgcaccctgatctacataaagggaaattattatgtttatgaactaaatagtctttcaagtacaatttcacacattagtacaaacttgttaaactaaaatgcctggagttgagtattctagttaggtttaactttctgtctgaaaaactgtaagcatttagaccatttgatttcaatccttatatttatgggtgtagttgtttttctatttcccatttattgagaggtctccatggatgaggaacaatgtaagtgctttacaaacatgatcttattttattcctataataaccctatgagatattcttgctttacaaaataggaaacagagaatgagaaatatttggtagcattcctggcaccacttcttagtaatgttacaaaggagatttgaatccaagtctatctccttaaaaagcctatgctattaaacatgattcaattctaacactttcttaaattataatatagaatttaaagtgaccttaacagacccctgacctagctcactggccttcaagcaagttagatctttctctattttagatattaatccataaagaaatattagccagcccaaggtctcagagctggtaaatccagggcttccaccacctacggtgagggcctccccatccaaggcaagtttaacaaatccatgctaggcgtttatatatctcctctaatgagctggtgctatctgctttgtatacattcctcagtgtacaccaacaactgatgaattagtatatgtaaataatttgaatatatagaaagcacttttgtttgcagcacatgaaacttagctatacatacagcaagtgccaataaatattgacttaattcctacattagtttacctctccctcctcctggatattttattagccccacaaccccaacagctctatttcctgcctatgtgtagtgatcccatactctttcatctttttaaattctacagcttcatctatttctgtgatcagagcaacaaggacccaacactaaaccaaaagctctttccttctttggagataagcaggggcaagttgtgaatatttcaaatttaggttttgttctctatcacaacaaaaataaatgtcaaatggaaaaaggacagtgtaaagtgagatatcatgttgttcatgttagaacttggtattttcctactaaataactgtattttatagcaacctggatattattagatttgttgttaaatagattcattttataattatttcaatactacctaaattaactgggtctccttatttcttcaatattttatgataatgaatatgccttttggaaatcatcaatgttttcaaaaaatttctgagagttaatctttgggaacggtactcttgggacttttcaccagctggtctaggccacctggagcccttgcctctggccattgtgccagcaactctctccacctctctctccccatcattcttcctcaactcctcctcccatgttgctccaggaactcaagttctcattgagttcctatgcagatggacacagctctgtctccttagctcctgtttccaaatgcagtcctaggtctacatttagacagggtgctcagttgaaccaaaatgttacccacatgattagctacaaatgaaacagcaggtaatctgatacattctttaatagtaagattcacacttaaaaaaacaaaaagctgttgagattttaaataatttttttgttagaggattgagtatccacttgaactaagaggccatataattatatgagttattccattgattaaaacatatagttggccaggcatggtggctcacgcctgtaatcccagcactttgggaggccgaggcaggaggatcatttgaggtcaggagttcaagaccagcctggccaacatggcgaaaccccgtctctactaaaaatacaaaagttagccgggcgtggtggtgggcgcctgtaatcccagctactcaggtggctgaggctggagaatcgcttgaacccaggaggcaaaggttgcaatcagccaagatcatgccactgcactccagactaggtgacaagagtgagactccatctcccccgctccaaaaaaaaaaaaatatatatatatatgtatatatatactgttgcctcctactaatcttttcccttggttctcatctaattcatttaaggaaaaatgaagtttctttttccacttcccacagtctgatcctcaagtaaattgctattacttagacagtttctacttaatgttgctcaagtactatttttaatttcagtttcataaaatcagacttttttgagttggaaggcaaggtaaagctataaaggacaacatcctcatttttcacatagaaagaaactaaggccatatagctgtgttccctttagttttcagctgtcttattcttaactcacttttaaaagtgggtctccaaatttcatatgtaggacaaaaagggcaagaaatatcaaaagggtaaaatatcacttgaaaatagaaagaacctagacagaaattgttaaaataaatttattatctaccaaaatcctagcatcaatgattaagactttgccaatacactaagctagtataatccctcttcacatacctaccttgtggaaaaacatttaaatcattctcacaaccaaggagagaaaggttctcattgcacctgtacatcaccatgtttgcagccaggcccagaggaattttaatgaaagggactttaaaaatgcttagagtaaggcggggggcagtgtctcatgcctataatcccagcactttgggaaaccaaggcaggtggattgcttgagcctaggagttcaagaccagcctgggggggcaacatggcgcgaccccccatctctacaaaaaatacaaaatgtagccagtcgtggtggcaagtatctgtagttccagctactcgggaagctgaggtgggaggatcgcttgagcctgggaggcagagattgcagtgagccaagatggtgcactgcactccagcctaggcaacagagcaagaccctgtgtcagaaaaagaaaaaaaaagctcagagtaagtcaacaccaagtggatgtcttcactattaatatctcctctccagtccatgctcctatcctattccccagacaatagagtcatctctaaagatgcagcccttttcatcacatgccatgcaaatcatgaatctggcccttggggtcacccctctaaggtgagagaggcttcatgtgccacaggttgaaaaatgagacagcattgctacagcagaagaaactttgccaacttctcaggagtaatttatagactatcagaatctctcagacacttctagtgtccagagaaatcctctcttttttctgggtgccccagataatgtaggcaccaaatacctgtgtgcttcaccgctcctataacctcttctttcccaccaaaaaagaatgccatctgttctgtctttctgcctatgcaggtgccagagagggcggacagtggaggccctggtcgtagggagtcgaatatccctaaccttactgttttcttccctctccccaccccagcacacacagtttcctgagatagagtaacatgtttcaatcctcacctttgtggggattgaaaggacactcacagagcaacacagagcatcctcactgttatgttaaacgaccccaagatattcattcctgatatggtaaaacataaatcccacactggtcataaactctgctatcatgaaagtctgatctctttttttgcttgcttgtttttttttttttgttgttgttgttgttgttgttgtttatgagacagggttttgctctgtggcccaggctggagtgcagtggtgtgatcacagctcactgcagcctcaacctcctggactcaagtgatcctcccacctcagcctcctgagtagctggtaccacaggtgcatgccaccacgcccggctaatttttgtattttttgtagagatgggagtttcaccatgttgcccagactggtctcgaactcctgggctcaagccatccgcccacctcagcctctcaaatctctgggattacaggtgtgagccactgctcccaaactccttcaagttttgatcctgctacatgcttgggtttgtcctcctttgcttctttcccagattgtctatttagtgccaaatggactccctgcagctttccctttcctggctaagcaacctagatactggcttccagttctaattaagcagttcctctttctcccttagcgcttaatttctccttcctatcttaatgattctctgtattccttagtctcaccacaccttctgacaaaatacccacaaagagaaactctcctgtcttggtcccaaatcttgcaaccctaattctgatttctactcatttcatttccctaataaatacttcctcctcattaattaggactttcatagagaacagctgcctgttaaacatactacttgcagattacacccctccctcattttgcagttacctgggttcatggacatttttggccgatttttttcagtgttgtgtaaattagttccaacacctgatcctcataatacaagcaagttatgaccctgcaggttcctgtagttgcagccatttaaacagataaattttactttacagagtttaaattaaaacattataaaatagaacatgcaaatagataggaaatgacaaattttgaacaaaatttatatgcgtgtgtgcctggacctagtgaaagaaatcagataagctgccctaggaagcttttttggaagcttttatccaggcacatattgcaagtgtaagttaatgaaaataactcttctcaggtgcatcacgcattggcttctgagatacagcacaatccactctaccattaccttcactcataaaacctcagattctttttatcctcttctctcaccctctgttgctcaccctagccttttgatattttaatggttttttcccagagcaggctagaaatgtttgattcattttcaatggtccagaagatttgccgtttttactttctcagttgtggctgatttgctggaaattgcagaactgcctcatggtttataaatgtttctactttctcacacatttcaaacttagacagagtgacatcatcagtcatgctttctgttagcttcttaacctccatttaacctcccttttttgtgttaagatcaagagaggtggccagtttagcaaagtcaaatttagatttttatttctgcccttctaattgcagtcgttacccctgatcctgtgaacttgcagcacaacagtttaagttccctggaaaggaaagagggattgtttttgtttgttgatattttctcaaccactgagcattcgtcttcagtggtgatccaaaataatgtggcaagtcatttgtctatcaaatccattttaatggaaaaaatctgtacaaagctttttgtagcgcatctggctcttgggcaccttttttcaaagttcctatgctagtaaacgttagcaggttcaatttgaaagctccacgccctcttctgttcttcaatcccctagaggctttgagtcttttttgagacagggtcttgctctcctggcccaggcttgagtgcagtgatgcaatcttggctcactgcaaactctgccccctggctcaagcaatcctcccaactaagcctcgcgagttgctgggactccaagtgcatgccaccatgcctacctatttaaaaaaaaatttatagagaggagaacacactacattgcccaggctggtcctaaacgcctgggctcaagccatctgcctacctcagcctcctgaagtactgggattgagccactgcacctggtctgcctttgactcttcactgtttctctctctttgatccaaggcccttggcctcactctctgcccctctgtttcctccaatcactcagcccctcactcctgatcctctcctgacacacatattcccctactgcacagggtcatcttgaacacaaaatttacttctattctaattttttcaggagaatccacccttcggtttttgtcctttttttcctcagaaagcacagggttgtggagggcttcagggaatgttgacaaaggtaatgccagcattctctgacatgaagtttgagggtggaaggaaatgttataaactactactacacacacacactttaaatcttatgccatcattaacattaagcataccaaatccaggtacgatatatagtgtaaacattttcatgtttacagaccagaaacctcatatgtgtaaaaattatattttatatttctatgactaaaattcagagctcatgactcctacataaaataatacaacatttaaatttgctaattcaaagtagcttggttttaaaatgaggcactttttctttaaaatgcaatctgggttttctgttggtttgggttttttgtttgtttgtttgtttgtttgttttacatttagggggtatatgtgcaggtttgttacatgggtatatcgtgcgatgctgaggcttaggcttctaatgatcccgtcacccaagtaatgaacatactgcctgataggcagtttttcagaattttccccccctcctccccttttggaatccccagtgtctcttgtccccatccttttgtgcgtgtttacccatgcacccagtgttcagctcccacttataagtgagaacatgtagcgtttgtttttctgtctctgagtgaatttacttaggataatcgcctccagctgcatccctgttgctgcaaaggacaggatttcatttttttatggctgggtagtattccatggtaccatattttctttatcttatctaccattggtgggcatctagatggattccatgtctttgctattgtgaatagtgctgtgataaacatatatatgagtggaggtgtctttttggtagaactgtgtataaaatacaatctcaatcacttaagaaatcttacctgcgctacccttttccccttctccccttctgaccaacagcatgtgatttcggtgacagttttgcaaacatcaaaattgaggaggcaggtagagaggtgaacatctccagtcactttgccagctactcatgagggttaactcactctggcacggatgagtgacaccagcacccaccaaagcattcaaccacttttccacattgtcctccagctaatccacacacttctcaccaaagaccaccaccaccgtctgctcatagccttctcaggagagcacaggaagccctcaagtgtccttcctcacctattgggaactcaggcagattcggggctgacaaaggccctgtgtctagctcacccattcaccatcgcctccctcacttcaagaccctgcttctcctagagatgtgccctttctttgagctggacattaggatttgagacaagaatcacttctgcttaggcagtcccccaaattctcttagcagtttccaccttctcccttcccctacagagttttaataccaaagggacagggtgcttccttctcacatttcactctcagcaggttcaggaaaactgcttcgagggcatcacacatgcttaacccttaactctctagaggttgtggaaagactggatgttctgtgtccttcgttactgggtcttaatgttcaagaccaatatggtagaatctaacaagtaaataaaaagaaagaaaaaatattatctctctcaagcacctgtcttttgccattgaaagccatgactctaaagctttggaatttaaagccaagaaggtgaggactcaggaaagtttttttgtgctctaccttccctgagcaataaagtacagtctaaatttctagttttagtggtggaagagtaaaaaaggaataaccatgaaggaagcataaatggacattaccctaaaatcagtaattataaacacaaagccacagtaattagaaataatcattataacgaaataccttagtaagagatgcactttttatttgcaaatcatatcatatcaaatttttagctatttcccaacactgtataatagacacaagtgaatatgcatatttacccttactctcaagaaacttctataggagaattggaattttcaaaacttgcctaatgatagatagggttagtctaccttcatttggtcgtttattttttaagtcacacacaaaaagtgtgcttatcctatttggattctaactcaaatatcttggctcaaaattctgtactctttctgataccaattttccctacttttctatttttctattctgttgcccacaatggttcctcatatttcacttacacctgcctttcatgtaacttttatttttaatctcttttccctacacttttctatatgctttttttcctattgctttaatcaacactaatcacaatattatagatgaaaacatcaatgtataaaaatattattcaaagcgtgaaaaatcccaaatcattaggcatatttattaaatttctcccacaaattctttctgatgcaatgtctaaaacaatagaatgtgtaataaataattggaaggagtaaggaatagtctcacatgacaatcttaccccctagaaactactcgatcacgttcttctctaattagtctcccagggacctacaccacttttaaatttattctggggaaattgtggcagatttttaatgtatattataatgtgctttattccatgtacttagatacacaaagtgttctagatcaatgttatgatattctgattttttttttttttttgagacagagtttcgctcttgttgcccaggctggagtgcaatggtgcaatctctgctcattgcaacctccacctcctgggttcaaatgattctgctgcctcagcctcccgagtaactgggattacaggcatgcaccaccacacccagctaattttgtatttttattagagacagggtttctccatgttggtcaggttggtctcgaactcctgacctcaggtgatccgcccgcctcggcctcccaaagtgctgggattacaggcatgagccaccgcgcccggccttattctgattattaataggaattatttacattgctaaagttataggtaagagtcattaaattgttgatgttttggttaaatgataagcactcataaatgttgtctgattatatcctcacatgaaccctgaaaggtaatgttttctcacctttccagaatgaagagagaaatttagaaatttgtcaatgtcacgggcacatcaatgcttagtccagaactcgaactcaagcttatctgattcccaagcctgagttttttcactcacatacaaacaccaaaatcatgtcctctctcatttttattattattattatatattattacctatattattacctataataagtaatttttattacatataataataaaataatttatattgttatattaatatattacataaaaatattactattatagataatataaaattatttataattatataatattttatcatttattatatctcattttataaaacgagaattcctattcccattaacaggtgaacaagctagccaagcaagttgaactggttgcagatttaccctgttttatttcccagggagaggagagaagggcactgcaaggacaggtacagcatgcgcaaggtcatggagacaggaaaggacatggcaggctcagaacatgatgagaactctggggtagtttaagaggagggctgaagcagatgcttggagatgaagttagagaggatcaccagaaccagatcatgaaggtctttgtaagccatgtgccagagttaggatggtaatatattagtaattcaaatcgaggttttgtacaaaatggaagtaacccaggcaaattaccaaaaatggactaaaatgtgagaaactgaaagcaatccttagagagggcgtggccattgcacttgagtcactggaaagatacaggctatgatcaagtcgaatcagctactggttttcacaaggaagtaactcaggcaaattaccaaaaatggactaaaatgtgagaaactgaaagcaatccttagagagggcatggccattgcacttgagtcactggaaagatacaggctatgaccaagtcaaattagagactggttttcacattgttttcctgggaccttaatacatttttaaaatattttctccctattcctatctataaaatacacaaaatatgtgtggaacacactacagaatgtttgttgaataccctgactgtgataggaccggcctttttgatattgcactccataaatatccaactattatctctatttctcattcttaagagtttgatctagtctgcgttgtgttttccacacttcctatttcccttgtgttattttccaactcactattttctttaactctggaaagccctctgatccagtttacaaataaggcaataaataaaacataacagaaaacattaacaaagtctcatactataatggacaatagatggacaaagtgcttatacacggttatttgaatcaaatggaatgaacccattatctggaagtacatacaatctgtactctttaatcaatcagtaactttgcaacacaaaggttgttactcagaaagtatcaatcaacagatttaagagattttattcagcaactataacctcacagcagtagaaaacagcacatagacaaataatttaaaatattgtgtttataggaccgaggcctaatacctgtaagaatataattttactctctctattttaatatatttacattttaatcaatagtactacccatgatatgtttaatgcatgggtgtaaattcattactttttctcatttgtattttcctttataaaggacaccttaagagtatgatgaaacagtgctgaaagtttaaggtgtattatgggaaatgcgtcaatcagagataacttcaatatccttagcagacttttaatttccctaagaattgcagaaccatagtcatgctatctagagaaatagcttgctcagaacatctttaaaataagaatacattcaatcattcttgcaggtaattattaacccaagtattgaactgtaagagatacctgacttaaaataggctctttttgcaaatactgtatacagtatgagcaaatcattgctaatgccttctaacatgactagaaatattataaatacaggtcatggaaaattatagttttaatacacatatgaaaagattagtggtttgccttcaactgaacaaagtcatattcttccactggataaattattttctggcataaattagatgcatatttggaaactcatattaactgtttcaaaataacatagccaggaaatcatatacactttggagttgcaatattgttgtactagatagcgtttacacttatgagctgaaagaattccatactcatggaatgcacaaagttttgtttactgtttccaaaaaaagtgacttctatgccaatttgtcaatttannnnnnnnnnnnnnnnnnnnctagctaaactagaaaaacaggtttgttcatttgattaacatagatatatgctctagaatctaaatctaaaatccaacctctctttaggatttttaccaatatttgatgacaaactaacagctgtggggaatatagcattatccccaccactgtgtttactggtgagctagtcctcatttgaaatatttctcttcttatctctctttccttaactatctcttcctttcatcctttccttcccttgtccccccaaaaaacaactaaattttcttaatctagttgtttcacagacaaaatctgtagtccctagagtgtctatgaggtaggtaaagggcttatgtcctttgagaaaacagggtcttggtggaagactatgttaacatcaggcccgaagtgcccttgggggatagttacagaaattgggtcttacctagctgacaacagagtctggagaaaagaactacttcctgtatgcattaaagagaacttcacgacaccattatcttaaaatactcttctaagtatttcggacacacagacaattattcattcttcctttccttcaactaattttgttttacttcctacaatatgccaagcaccaatacaggcatcagaaataaatgatggacaactccagaaagatccctcacctatgggaatttataatctggtggtgatatttaaataacaaaaagtaaactaataaacaagctatctcaaagagtagtaagtattgtgaagaaggaaaatgtagtggaataggatagtaactagcaaggaatttaaagggatagagggatagatagagggatcccaagcaatcttcctgagggagggatacttatgctgaggcttgaagaatgaggaacagccaggcttgtaatgatctgaggaaagaacaatgcaggcactcagataggtggaacagccaactcaagactctaaagtcagaccaaacctagcacatcaagagaggacagtgtttgtaggtcaaattaagtgagggaagaaatgtggaaagaaaccaagttggtgaataggtttggcccatttatgtaaggtaaaaggtaaaggttaaaagtttggattttattccaagaacaatggcatgtcagtagaagttttagaagaggacacattaatgatctactttaattttgaaagatccctctggctgctgtgtggagaacaggatgaaaagaggcaggcgtggaagcaggaagtccaagtgagagacagctgcaattagacacgatggctcgcactctggggaaagaagcagagatgagaagttgactcatttcagatagtcaagtgctgaaggattgcaagtgggaggtgatgggctgagaaaagaattctttattcctaaaagatgagagaatgcaaaatgaattgtgagtcagagagaagccaaaggcattttttttgtggggagaaagaataggggccaggcacagtggctcacgcctgtaatcccaacactttaggaagccaaggcgggcagatcacctgaggtcaagagttcgagaccagcctgaccaacatggagaaaccccatttctgctaaaaatacaaaattagctgggcgtcctggcacatgcctgtaatcccagctactggggaggctgaggcacttgaactcgggaggcggaggttgcagtgagctgagatcgcgccattgcactccagcctgggcaacaagagtgaaatgccgtctcaaaaaaaaaaaaaaaaaagaataggtacaaaaatggtcatataatctatgacttctctatgaaataattcaattctaaaagaagggtgcttccttacacgttccacagatgtgcatccaacccatgtattgttctaatgagatgagtacagataggcaggtgagcaagggccattcaaaacacgcccaggtggcaacagcaataagagagtatgatggaagagggacaaaatgagtccttcctcactacttaacccagtgacctgaattagcaaccacctcccatcatgggaagcattacactgagatggcatcgtggacagaaagaggaagttaggcagtggcaacagaaactacttgctctgttcattaaaagataaactggaatgaagctggaaaccatcattctcagcaaactatcgcaaggacaaaaaaccaaacaccacgtgttctcactcataggtgggaattgaacaatgagaacacatggacacaggaaggggaacatcacacaccggggactattgtggagtcgggggagggggaagggatagcattaggagatatacctaatgttaaatgacgagttaatgggtgcagcacaccacatggcacacttatacatatgtaacaaacctgcatgttgtgcacatgtaccctaaaacttaaagtataataataataaaatttaaaaaaaaaagacaaactggaaaggtttggagatgagggtgctccacaaaagatgaagagtattaactagttcctggtagacatttataataaaagaaaaaaggcatatgtaatacctgcttgatatcagagaaggtcttagcatcaaattagaccacatgtgctgcttagcatttcagatagtgtttggcccatggtgcttacaatttcatggattgatgattgattggatggtgtggaatctaggaagtatatttttagtacagtcattagttacaatagagctaaccgtgtccagtaaaaccttgtctcagactctaacagcctctaaatgcctttgaaattgtccttttggctaaagatggaaaaaaaatcacagatttcaagtcataaacacacaggtggagtggaatgaagtatctggaaataccttaacctggaagttaagagcagtgggtttagtaaaaaagggaaattgtcatctaatactgagacttctgtgaaaggtaacaatgaggagattttgtacatccattaattttatctgctcataccaaacaacctggcagggggtagttactgttagcagaaaggggtcccgatctagaccccaatatagggttcttgcatctcacgcaagaaagaatttggggcgagtccataaagtgaaagcaagtttattaagaaagcaaaggaagaaagaatggctactccataggcagagcagcggcatgggctgctcagcagcttatacttatttcttgattctatgctagacaaagggtggattactcatgagttttctgggaaaggggcaggcaattcccaaaactgaagttcttccccttttgggaccatatagggtaactgacattgccatggcgcctgtaaactgtcatgcactggtgggaatatcttttagcaatctaatacattataattagcatataatgagcagtgagaagccagaggtcactcttgtcaccatcttggttttggaaggttttggctggcttctgtaccgcaacctgttttatcagcaaggtctttatgacctgtatcttgtaccaacctcctatctcatcctgtgactaagaatgcctaacctcctgggaatgcagcctactagatctccaccttattttaccaaccccaatgcctctgacattactaattctcatgttccagaagaagaaactgaagttcaagaaagctgtacaaagcccacagcgcacatctgggaatgtctaagaatgaccctccctgccccgcagcagccacaccttagcctgtgctgtaaacatgccgtacaggtgtggggagcacacactagggatggctgttgtctgacattgtggcaattccaaaaaaaggcaaaagcaggaaaacacactattcaactttaaataagcctctttgattttgctgaataataagtagttgtatggaaatgcattaaaattaaacttaccggcaagtagatgtcattaacaatataatagccaccatggcaatcctaaaaaaaagaagcagtggccacttttctgtagtctgtagacagcagtcagccaacagtcactgccctgggctgcccttgatggcattcagagtcatgctttttgttattttcccacaaaaggttagatccccgctatgcatcatgtccagaaaaaccttgtcaaactctcaaagtctctaaatgcctttgaaattgtccttttggttaaagatggaagaaaaaatcacagattccaagttataaatacacaggagaagtggaattaaaatctcataaataatattactggcaattaaaattctttgtgacttatacccagaattctcagagagcttcatgcacacacacacacacacacacacacacacacacacacacacagtgtccagggtaatttcatatttactcaaaaactgtatgagtatatgcccaaattctaggtagagggggagtcatatattctaaaaatagtggaaattttaaaacttggaaactatttcagctccaagtttaaaatataaaaatatttcctaaacttattttttaaaaacactttattttgaaaaatttcaaacatacacaaaaattacaaaagtagtataatcatacccatacacctttcacctggattcactcatagttaacacttttccccatttactttatctccttcaccaaacatacatatatattttttcttgctgaatcatttgagactcactgacgacattatgacccttcgcaagcacttgagcatgtatctccaaagagttacagtctcttagcccccatacaattactaaatacaattaacattgaaaaatcatattatttaacatgaagtctatatttatatttcagcaatcgtctcaattacatcctttatgcggggtggccgggaggaatgatgcttttcttttttgtttttgtttttttgagatggaatctcactctgtcgcccaggctggagtgcagtggtgcgagctcagctcaccgcaacctccacctcctgggttcaagcgattcttctgcctcagcctcccgagtagctgggactacaggcaggcgccaccatggctatatatatatatatatatatatatattttttttttagtagagacagggtttcaccacattgaccaggctggtctcgaactcctgacctcgtgatttgcctgcctcggcctcccaaagtgctgggattacaggcatgaatcactgcgcctggcccagaatgatgcttttctaatccaggctccaatccaggatcacacattgcattcagcggccgcagctgtataatcttttatcaggaaacaatgacattgtgagatttgaagaatatggacaagttgttccatagaatattcttcaattcaggtgtgtctgatgcaagcatacttgtatatacctacagtaggccttttgcaaacccaagactgttacaaaacttaccataaaaatacagcaaggaaagaaagctacatgttatgttcagggactggtctcctgttaaagtgcctccttagatttgcatcaatttttctttaaaattatgactcacaggacttcctgcttttgtatctgccttgttcctctaattgttgtcagccagtcttcaaacaaaaacatcacatttatctatcctgactaactttccaagtcatttcgaaagccataaccctaaaccccacaccttgccttcaccttttggcaatcattgcagagttcctttacttaatttcagttcttttgctcctttccatagtagagagtctgtattgctattttcatcagttccttctgtatcagttagaaaggcatcataggtgcaaaaaacagaaggaccaagcaacagtgacttaaacaaataagaacttaagaatctttttttcacataaagtccatatggacagtaagaggggaactacagacactggggcctacttgagggtggagggtgggaggagggagaggagcagaaaaaaataactattgggtattaggtttagtaactgggtaacaaaataatctgaaaacaaacccccatgacatgagtttacttatataataaacctgaacatgtacccctgaacctaaaataagtttaacacacacacacatgcacacactccagaagtaagtgcttgctggcattgcggcagctattcagccatgccctgaggctcctaggttcttcctacctttcctgttcctccattcttcaggcactggtttttatgttacattgactcctaatagatggaaagatggctactgtcactccagacatcaagttcatgttcaaagcaggaagaaggggaagagtgatgtaaagctggattttcctccagttaccaggaaagcaatggcttttccaaaaatttcccaagaagatttctagtttttaggtctcatggtcagaattgggtcacacagtcccacctcgctgccaaggaaacagggaaagccagaaacaggagtcaccttattgcttggggcagtcacctcatctaatggtgcagaacacagtgtctccacaaacaagatggggattgtgttaacagaggaagatgggaaatagagaatcggtagcaaccaacagtttccctgagccctcccagtcagtatttatatttatttattccccacttctctattccatttcatatttcttctcagtttttcttcatttatcttctctccctagtacttcctcctgaagaatgaactttcaaacttttttattaacactccatctcccacctagaatcaaatagtattacaacagctggtactgcctcttccttcgacacagaagaaaacctaaaatccagtaagacagagtggcatgccaaatttgcccatcaatttattggcacattcaagaataaagcaaaactctactgaatatcgatatagtagtatctgcctctgaggattcttggtgcatatttttgcattctgccatgtttcgtccattttgcccctaccttgggcatttaaatataaagattcccatgagatcggatcaattcagctgtttatttctagaaatgtctataaagagaagaactaacaagagaaccatctttttatttttttaatttacttcctaaatataaatgaaggagaatctagaaccactgtcttcattggaaatcattgttccaaatgaaccgcaagtctgagtttataaagctgccatctccaatatgtctgttgagaaatatgtctatttacatacatcatgtttgtttctgaccttgtgggacaataacttggaatgccctgagcaacaaaaacataaaacactctgatgagacagcatctcatccttgcactgaaggatttcaaaagagggacagatcacccagaatggacatggtcatagaggaagtaagttagaagctataattgaccttcatcttttttttttaattttattttattattatactttaagttttagggtacatgtgcacaatgtgcaggtttgttacatatgtatacatgtgccatgttggtgtgctgcacccattaactggtcatttacattaggtatataccctaatgctatccctccccctacccctaccccccaacagtccctggagtgtgatgttccccttcctgtgtccaagtgttcttattgttcaattcccacctatgagtgagaacatgaggtgtttggttttttgtccttgcaatagtttgctgagaatgatggtttccagtttcatccatgtccctaaaaaggacatgaactcttcattttttatggctgcatagtattccatggtgtatatgtgccacattttcttaatccaatctatcattgatggacatttgggttgattccaagtccttgctattgtgaatagtgccgcaataaacatacatgtgcatgtgtcttcatagcagcatgatttataatcctttgggtatatacccagtaatgggatggctgggtcaaatggtatttctagttctagatccctgaggaatcgccacactgacttccacaatggttgaactagtttacagtcccaccaacagtgtaaaagtgttcctatttctccacatcctctccagcacctgttgtttcctgactttttaatgattgccattctaactggtgtgagatggtatctcattgtggttttgatttgcatttctctgatggccagtgatgatgagcattttttcatgtgtttttttggctgcataaatgtcttcttttgagaagtgtctgttcatatccttcgcccactttttgatggggttgtttgtttttttcttgtaaatttgtttgacttcattgtagattctggatattagccctttgtcagataggtaggttgctaaaattttctcccattttgtaggttgtctgttcactctgatggtagtttcttttgctgtgcagaagctctttagtttaattatatcctgtttgtcaattttgtcttttgttgccattgtttttggtgttttagacatgaagtccttgcccatgcctatgtcctgaatggtattgcctaggttttcttctagggcttttatggttttaggtctaacatgtaagtctttaattcatcttgaattaatttttgtatagggtgtaaggaagggatccagtttcagctttctacatatggctagccagttttcccagcaccatttgttaaatagggaatcctttccccattgcttgtttttgtcaggtttgtcaaagatcagatggctgtagatatgcggcattatttctgagggctctgttctgttccattgatctatatctctgttttggtaccagtgccatgctgttttggttactgtagccttgtagtatagtttgaagtcaggtagcgtgatgcctccagctttgttcttttggcttaggattgacttggcaatgtgggctcttttttcgttccatatgaactttaaagtagttttttccaattctgtgaagaaagtcattggtagcttgatggggatgggattgaatctataaattaccttgggcagtatggccattttcacgatattgattcttcctatccatgagcatggaatgttcttccatttgtttgtatcctcttttatttcattgagcagtggtttgtagttctccttgaagaggtccttcacatcccttgtaagttggattcctaggtattttattctctttgaagcaattgtgaatgggagttcattcatgatttggctctctgtttgtctgttattggtgtataagaatgcttgggattttcatacattgattttgtatcccgagacttttctgaagttgcttatcagcttaaagagattttgggctgagacaatggggttttctaggtatataatcatgtcatctgcaaacagggacaatttgacttcctcttttcctaattgaatgccctttatttccttctcctgcctaattgccctggccagaacttccaacactatgttgaataggaatggtgagagagggcatccctgtcttgtgccagttttcaaagggaatgcttccagtttttgtctattcagtatgatattggctgtgggtttgtcatagatagctcttattattttgagatacatcccatcgatacctaatttattgagagattttagcatgaagggttgttgaattttgtcaaaggccttttctgcatctattgagataatcatggtttttgtctttggttctgtttatatgctgtattacgtttattgatttccatatgttgaaccagccttgcatcccagggatgaagcccacttgatcatggtggataagctttttgatgtactgctggattcggtttgccagtattttattgaggatttttgcatcaatgttcatcaaggatgttggtctaaaattctcttttttggttgtgtctctgcccggctttggtatcaggatgatgctggcctcataaaatgagttagggaggattccctctttttctattgattggaatagtttcagaaggaatggtaccagttcctccttgtacctctggtagaattcggctgtgaatccatctggtcctggactctttttggttggtaagctattgattattgccacaatttcaaagtctgttattggtctatttagagattcaacttcttcctggtttagtcttgggggggtgtatgttttgaggaatttatccatttcttctagattttctagtttatttgtgtagaggtgtttgtagtattctctgatggtagtttgtatttctgtgggatcggtggtgatatgccctttatcattttttattgcatctatttgattcttctgtcttttcttctttattactcttgctagctgtctatcaattttgttgatcnnnnnnnnnnnnnnnnnnnnnnnnnnnnnnnnnnnnnnnnnnnnnnnnnnnnnnnnnnnnnnnnnnnnnnnnnnnnnnnnnnnnnnnnnnnnnnnnnnnnnnnnnnnnnnnnnnnnnnnnnnnnnnnnnnnnnnnnnnnnnnnnnnnnnnnnnnnnnnnnnnnnnnnnnnnnnnnnnnnnnnnnnnnnnnnnnnnnnnnnnnnnnnnnnnnnnnnnnnnnnnnnnnnnnnnnnnnnnnnnnnnnnnnnnnnnnnnnnnnnnnnnnnnnnnnnnnnnnnnnnnnnnnnnnnnnnnnnnnnnnnnnnnnnnnnnnnnnnnnnnnnnnnnnnnnnnnnnnnnnnnnnnnnnnnnnnnnnnnnnnnnnnnnnnnnnnnnnnnnnnnnnnnnnnnnnnnnnnnnnnnnnnnnnnnnnnnnnnnnnnnnnnnnnnnnnnnnnnnnnnnnnnnnnnnnnnnnnnnnnnnnnnnnnnnnnnnnnnnnnnnnnnnnnnnnnnnnnnnnnnnnnnnnnnnnnnnnnnnnnnnnnnnnnnnnnnnnnnnnnnnnnnnnnnnnnnnnnnnnnnnnnnnnnnnnnnnnnnnnnnnnnnnnnnnnnnnnnnnnnnnnnnnnnnnnnnnnnnnnnnnnnnnnnnnnnnnnnnnnnnnnnnnnnnnnnnnnnnnnnnnnnnnnnnnnnnnnnnnnnnnnnnnnnnnnnnnnnnnnnnnnnnnnnnnnnnnnnnnnnnnnnnnnnnnnnnnnnnnnnnnnnnnnnnnnnnnnnnnnnnnnnnnnnnnnnnnnnnnnnnnnnnnnnnnnnnnnnnnnnnnnnnnnnnnnnnnnnnnnnnnnnnnnnnnnnnnnnnnnnnnnnnnnnnnnnnnnnnnnnnnnnnnnnnnnnnnnnnnnnnnnnnnnnnnnnnnnnnnnnnnnnnnnnnnnnnnnnnnnnnnnnnnnnnnnnnnnnnnnnnnnnnnnnnnnnnnnnnnnnnnnnnnnnnnnnnnnnnnnnnnnnnnnnnnnnnnnnnnnnnnnnnnnnnnnnnnnnnnnnnnnnnnnnnnnnnnnnnnnnnnnnnnnnnnnnnnnnnnnnnnnnnnnnnnnnnnnnnnnnnnnnnnnnnnnnnnnnnnnnnnnnnnnnnnnnnnnnnnnnnnnnnnnnnnnnnnnnnnnnnnnnnnnnnnnnnnnnnnnnnnnnnnnnnnnnnnnnnnnnnnnnnnnnnnnnnnnnnnnnnnnnnnnnnnnnnnnnnnnnnnnnnnnnnnnnnnnnnnnnnnnnnnnnnnnnnnnnnnnnnnnnnnnnnnnnnnnnnnnnnnnnnnnnnnnnnnnnnnnnnnnnnnnnnnnnnnnnnnnnnnnnnnnnnnnnnnnnnnnnnnnnnnnnnnnnnnnnnnnnnnnnnnnnnnnnnnnnnnnnnnnnnnnnnnnnnnnnnnnnnnnnnnnnnnnnnnnnnnnnnnnnnnnnnnnnnnnnnnnnnnnnnnnnnnnnnnnnnnnnnnnnnnnnnnnnnnnnnnnnnnnnnnnnnnnnnnnnnnnnnnnnnnnnnnnnnnnnnnnnnnnnnnnnnnnnnnnnnnnnnnnnnnnnnnnnnnnnnnnnnnnnnnnnnnnnnnnnnnnnnnnnnnnnnnnnnnnnnnnnnnnnnnnnnnnnnnnnnnnnnnnnnnnnnnnnnnnnnnnnnnnnnnnnnnnnnnnnnnnnnnnnnnnnnnnnnnnnnnnnnnnnnnnnnnnnnnnnnnnnnnnnnnnnnnnnnnnnnnnnnnnnnnnnnnnnnnnnnnnnnnnnnnnnnnnnnnnnnnnnnnnnnnnnnnnnnnnnnnnnnnnnnnnnnnnnnnnnnnnnnnnnnnnnnnnnnnnnnnnnnnnnnnnnnnnnnnnnnnnnnnnnnnnnnnnnnnnnnnnnnnnnnnnnnnnnnnnnnnnnnnnnnnnnnnnnnnnnnnnnnnnnnnnnnnnnnnnnnnnnnnnnnnnnnnnnnnnnnnnnnnnnnnnnnnnnnnnnnnnnnnnnnnnnnnnnnnnnnnnnnnnnnnnnnnnnnnnnnnnnnnnnnnnnnnnnnnnnnnnnnnnnnnnnnnnnnnnnnnnnnnnnnnnnnnnnnnnnnnnnnnnnnnnnnnnnnnnnnnnnnnnnnnnnnnnnnnnnnnnnnnnnnnnnnnnnnnnnnnnnnnnnnnnnnnnnnnnnnnnnnnnnnnnnnnnnnnnnnnnnnnnnnnnnnnnnnnnnnnnnnnnnnnnnnnnnnnnnnnnnnnnnnnnnnnnnnnnnnnnnnnnnnnnnnnnnnnnnnnnnnnnnnnnnnnnnnnnnnnnnnnnnnnnnnnnnnnnnnnnnnnnnnnnnnnnnnnnnnnnnnnnnnnnnnnnnnnnnnnnnnnnnnnnnnnnnnnnnnnnnnnnnnnnnnnnnnnnnnnnnnnnnnnnnnnnnnnnnnnnnnnnnnnnnnnnnnnnnnnnnnnnnnnnnnnnnnnnnnnnnnnnnnnnnnnnnnnnnnnnnnnnnnnnnnnnnnnnnnnnnnnnnnnnnnnnnnnnnnnnnnnnnnnnnnnnntcctttctgtttgttagttttccttctaacagacaggaccctcagctgcaggtctgttggagtttgctagaggtccactccagtaccctgtttgcctgggtatcagcagcagtggctgtagaacagcggatcttggtgaactgcaaatgctgctgcctgattgttcctctggaagttttgtctcagaggagtacccggccgtgtgaggtgtcagtctgcccctactgggggggtgcctcccagttaggctgcttgggggtcagggacccacttgaggaggcagtctgcccattctcagatctccagctgcatgctgggagaaccactactctcttcaaagctgtcagacagggatatttaagcctgcagaggttactgctgtctttttgtttgtctgtgccctgcccccagaggtggagcctacagaggcaggcaggcctccttgagctgtggtgggctccacccagttcaagcttcccagctgctttgtttacataatcaagcctgggcaatggcaggaggccctcccccagcctctctgctgccttgcagtttgatctcagactgctgtgctagcaatcagcgagactccgtgggcataggaccctccgagccatgtgtgggatataatctcctggtgtgccattttttaagcccgttggaaaagcacagtattagggtagaagtgatccaattttccaggtgctgtctgtcaccgctttctttgactaggaaagggaactccctgactccttgcacttcccgtgtgaggcaatgcctcgccctgcttcggctcacacctggtgcgctgcactcagtgacctgcacccactgtctggcactccctagtgagatgaacccggtacctcagatggaaatgcagaaatcacccatcttctgcattgctcaggctgggagctgtagaccggagctgttcctattcagccatcttggctccacccctgaccttgatcttaaagggtaagatctaaataggtgaaaaagaagatattcaggaacactgccatgagtccaaaaaagggaggtagaaacatcaataacctttcagggctcataagctagtctatatggggaattagtaaaggcacattggttaagaacacgtgttctggaatcagacggatctgcatctgaatcccatttccaccacttactggttccatgatatccaagcaatttattcctctatgctttagcttcctaaactataaaatcatgataatattagaacttatttaatggagttttatgaagataaagtgaaacaaggcatgcaaagtgcttagcctggtacctaaaacatattaaatgctctaaaacatgaagaaaaaaaaaagcaactactgaccaacatgaaaggagtcaatgtaacggactattaagttttaaaactgggttgtggacctaagtgtccatcaacagatgatggataatgaaaatgtggtatatatacataatgggatattattcagccttttaaaggaaagaaactctggcatttgtgacaacatggatgaacctagacagcattatgctatgtgaaataagccaggcacagagagacaactactgcaagatcctttttatatgtaggatgtgaagtagccaaactcatagaagtagagagtcgagtggggagtaccagggtctggggaaaaatggagagatgttggccaaaaaatgtgaggtttcttacacttctctttgttgaaggaccaagcaagtgactgaaacaaataagaattaaaaaataagttccagagatctgtcgtacagcatggtgactatagttagtaataatgtgttgtacacttaaaaattgctaagagagtagattttaaatgttctcaccacaaaaaaatgctagcatataagatgatgattatgttaattggtttgatttaatcatttcacaatgtatacatatatcaaaaaaccacattgtacaccataaatatgtacaacttttatttctcaattaaaaataaataaataaatataggctgggcactgtggctcatgcctgtaatcccagcactttgagcggccgaggtgaaagtatgcttgatcccaggaattcgagaccagcctgggcaacatagtgaaaccctgtctctacaaaaaatataaaaatttatccaggtgtggtggcatgtgcctgtagtcccagctactcaggaggctgaggtaggaggattgcttgagcccaggaggtcaaggctgcagtgagccgagatcacacactggttactccagcctgggtgacacagtgagaccttgttacaaaaataaataaaaataaagaaatttttaaaaaataaagacccactcaaaaaacagaaaagtatattgagaccagttggggacactttgacaataaggctgaagtgtcacaaaggaagttattaaaaatgtgttatctagatgtgaatacagattagaatcacagttgaggcagtaggaatggaaataaggtgtgaaatggaaatgctgttaagaagaaatacaactgcccttaatttaggatttttatttcttggctgcactaccagcataaatcaataaaactgactgttaccacaccagtaagtaggaataaaatgtgatagttggatagtcaagaaaagagttttgtcataatttgagacagatgctagaaatgtataagtacaaaatccgtggctagaaatgtataaatatgaaacctcagccactttatgtgttgggaaatatgtgcatttattcaataaatgcttactgaatgtgaactcgtgattatgacatctcactcatctgagaattacttatcctagaccctcaaaaactttgattcttcaaaacctaggcattaaaaaaaagaaaaacatctcgtcttgttttaggccctcattcagagcttatttgcttactttcacatagaaatgtaatatgtccaagtagccgtgtttttggccacagcaggttcaagttacaaaatagaaatgggaattagaatagtgagactacagaggcagacaaattaatgatagtagaagtgacagctggtagaaaattgtaatgaaaactataaaaagttggcaagagtctgtgataaatttttaggacaaaaatgccctcaaagggccctacaggtatcaccgtattgttcaatatgggaaccccagtttacaactagaggttaatgttatgttcaacagatttccaaaacttcaaaagtaaagctaaacacaaaaattatatcagatggctaggtgctatggctcacatctgtattcccagcacactgggaggctgaagcaggaggatcacttgaacccaggagtttgagaccagcctagacaacatagcaagaccctgcctctacaaaaataaaaattaaaaaatagccataagtggtggaatgatgctgaagtcccagctgcttgggaggctggggtgggaggatcacctgagcccaggggtttgaggctgcagtgagctctgatcatgccactgcactccagcctggacaatagagcaagatcctttctcttaaaaaataacaatatcagagacaccagtatggaaattttttgacaagttttgttaaaaaggagagataagaaatggcgatataagtggataattgataattgaatcaataaaatatttttgttttattttgtcctgttttaagaagggatacacaacagcatgttttcaggggctaagccagaaaaagaggtaaacattgatgatgcttaagagagaaatggagaattgctaaaatgtgtcctgagtaggagagaggggatggaactggaagctcaggtgaaggactgatacgggacagaggcaaagacagctcatccataacaacagcaaggaagcagagacaggagggtgacccgtggagagatgcactgtggggatttgtgcaggtacggggtaggccaccttctggaatgtcttattatctactttcagacaagttaggtcagaggatttctttatggctagctcttacacagaaaggcaggggaaggttagagtcatatttctaggttttatgactgatttagggggaaagggattctagtttctatggcctgccttgggggaagaagtggaacaggagaaaaaagggcaggagaaggccagagagagactttacttctgagccccttctaatgtcctccagttcaaagtactcagcatgctaaagtgccatactttgggatatcgctttctaagcccgaaaaatggcattgaatggtttcctactgattattcgccaatgctttgttcggggtttttcatcctgggcaccgctgacatttttggacagataaatctttgtttgggggaactgccctgtgcattgaagaattcttagcagcatccttgcactctacctactagatgccagtagcaacccccaagttgtgacaatcaaaaatgtctccaaacattgccaaatgtcccctgggtccaaaataatccccaattaagaaccactagcttagtcccaccttgttacaaaatatctagagaaaactaatattacaattcaatgattttttctctatagctaagaaaccgtatttttacactcttgaattatctgtaaataacgtcagagtttttttttattattaaaagaatactcactctttaaaagcaagtcaaatttttcctaagtatataaactgaaaagtaaaatccccactttcttctgccatttttggtccaaattcccaaagacgaccactgctagcagtttcatgttaacataccataattttataaacacaagcatatatgtcttttatcttatacaaataaaagcaaactatatatttttcaacatactttgtaacttaatgatatgccttgaacaacttattatatcagtggatatagatctacttcattttttcaaattgtttaactggttttcaaattgtgtttgtgtgtggtttccttttttgttttcttttgtgttttgttgtttaattttacttcctaaccagacattttagcaaattatttacacacttttgagactgggggcaatgatgtaaaaaaaaaaaataggtgtattgaatatttttcatggatcgtaaaaggacttcaaatgctggaaataagtcatagagtataattaaactcttagtgcttgaaaaagtcatagctgtgcggaaacattataaacattttaagtagaaatgatagatattttaatctgctccgctattgtaaccatgtcactagctatatgtatctcataatatcatgttgtaaagcttaaataaacacaatactttaaaaaaataaagtaaatctgatgcttggcagaaaatattttaattaatttatcaattacactcttactttattttaaatttaagtaaacaaaactacctttaatgcagtgactgcattgatttcagagcaatgatattaaaattttccatattaacatttaatgttgttacagaatgggggttataattttactgagttattgtttacatgagttccctagatacaaattgtaagtatttttgcatttctgtcaaaaatctgtaagagagtaaaaaacttagtttattccactccaataagtcactaagaacttagttcccaagaaatgtgtattgaaacgcttaaggttttagttctgagacaggaattcatgatttgaatataactcaggtcaaattatgtttcctcccaaaaatgataaccagccgtagcatagtcaccttactgtatgaaaagggtgcaatttactcaaaagcacattataaaaatatttccctgtacttgctctctggctttggtctttgaattacattgggacccaaataatgtcaaagagaaaggtgcaatagccgcacacaggttacagcattttttccttctctgtgcaccactcacacagaccccacgaaatgcatacaatgcacacaattttatggtcataggagaatgattcattcttagaaaaaagattccactgatatccactcaatacttgtgtctcacttggcaattggcatacgtgactgttcctctatttttccatctacctaatttcaaaggatttccagaaggaaaagaagatttaaatgcttcatttcaaatatttctgagttttgacaaaggtgccaagaccacacattggagaaaatacagtcttttcaataaatggttctgggaaaataaaatatccacatgtagaagaatgagattacacccctccctcttgcaatatacaaaaaccaactcaaaatgaattcaagacttaaatgtaagatgcaaaactatgaaactactagaagaaaacataaggggaatacttcaccacattgggcttggcaaagattttttaaataacacctcttaaatacaggcaacaaaagcaaaaatagacaaatggattatatcaaactgaaaagtttttgcacagcaaaggaaactattaacagagtgaaaagacaacctacagaaagggagaaaatatttgcaaactgtacatttgacaaggagttgatatccaaaatacataagaaacttaacagcaaaaaaaaaaaaaaaattgaaaaatggacaaaagaccttaatggatgtttctcaaagaaagacctacaaatggccaacagatatatgaaaaaatactcaacatcactaattatcagggaaatgcaaatcaaaccacaatgagatatcatctcactccagttagaatggctattatcaaaaaaccagaagaaaactagtattggcgaggatgtggagaaatgggaacccttacacactgctggtaggaaattagtgcagccattatggaaaactatggagattcctcaaaacattaaaaatgaaactaccatatgatccagcaatcctactcctgggtatatattcaaaggaaataaaatcagtatgttgaagagatatctgcactcttatatttactgcagcaccatttgcaataaccagggtgaggaatcaacctaagtctcagacaacagaataatggataaaagaaaatgtggtatatgcatataaagatatacagttcagccacacatatattcagccataaaaaagaattaaatcttatcatttgtgacaacatggatgaacctagtggacattatgataagtaaaataagccagacacagaaagacaaattctgcatgatcgcattcatatgtgaaatattttaaaaaggtgataccataatatcatagatacagagtagaacagtggtgaccagagcagagagaaggatggggagaagttggtcaaaggatacaaagttacaattacatagaaggaataaattatagtgttctattacacagtagagtgactatggttaacagtaaattattatacattatgaaatagccagaagagaggcttttgaatgttctcaccacaaagaaatgataaatacatgagatgatggatacactaactaccctaattgaatcattgtataacatagatatatatggaaaaatcaaattgtatccttaaaatatgtataattacaatatgtatgtatcaatttttaaagtaaataatttttcagtatttctgctgttgggatttaaatgtttaagcatgtttccaagttgctctcaaatttttaactaataatttaggtttgtatgtgttggagtagtttttcagttaggaaatttttttaattgataaattccttaaagtatcagtttgtttgtttgtttagagacagagtctcttctgtcacctaagttggagtagtttttcagttagaaaattttttaattaattgataaattcctttaagtatgagtgtatttgtttgtttggaggcagggtctcctctgtcacctaggctggagggcagtagtgcagttgtgaccatcagagttcactgcagcctcaaattcctgggctccaaggaatcctccagcctcagactcccaaagctgggcttacaggcgtaagccactgcgcccaacctatgaatggtttttacacaagatgagaatattcaaattaaaaactgtaattcaaaaaaagtctaattttaagtatcactaaaagcgagatgcatttatatccacattaagtgttaagttaatccatgctaaaagagccaaatgcctcatcattgtcatggagtcaccttcactgactccactgcttcactggagctccagtaggtgtttcaattccattctgagtttcttttgctactcgatctctgttaaaattattaatgtcctgctcccagtgccttagaaactcctagtgcatagatatattcagatatattaaatatttcattgatttgatcagaaagccttcaaaacatcttgagaaatatatctactaagccacacatttttcctacaaggtaagcctactaatacctgcattacataccattttgttaaacttttctatctcacctgtttgttcttgatctgagaaggaacttgttctcacctttaggagtaaataagtttactttttaaataagcaggaaaaattattcaaatgaagccatcaccttcctcattggtgtcctcattctgtgtgctctaatgcttggtgcatacatttgcaaatgcacacacagccgggaggaacacagaaacagtggcaggtagttgcttcctccaattaaacttcatatcagcaaatcattgagccttccttattcatagccaaacaacacacagtcatctaaacagagattctcagtagagagtagcctattggaattgagcaatgggtagagtagggcacatgtggtttggcatagcatattcaatattttaatataaatatatgtttgggaaaaccattcctcattctttccttaataactacaaaaaaataaagctgaaccaaatgttcttggttggtggggagccacaaaagatatatagtcttaagcaaggtatatattcacccctatgagaaatatatcaaaaccttagggaagttgtataaaatacatttgataatcaaaacttaacatagattttgaaggcctgagaaatcctgaattgatataaattctaaacgaggctgctgctggtcatgtatagaaaaaatagcttttgggtacagaaaagctgtagacatgaaagagtgtaattgaagaagcaagctaagtgatcagtatttttaaaactactcagtacattcaaataatatatttattatagaatcaatcaacaatacaaccaaatatgaacacaaaaattttaagtgacagctgtcgtaatattagcctcaacagattttgaaatctcactcttcatttaaacaaagctggaaagatgcttattcaagatctgtgtttacaaaaaaaggttaatctggttgcataagttaaaatgttgaccacttacactgtgttaaaatttttacatatttaacaaagttatatgtgcctttactatcatatttttagtttgaaatgtattttgaaaaataaaattctggctgggcacagtggctagggcctgtagtcccagcactttgggagaacaaggcaggaggattgcttaaggccaggagttagaggctgcagtgagctatgatcatgccactgcactccagcctgggcaacagcaagaccctttctccaaaaaaataaaaataaaattctagtcaaagacttgcaaaaactgatgtaccttcctgaaaccctaattttattcaaccatgtttaataccattagatgaatgtaaccacttattttccagatgatgaaacttaagctcaaaaaatttactgaaggtcacagatctagaaaggtgacaaataaaggctagacccccctgccccgctgcattgattcccaatactgagcttttttcccctatatcaggaatagatgtgatttaaaaaattttttcatatacctattacttatccaatattaagacaagcatccgtgagttataattttatggttgatgtatttacgacaaaaaagccacttttttctactttaatgtgaagcacaagatggtatcacgcaaactaggaaggtagaaattcttcatagaattgcagttgtcttttcaatggcaaattggtatctttacacaattctacaataatttttctgttaagtacttctgactgttgcactgatattagtgaatttccataagcttgataggtgaaatcaaactatttaaccttaggtcagagaaacatcagaactatgaatatacattcatgtaacaccaagttataaaatgtttacaagttattttactcagtaaggacttctttcccaaagagtaaagacaacttctattctcctattccaggaaagtttacataatgtctgcaggaagaaaaaggatggaaagctttcctctggctttttctccttcagctgcatggatgtgactaacccaggtagctgcaggtaatgaagctggcaggctgcctgagaccatcctattacactgagcacatcacataaagtattgtctacatatcagtcccaacaatatctccacaccataagccatctttttacttcccagacatttctcttggggcttccagtagactgagtcccagagaaagatttgatagctcagggatgatttttttcccaatcagcccaacagggaccactcatcccaccaagcctgaaggcatttgtatggcagttcacacctgaggctcagatagcatggactccttctattgctgtccctacatgccccatcagtctttcacttactccttcaatcaccctttcaagtaaattgccaacatgagctttttcatgtctggaatgactctgcagaaaggacacttcggagtttctcgatgtatcagttaggaattcactttcttgcaacaaaagaaaacctgacccggcatggcctaaacaaagaagcgtttatttttctcacctaaagaggagtctgagtagcctgatgattcccgggttggcattttgtaggtatctgtgggtttccttggtcttgccagcacgtgtgttgcctcatagatgcaaaactgttgctgcagtttcacacgatcatcccatcatgttcaaggcagaaagaaagtggaagacaacagccccatccatctcttgtgtcaagaaagctagcacctccaggacttcctcagcagatgtctgcccacgtctcactggtcggaactgtgccccttagacaccaagaagccggccagctgggaaagaaagtattttgctttccaacttctttaacggaagggcagcaagagagaagggttttgggaatcactgttgaatcaacaaacgaacagtgtttattatacttgggtttaaaattaataatgcatttattatagtaacaaattcaaaaaccgtgtttgccttcagcctttaacttcaatttacaaacctattttctacttataaatcttgtaaaataaaaccaatctccttcactttttagtttataaatgtttaactcaagttgaaaaaattgaacttaaccagtctcattcaagacaaagaataatgaactgttttaaacagcatcttaaatgtaatgattaattttatttgaaatacaagtggattatccctaatctgaaattttgaaatccgaaatgtttcaaactctgaaacttcttgagcactcacaagatgccacagtggaaaattccacacctgacctaatgtaattggttgcagccaaaatgcagtcaaaattgtttcatgcataaaatcattttaatattgtataaacttactatcaggccatgtgtataaagtatatatgaaacaaataaattttgtgtttagatttggatttcattttccaaaatatctgagaatgcatttgcaaatattccaaaatctgaaaaaatctgaaatctaaaactcttatgtttccaagcattttgaataagaaatacacaatctgtatttttttctttttttctttttttttttttttttttgagacagagtctcactctgtcacccaggctggagtgcagtggtgtgatctcgtctgactgcaacctccacctcccgggttcaagtgattcttgtgcatcagtctcctgagtagccaggattacaggcgtgtgctaccatgctcggctaatttttgtattattagtagggacagggtttcaccatgttggccaggctggtctagaactcctgacctcaagtgatctgcccacatcggcctcccaaagtgctgggattacaggtgtgagccactgcacccggcctcaacctgtattttaaatgcatgcttaaaaactttagaaaatccaataaaacgtattttaaatatagtaaatgtcaagttaccttaaatagtccagtgctgcttatacacttaaattctcttacaacgtaaaatcacaagtttgaacttaattgcctgttttaagttgaaattagtaggttcatctgttattccttaattgcctaattctcttaatcataaaaaacactccaaccccccaataaacacgggttattctcacattaaaatataatgccaacactatacatttgattaattttattgtctctatattctaaaatttgtcacagtttaaaatacacatatttcactttgggaggccgaggcgggcggatcacgaggtcaggagatcgagaccatcccggctaaaacggtgaaaccccgtctctactaaaaatacaaaaaattagccgggcgtagtggcgggcgcctgtagtcccagctacttgggaggctgaggcaggagaatggcgtgaacccgggaggcggagcttgcagtgagccgagatcccgccactgcactccagcctgggcgacagagcgagactccgtctcaaaaaaaaaaaaaaaaaaaaaaaaaaaaaaaaatccatttattaaggggagaattttatcataacagatcaacaagagtttcatctcaaacaagctgaggttacttttgagccaacaattttttttaccaggatatatatcttgagtttcctataactgggatgattccacctgaagcttttgttaaaggaaccccgagtgcacacccatccggggcagttgatcttaaagtacacatcccctgtgttcaagtttcccagaggaaacactttttctttgcccttatgctcaaggactgggaacctgcaaattaaaccaacaagaggctgatttgtatgcatatggcagctaactaaagtaatagctagcttgccaaacagttaaagttagaggctaatattcctaagtaggggaaagggagaggaagaaaagccttccatgggaagaaaatcatttctttaggaaggacaaggggatttttagaagaaaaaacaggagataaagtttgtgatgatgtttctttatgcaggcgcatgtagcctatccatcctttaaggatatgagtttccccagggaagggatttatgacaggtttactgtcagtctctttcctgggagtagactcacccaaaagagggaatttagggaaggattatttcccagaagtttcagattttagtcagataagggaaactctgagaaagcttctttctgcatctggcatctgttgattctcaaatgtcttcaccttaaaatgatctttgtaccaactctggggttctgagtgggtccccacacctgttaaaagataatttaaaaagaagtagaagtgaaaggagaaggaagatgaggtaaaatcatgatattcatataaatataaaataaaaatgtctcaaagacctcaaagactttaattcatttactaatgagggaaccagtaagatgttacaaataattcaaaggagaattcaatgcacacacacacacacacacacacacacacacacaccccaacaggaatactgaaataaatctgattaacacatgcaaaagagaccaataatctatggggcaataatcaatgtatctcacaatctgcatctatctgtcacatataatctgcatttctatcaacaataaatcatttgcgttactataagtattctacaacttacagagttgtaacatatactcataaaacatttcagttagcaatggaacagaccctgtatatgacagcgatcccataagattacaatggagccaaaaaattcctatcacctagtgacattgtagccattataacattataatgttataacattatattatataatgttatatataatataatgttacatattatataacatattatatatataacataacataatatataatgtataacatgttatatataaatgttataatatataacatatgtatatataaaacataattatatactgttataacattataaaagcacaattactttaaaaaaaacttaatgtaaggtctgatcttagaaattttgttattgggctacccaatttacagcctttaggagtcataaatatgacaattccaacactaaactattcaaaagttggcattccagccatacctgaaggaccctattcaatgcaactggtgatcgttcacattcccataacaatatgttttcatattttaccccatatcctgacagttccacatgtagagatattttggaaaagctaccagggtacaggggtgggggacatttttaaattgttatatacaatccctactgtcttataagcagatctaaacacctacctgtggttatacaaatatttggaagaagactaaattactctgcatgagaaataaataaaagatacaggagctgagggcagatccaaaccttgagaacagtggcagccagggaggctggaaactcagtgctggaaaagctgaatccttttcatcctccaagccagagagactccatgacaactgtcagtctaaagaggatagttaagataatttgtactgaaatataaactctgttgtctctcaccctctcaaaattgtcaaccacttaaaaaaaattgtgaaccactgaaatatttaggctggttcaggactaaaacagcattcagggcagatggatagctgggttacacaacgagagcatgtttacttgctcttctaggaactattacttctgtaactctttgggcatacttttccagagggactcaatatcattttttctattgatttgtgttattgcactgtgaattattgctgttcttaaagatatggttccatgctaaaaaggaaatgctttttgttttttactttcccaacgtttccctataaacatcacttactggccccttgcctttctacttctgttcctaaacaattgagttctaaagccatttggtggatcagaaggaggtatttttctgtgttgagtgtgacagagtagtggtccagagaagaatttcggagttccactggggtgagaagggcatccttagagggggctggtgcctggtcctaaacagggtggggagagtgctcatgtaagtgagagtctgcactgagtaaggcgaggagagcatccatgcaggaaagaggatctgtcaagataataaatatattaagttaatagaaagcaagcttctctcactgtcaggaaagggagtaacagatatgtaaagggagaaaattagactgagcctgtagtgttggataagaactggagatgaactcatagttttcagtattagaaatatacagagaaattaatacagatggaaatgtgtgtatgtatgaataaccatacatatatttcctagtctgtccactgagagacctggtggcagtgatactccactatcagtgagcttaccttgtgtctacatcttggcttctaaataccattctacccagagaggacccagagctccttagagaaatggctagttacagggctatagcagggaaaatgcaagatgatcctgaaacatcttgtagtgccagaaagcaaggaagagtgctcaaaaaatgatgcataaatattacaaagacaccaaagctaggttaaaagagttcctactggtccaatttgagacaacttgcacatcagaatacataataataatcaacagattgtaacccattgaacaaaataggaagccataagtctacctgatagaaataagtaaatgaataaattaacactttgatgaggaaagggacttttgcagtttcaaagtacccctctacaaaatatgtattaattacaaaggaatttgggtgaaaccactaatggaaaaaattaatatcttgtactacctgacaggttgaaatgagcatcacttgtgtgaattttatgccaaagatgcataacctgaatctaattatgatggacatcagacaacccaaattcaggaacattctacaaaataattgacttgcatttttcaagggtcaaggccatgaaaatgaaaagaggctaaagaaatgtgacaattaaatgcaaggagcgattccaaaccagatccttttactacaaaggacattttgcaggggcaatatataaactttaatgggttctgaggtttaagtggtagtaacaactccatgttaaattcctgattttaatggttctatttacataggaaaatattcttgtttgtaggaaatactaaagtatttaagggtgctagagcatcaggtcaaaaacttactttcaaatggtggggtggtggggaaatgttctttatccaatacttgcaacttctcagtttgagattatctcaaaattttaaaattatctcaaaattttttttttgagacagtttcgctcttgttgccgaggctggagtgcagtggtgcaatctcggctcactgcaacctccaccttcagggttcaagtgattctcctgcctcagcctcccgagtagctgggattacaggcgcccgccatcacacccagctaaccttttgcatttttagtagagatgaggtttcaccacgttggccaggctggtctccaactcctgacctcagatatctgcccacctcaacctcccaaagtgctgggattacaggcataagccaccacacccggcccaaaagttacttttaaaatatcactttaaaatatttaagattcctgatatagctgttgaatcataatgttatgaaaatgtagaactaatttcatgataccgagaggtgacagcgtgctggcagcccttgcagccctcgctcgctctcggcaccccctcgccttggcgcccattctggccgggcttgaggagcccttcagcccaccgctgcactgtgggagcccctttctgggctggccaaggccagagccggctccctcagcttgcggggaggtgtggagggagaggggcaggcaggaaccagggctgcgtgcagcgcttgcaggccagcgccagttccgggtgggcatgggctctgtggccagcactcggagtggccggccggcccgccagtcaggggtagtgaggggcttagcacctgggccagcagctgctgtgctggatttctcgtggggccttagctgcctccccgcttggcagggctcgggacctgcagcctaccatgcctgagcctccctctcaccccgccttgggctcctgcacagccggagcctccccgacgaccatggccccctgctccagggcacccagtcccattgactgccctagggttgagaagtgtgggcgcacggccgggactggcaggcagctccacctgcagcccctgtgagcgatccactgagtgaagccagctgggctcctgagtctggtgggcacttggagaatctttatgtctagctaagggattgtaaatacaccaatcagcactctgtatctagctcaaggtttgtaaacacaccaatcagcaccctgtgtctagctcagggtttgtgaatgcaccaatcagcactccatatctagttaatctggtggggacttggagaacctttatgtctagctaagggattgtgaatgcaccgatcggcactctgtatctagctcaaggtttgtgaatgcaccaatcagcactctgtgtctagctcagggtttgtaaatacaccaattggtactctgtatctagctaatctagtggggacgtggagaacttttgtgtctagctcagggattgtaaacacaccaatcagcaccctgtcaaaacagaccaatcagctctctgtaaaacagaccaatcggctctctgtaaaacggaccaatcagcaggatgtgggtggggccagataagggaataaaagcaggctgcccaagtcagcagtggcaacccgctcgggtctccttccagcttgtggtggctttgttcttttgctcgttgcaataaatcttgcagctgctcacgctttggattcacactgcttttatgagatgtaacactcacctctaaggtataaagcttcactcctgaagccatcaagaccacgaacccactgggaggaatgaacaactccgaacacactgcctttatgagctgtaatactcaccacaaaggccttcagcttcactcctgagccagtgagaccacgaacccaccagaaggaagaaactccaaacaaatccgaacatcagaactctagactcgctgcttctaagaactgttaacactcaacgcgagggtctgcggcttcattgttgaagtcagtgagaccaagaacccaccaattccggacacaatacaatcattgaggagctatatctgccactaaatataaattttaaagactggacataaaaagataatattcagaaaagttatgtggagaagaatattcaaaagagctgcatgaaaacacaggcaggtatggccagttaaaacatcttcaaagtagctgtagctggaggctaattcattaaagaatttttcttaaaatcttggtgtttaaagtgttcttaaaaaattaataaagatataaaaagttagtctcaacacagattggtttatttgtatgcttgagatctctgaaatacgtgatgttctgccagtgatggcctttttttttactttgttttaaacaattggttgaaaaaagattaattttgaataatttcacaagtgagaacattatttgtagcacagctcattattatatagatttgactatgtccttcatcaaactatgtgctctgaaatgactacgtacaaagcctttcatacatggattgcttctctctatgagaatgttaattgccctgttattaagaagtcccgctatacttcacaaaggaagtagtcacttttattttttcatgctttgatcattgaccccaaatacatttttacataataagcttttaatgattattcaaactattctgttcttatttcttcataattataagtattctagaaagttccaaagatttacaaacttggtaaggataatgggagcataactgtactgggagtctacagatatctttgaaattatatgaatctcagattttaaagtgttatagttaatatgtggccaacacaaaaacctgcacacaggtgtttatagcagcttgttcgtaattgccaaaacttagaagcaaccaagatgtctttcagtaagtgagtggataaatatatattagtaagtgtgagaagccagtttgaaaaggctacctactgcatgattccaatgacataacattctggaaaaagaagaactatggagatagtaagatgttcagtggttaccagaggacttttagggcagtgaaactactctgtattatactataatggtggatacgtgtcattatacatttgtccaaacccatagaatgtataacatcaacagtgaactccaatgtaaactacggactttgactgacaatgatgtgtcagtgtaggttcatcaactgcaacaaatgcaccactctggactggggagagtgttgatggtggaggaggcagggactatatgggcactctctgtaccttttgctctattttgctgtgaacctaatagctataaaaaataaggtctactttttaaaatggcattgttgcccttcaaagtcagaataggatggttatgtgaaacgttatcaaatattcatacctttcaattgtttatggaacaatttttactccttaagtttgtctcctctaattttactattcaacaagtaattttcagcatccctaaccagagatacaaacaaataacgacaagggctttgtttacaatgagtgttcttttttgttggtggggggtggggataagattaaagcattcgaaacaattggacaaccaatatgtgatgaaatttaattaattgattgttagtgtagatgagtgtgtctggtgcaaagaggttaaagtggactgctttttgaagtattgatagttttaaagttcttatagtgctcttcattctattaaatgtttatttgtaggggtataaatatagcaaatcagataatatttcaaaactttaatatttaaattagcttggacactcaaacattctttcctagaaacacaattgcaaataatgactaatttttcttcaaaaaaggaagtaaaagaatatttatctaataggattagaatctcacctagatgcaagccaataaagtctgagtcaggaattccaacaaggctggagcccaaatttcaggaggaagtgatagtgacgagggggaatggtagtgatggagaaggagttccaggaatcggggaaggtataaaaaaccagaatgggacttctggattgaagatggagtttgaaagtgttgaagtgagtgagaaagtattgagctgagttagaaaactcacatggtgaagctcttgggtaaggatggaaatgaaggcaaatgagctatctttattcttgcaccctacctttcccccagagagtctcagtggtggcactgccatgcttccagctggtcaagccaattcagaacattctgtccatttccattctacccctaaattacatgtcaaatatgttcacttctctcctctccactggcgccattctagactaagcctcatttgtctattacctggagcactgcaaagtttcctaatcagcagcccagctttccctcctaccctcccctcaagtctcctacccaatggcactccatcccagtagccagaattatatgaccaaaacatacctgtttcctaattggccccttggcttcaaattcttcattgattcccctttgcattttaaataaaacccaaacttcttccctttgcccaaggatacttctctacctcatcaacctcagctcatgtcacttgtccctgctcactgggctccatcaccacaaccctcccagagttccgtaatcctcagcctgaagcctcttcctcaccactttaactaccaccaccacttccccactcctacctcccctactctcatgggtgatttccttttcttcctccagatctcagcttaaatgacaccattttacagcggcctccctctaactaccccttgtacaaagcaccagcacacagttattttccattacatcacctgttttctttctttttggacctctccataaattgtaaatatttattaacttgttcaatgtatcctccctgggagatggtaacctcccctagggcaggaactctgtttcattcaatgatgcatgcataaaatcttgcacagggccttacacttagcaactatccaatatagaaatgatcacatggcacctgctttcctgttatcctctatgtcttcttgtttctccaatactaatacaggagttattaagaaattattttaggcagttagggtaaaagaggctgggcgcggtggctcacacttgtaatcccagcactttgggaggccgagatgggcggatcacctgaggtcaggagttcaagaccagcctgaccaacatggtaaaacctcgtctctactgaaaatataaaattaggcgtggtggtgcatgcctgtaatctcagctactcaggaggctgaggcagaagaatcacttgaacctgggaggcggaggttgcagtgagccaagattgtgccgtggcactccagcctggacgacaagagtgaaactctgtctcaaaaagaaaaaagaaaaaaaaataagaaatggtaaaacagtcctcggtggaattttcctttaataaaaagcagccccaaaccatttcttttctaacagaaagcagcctgaaaagtcaagctgcaagcacagatatgcaagctggaagctttcgtatgtaaatgtcagcagctgtacctggaagccagatacattcaatgtggcgattcccgctcccttttccttatcaccatgtgtgtgggtatcacagcactggccaggtaaagccatgtgtgcaggtgtcagggtgacagccaggtagaagccacatttgcataataaaagattagggtgggagggccagtcttttaggtctttttgcaggctatgtaaatgacacacctggtgaaaccaatcccctgggctctatgtaaatcaatcaccgcctcctcaagcctctgtacaaaatcaatcgtgttctgccccaaaacccggaaaccctctcttgggccaccggctttctcatcatgaggaaactttttctctcttcttttttgtctattaaactttcctctccttaacctactccacgtgtgtgcccgtgtacttaatcatctcagggtgagacaatgaaccacaggttttccacagacaatgaagtcgtttcaataccagaccagccttgattctgagcccatagtaagaatacaacaaattcctgtttttaaaattattggctgaaaattgtttgtagaagacggtaattggattgaactgtgaagtatgggcagacgtttcatagaagagaggaatggagaggcactccgggtgggaaacagcatgaacaaaggcaaagaggaaaatgttggcatcttctggaatcatggaaagaacgtcctaagaggtgaaggttcctagaaaataactggcatcagggttgtatgtagaaaccatgatgagaaagacaaatgattataaaatatcagggagaaactgctctttgccacgcctttgtattaaccaccttcaaactttgtgtcttctccccttttcctcagtttctcatgggggtggacaggatgtcaagtgctcccttggctatttcccctgtgggaacatcacaaagtgcttgcctcagctcctgcactgtaacggtgtggacgactgcgggaatcaggccgatgaggacaactgtggtgagtgaagcccctgcagtcacggtgagagaaaggagcagaaaggactgaaggtgaagtcgctgagacttctctcaacaaaaagacaaaactaaattgaaatacaaaacatatgttgcttaaggaaatcttacacttatttcagtagcttaaaatatccactcttttcttttcttgtttttgttttttttttgagacggagtctcgctctgttgccagtctggagtgcagtggcgtgatctcggctcactgcaacctctgcctcctgggttcaagtgattctcctgcctcagcctcccgagtagctgggactacaggtgcccaccatcacgcccggctaattttttgtatttttagtaaagacagggtttcaccgtgttagccaggatggtctcaatctcctaacctcgtgatccacccacctcttcctcccatagtgccgggattacaggcatgagccaccgtgcccacccttaatatccactcgtttccatgtaatggtatcacagccaatattccaggcgagtggtggttgctcacagagtaagttttaaccaagattgtccaacccgcagcctgcaggctgcatgcggcccgggatggctttgaacgcagcccaacacaaattcataaggattttgaaagcattagattttttttgtgattttttttttaagctcatcagctatcattaatgtaagtgtattttatgtgtggcccaagacaactcttcttccaatgtggtccagggaagcccaaagactggacacccttgttttaacccaacaaacctgcccaagtaaggtgttagaggcagaatacggttgaaattgagaatacgggctctggagccagactgcccaagtttgaacctgggtatgacgataagcaattatgtaagcttgagaacatttcctagcctctctgtacctcagtttcctcatttcataaaagggcatggtaattgtgcctatactctaagaattcaggaagattaagggtacagaattagaagagtactggacatctaggaggtgctgtccaggtgttggatgctgttgccctttcttatcttttgggacgaaaagtgagttcttctaaaagagacaaaacaaacaatatgtaaatacaacttacttcctacttaaccaacaaccatacctctggatttataaagccagtaagtagggcttctggccaatttgaatatgggaaaatagctttcagttagaattttgttcaaacttctgaagccttgaaaatacaaagttagaacctgaattgtttggatctgagtcactgggaaaataaacttcggttaataatgtaaagtagtaagatttctcacctgtcaagaaataaggtactattttgggaggactaaaagatgcataacaatgctattatgcaaagtgtcacataaataatatatgctaatgaggccttgctgtgatcactcccccaagtatttcaggctttttaagaaaccaccttgaaggaattaagtttccgttaacataaaataagatgaacacctggcttgaaaatcctcctacttgaaaaaaatcagctaggtcacacaagcagaccttaactgagctaatttcttgaatgtaactgaaacttaggttgtttcttgtaaatgcctctgataatcacaaacaaaacttaaattgtctttctaaagtggtataaggtaaatcacttttaaccagtccgctatcacctggaaaccccgttgtaataaccagtcatggaaaaggttgaagaaattcctcattttcactttatgagcaatcctataatacatgcctctgagctttcttactgcctgggctgaaatctccctgatatcgagctgtactttctcttactgtatgataataaacttttaaatttttataacttgatctgattttatttttgccacttcttagtttgaaacactatttctatgtgatggcagtaactcaagtataaccacactatctaaactagtgagcttaagctgcaattgtatttgatttggatggctataaatacgttttcatttatttaaaaaaaacaacgtcttgttaaaataaattaatattacataattttttaattagatgaaacagtgttttgcccactgctagtcagttccccgtcgacctgctggcagttcaaatagagagttctagacagagcaacaggaaaacttcactccaattaaaatggcagctggaagcaggaaaggaacgtggtgggagtagcaaatttaccagcaaatgtagcttctcagtggaaaaaaagcttgggaactctagctttagtgctaagtttaaagaggccaagtagcaaaagtagcaatccttacagtaataatccttaaaatcatgcaagtttctcaggattcaccaaaaagcacatttagacagaggcaatagggcattggggtttcagagagaagtttagaaatcagagttaaactctagctataaagggaggcaaaaaatggcttgttttcttttctataaaacaggaataataagagtatccatgttcatgggttgttaacaggattccatgagataatgtatccgagatgcttagcagagtacaggtgctttggactgaatgcttgtgtcccccataaagtttatatgttgaagccctatcccccagtgtgataggatttggagatgggatttgggggatgtaattaggaatacgtgaggtcataagagtggattagcatccttatgagtcctaagggagcttgcttcatctctccaccatgtaaggaaacagcaagaatactgctgtctgtgaaccagaaagtgggccatcactagacatgactccaccagcaccttgatcttggacctcccagtctccagaactatgaaaaataaatgtttatgtttaagccacccaatctatgatacttagttatagtaacttgacctaagacaataggacatgaaattagcactcaataaatgttacctagtgttatcagttagctgtaattatattacaaacatagtggcctaaaacgtaaccatttatttagcttatgattcttggggtcagcaattttggatggactccactgagatcagctaggcagttctggtctcagctggattttctcaagcacctgcagtcatctgtggatcagctatgccatgatgcctgggaccttgtctgtgtccttaattcaccattgccaacgtttgaaacctctcaagtccagttttggatatctgggaaagatcataattcactcttataaagacatgtctatgtaaaaaataactatttcaatttgttactgatcttcttatgccagaatcacataactttcttgaaattcacctagaccactggatctccaaaagtagtcctgagaccaaattcatcaacattacccaagaagttgttagaaatacacattttggccaggcccagtgactcacacctgtaatcccagcactttgagaggccaaagtgggaggattgcttgagtccaggagttggagatcagcctaggcaacatggcaaaaacctgtctcaatattttttaaaaaagaaaaaataattattttaaaatatttatataaaaatttaaaaaaagaaatgaaaattctcaggctccatcccagacctattgaatcaaaagctctgttttaatatgagcctcgtgtcattctaatacacgctaagttttgagaaccatgaacctaaacccaatgagcagaaaatcaggaatgcatgcaaaatggtagcaacagcagagatacattagaatcaagttttcaatatggtacacaagcattctaacttgctcacaaactccattattatcaattatctacaatttttagctcctctaggaaaaccggtatgctagtagtggcagtcatctagaaatagaaaaaaaaaattaattccgttcaaaacctcaaagatgcccagttggcatgctgctgctgtccatgcaaaaatagactggaactttccaggaaggatggcagaatttcatcaccatctttagagtccaggtgatggaaaaattatgagatgcagttatttctgtttgtctctaattgctttaatttcccttgcaaactgagtggttttttccttcattttatagtatctggatcatttatgctcccaaggctgttcttttcttcttcttcttcttcttcttctttcttctttttctcttttgagacagtctcattctgtcacccaggctggagtgcagtggcgtgatctcagctcactgcaacctctgcctccaggattcaagtgattctcctgcttcagcctcccaagagctggggctacaggtgtgtgttaccatgctcagctaattttttgcatttttagtattgatggggtttcaccatgttagccaggatggtctcaatctccagacctcatgatccaccagcctcggcctcctaaagtgctgggattacaggcatgagcccaccgcacctgatcggctgttcatttttaaaacatccatatgtaaattctgtttaatactaattaaattaagtcagaaagttgcttcttttcagaatatgtaaacctcatgcatattttccgtcatgtaaaatacaatatcttaacatacaaatataagaaaaccccataattaaaaatcatttttagagtaataacttacaacttaatagtatattgtcaaataaaataccttcttttaatgaaagagttttttcttaattagaccttttaaggtatatcttaaactccaaaaacctctcccttattctgtcaagctatttaaaccttgacactaataataattattaaaatggaaaaataagtcaaatggaaattgtagaaataaaatttagggatatcgctgaaaaaaatgaaacaccaaatgaattaaactgagtctctatatttgaactaatacatgaactaattatatttagaaagaactgtcacttttgtgttatcgcaggcactttaaacaagtactcttatttagtacatattaaggtcccagttttctcagaaaacccataaataattaatttccctgtaattaaacactttattaagtataaaaaataaaatatttcagcacaaagagcatgacattaactcagtgaagattttttgtgaacacaatgcaagcaaaatcaatagatttaaaatttttcagttgaattcatatgaatccttttttctaaaatatttacacaatatggaatttacatgtatacagacatacatatatcaaaaactgattacactatttttataataactttgatccttactggtgaacttcagtatagaaatgtatagatgtttcctgagttatgcaattttatatcattcccatataattccatttgtttttttgccatgtgtcactaaaccattcttcatctctgctcagaactgtcacagacacaatcaaacagcataaggaccaaaaaaatttttttaagtcatcagagcagtgtttgatgtgacaatgacaaacccaaaaggagggacctttcagtttttcagctagaactatgatacctgagagaatacatctgggtaaataacaaaggaacctgataacaaaaagttgagggttcttctttaggaatcatctgtgttcattttcaaatgagtgcaagctcagtagtaaaaatgttaaaggaacatcaaattctcagatgctgttaaattagttcacttcctctagatttgtatttaaaagaaactctttacgtttctagattagaatttgctctagcattccttctgtgttataaacagaaggctgtgctaaataagggctccccctcatggttacactaacccaaccttatctgagagacaggttgaattactgtaactgggaagactggctttctggtgcctccctactgtactcttgttctttagcactttagcagccttgtctacaggaaaaggataaaggcctttgtcagtctgtttacatattaccaattctataacccataggggaaatggaaaacctcttctaatacattttgggtcgtgtagtgtgttagtatctgccaaaaattaacgtgcaaataatgtgaccttatttggaaatagggtctttgcaaatataatgcaggtaaagagtgacatcatactagatcagggtgggccctagatccaatgacagtgtcctcgcaagagacaggaaatggcatacagagatgctggagagaagagggctgtgtgaagacagaggcagagactggagcgatgctgccacaagccaaggaacaccaggagccatcagaagctgaaagaggcaaggaaagattctccccctaaaccttctgagacgctgtggccccactgacaccttggttgcagacgtctggcctccagaactgtgagagaacaaacttctcttgttcttgtttttttgttttgagacagagtctcactctgtagcccaggctggagtgcagtagcacaatctcggctcactgcaacctctgcctaccgggttcaagcaattctcctgcctcagcctcctgagtacaggaactacaggcgcatgccaccacccccagctaatttttgtatttaatagagatggggtttcaccgtgttggcgaggatggtctcgatctcttgacctcgtgatccgcccacctcggcctcccaaagtgctgggattacaggcgtgagccaccgcagcctgcccaacttctcttgttttaagtcaccaagtttgtgggaatttgttacagcagccctggggaacaatgcatgttaggacagtttgtggagaagggccatcttctgtgggcctaaagagacattattaaggtcgacataaagttctggtccagattaaagcaagccttagaatttagtcttagtggattttagacagaatttccaatgagctgttcttacgcataattgtatgtggtataaaacctcctaaagatgattttgcttcactgttcacttgcagttctgggttgtgctaaacttgaaccacatggtttttaccgggtgttttgtactcttttatgttatggtgagtcaggtatggctacaagagacaccagggaggctcagaaacacaaaagtttattattcccacaggttctagagacaggaggcagggcataccatacagggctagatgggaaagacaccaggatggtcaggaggcagaagacgggtgagaggggaggcatcaggccagagcctttattggggtttctgagggaaacacaaggcagtgcagggtgagcagcttaagatgtgctggtttgaataattttggagggctctaaacattagcagtggtccttacttcccagctacctggccctaggataatgaggaggaggactattgcctccggggtgtgtgggctaatcagaggagctctaggtctggattggttagtttgcatatcaaaggcatgctctgagcaccctttgctctctaagaactgacaagccctgggaaagacaatctcttactagcctagaaaggttttttaaaagatgttaaatatcataatatacagaaaaaatgtttaaatgtacaatataccaagtctttcttgagttcaactttgccagcacttccctccctgcctcccacttctcaaatgtacacagaaagttgcggcaacaaacaacagtaagtagagagtcacctttaccatgtagcaaaaactgccctctgcctatgaatgcttctctgggaagctccttgaaagtatgaacattttcccacgtaaagttttctatttcagctccttcccaatgtgatcttaaatgctttgccttccctccccactgcggcggactttgttgtctgttagtaatagtttactttgcaattttgccattcactgaatattttaggtttgaaaagacatcttatgttctaggtttgtctatgcatgactactttttttattattatttttgagactgagtcttgctctatcacccagactggagtgcaatggcgcgatctcagctcactgcaacctccgcctcccaggttcaagtgattctcctgcctcagtcttctgagtagctggtattacaggcacctgccaccacacctggctaatttttaatagagacagggtttcaccatgtggtccaggctgctctcgaactcctgacctcaagtgatctacccaccttggcctcccaaagtgctgggattgcaggcatgagccaccatacccagcctgtgcatgactatttgtgacactatattctaaccctcctaggaatatttggttttgtctaataagagttgtaataataaaattaatagtgtcttatatttttttagtatttattatgtttcagacatagtcctaatcctttaagcacattctctcattcctcctcactataaattagatatgatagactatttccattacacagggaaggaaaatggaagtacagagaggttacataactcttctgacatcatggtttgctcagaattcataccaaatgcttggcttgttctgttttgtttttgtttgggaggaaagaacatgcttatgatgttaatcattgtgtagtagggccttcaaacaaatctcttattgataaaatttgaattctatgaagtcttccctttaaggattttggttttaaaaaggtaaattatttttaactttctttttaaaatatataagagattagatgaacttccaaacctaaaattgcaagtataatagtatgaataatgagtagtatttttatagcagtttccattttgagtgctttatacattttacctcatttaatcctcatgacaacccaggagaaagggactgtttttgttccctttaaagatggagacattgatgcactgcatcaatttcatccaagtcatggatgtctgttttgccttgttataaaggaatagttgtggctgggtaatttatgaagaaaagaggtttatttggctcatggttctgcagactttccaaaaagcagggtaccagcatctgctcagcttctgatgagggctcaggctgcttccactcatggcagaaggcagaggggagccagtgtgtgcaaagattacatagcgagagaggaagcaagagagaggaggggaggtaccaggctctttttaagctagctctcttttgagccaatagagtgaaagagaagtcgttcaccctcaagggacagcattaatctattcatgagtgacccacattcatgatccaaactaggacccacctcccaatactcctaatactaccacattggggattacatttcagcatggggttgggtgggaacaaacagccaaactatagcagtagacatgacaatcatttcaagttctcaagtgagtgagaaatgtaaatcttcatttttctatggccaaaggtaatttctgctacaagggtccattcttccaagtggtagaagtctaaaccaaggcagttaaaggtctgattcatttcccttcacctggcattgcagttgagctcagcagtctctgtggtgccaggacattgtgtgggggttctggttgcctgttgtcagctgatgatggcagcatcccctcagatgtgcataaatccatctggtcctctgccgtaagtcaccactctgtcatctcctgcctgtcttaggctctttcacatccagtgcctctactgcctacatctgcagcactctggggctcacaggaaacatttagtacacctgaaccaggctgagcccaggagaattctgatgctcatattgaggtccatctgactaggcccttatggacatgactactctactattgctgtgtgaagccagagtgtgcaataattctgtgggacctgacatacatatggtctgtacttatcaaaggacaccatgctacccctgtacccagagcccataaaccaatatgggaaatgtgcggcttcccctacattcacccctaagaggagggaaggaagaaagaccccttcactcttcttggtgcaagtatatttttcagtcctggtaaacttaagctcaactctcgcctctcctggtttacctctctatcgcgactgatgaaatgggagtgtttaaaaatgaaatcnnnnnnnnnnnnnnnnnnnnctgagccaggctgagcccaggagaattttcatgctcatatttaggtccatctgcctaggcccttatggccatttctcctctactattcctgtgtcaagccagagtgtgcaataattctgtgggtcctgccatacatatggcctctacttagcaaaggacaccaggctacccctgtacccagagcccagaaaccaatatgggaaatgtgtggtttcccctagattcagcccaaggaggagggaaggaagaaagacccctccactctctctggtgcaagtctcttgttaagtctgggaaaagcaaagctcagctcttctcttttttggtcttccatatctattgtcagtaatcaaatttaagcatttaaaaatcaaataccaagaaatttgactaccttattatctgtaaacttctgtctcatccctttcaggcaatgaaagtggttaattctagctgcctaggataggaaaaggagcagaaagtgcaaggaatttaagagaaggaaaactttgttaatgccccaaagtatttttcctgtcactggcttggcacttactaatccatgagaattagataagcagtacttatttatgggtgtgatggtgatgatacatattttcaaatcagattacaagaatgtttgaagtatgtcaagcagttttaaaattttcaattggtcctgtgtttaaaattctggaacattaattattccattatttcccaagtacaacttactatacagctatcagaatgatggcaatgccaggtggtttgatggagacattagcggttctcattttagaatattccactaaagttggtggtttgtcttgttttcaagttaaaaacacagaaggatacacatcacatgcctgtatcaaaatatcttatatgccccataaacatatagactgaccatgtacccataaaaattaaaaatgtaaataaaacacaggaggaaaagtgatgtgtcataaatatgtgtattaatgcacaatcatgcattgtattttcaaaattttctggttttctatttattattctcaaaataacattgcaaatacctaagtagctgaaccctaggcttttctgaaaatacagacctagctttaacctcaaatttgtttatttgtgttttatgatacttaaactatgtatggcttaccaccacaaagattttcctctcagaacacttccttctatatggcacagaaaaggtaatttgttagtggcctcaatttcctttaaaggatgcccaggataatgtcacatcctttgatttccataaacagttgcctccaaaaggtattaagaccccagaaagaggtatatgtattctgtccctcaaactgctgttgtcattaaattcaaagaaactccacacagtttgatgaattgctctgcctggccagcctgcattccagcgtttactctggtggcctagggcacctctgctcttgtgggtaataacctcattttactttatgagcaaaagatgttccactgtgttcgaagaatgagtactgaaagttgactaaatacgtgagaatcagaaatgctccactttagggccagacatggtggctcatgcctgtaatccgagcactttgggaggccgaggtgggtggatcacaaggtcaggagttcgagaccagcctggccaacatggtgaaaccccgtctctactaaagatacaaaaaattagctaggcatggtggtgcatccctgtaatcccagctactcaggaggcagaggcaggagaattgcttgaacctgggaggtggaggttgcagtgagccaagatcatgccactgcactccagcctgggcaacagggtgagactctgtctccaaaaaaaaaaaaagaaaggctccactttgcataaatacaagccttataaattaaccacttatttattaatcaataagcatgtacacttattaaactatcacatttagcctttcattttcataaatgatcataccatttaacatgacatcatcacacactctgttctggcctctgctctgacagagacataagtccctcaaccaaacatcaagggagcccaggagtgaccctgcaaatcgacaggaatgtttctgaggactacctgcatctgagccacctggggggctgtgaaagatgctgagtcctaaccccccaccccagaaatgctaatctaataagtaggagtaaagcccaggaatctgcatttttttaacaaataccacagatgactatcaaaccagtttaagttttgaaataattcatatgccaatggagacaattttattatccaattcataacacctagaaaatgattagtctaaatcagaagtttttaacgttggcagacatctaatcacttggaaggctcgttaaaacatagattgctgggctctcaggttgcagagtttctaattcggtgcatctgaagtaaggcccaagaatttgcttttctttcaagttcccaggtgatgctgctgctggtcccagatatacacttttgaaaaccactgatctagacgatctagacagtcttcttgtgcaaatgcaaaagcaaacattttcaaaatgtactaataggtgtcatatggaaagagttaaacaaaattaaagctatttctttattgcctgagttctcatttcatcataccagcatgcattattaattccaagtggggatagaggatgcagcatttcccaaacatatgttaccatagaactctcttctcaaggatattcctgagaaactatttcagaaaagcctgataaagcactgtgacaagttaatgcatccaagaaacttggaagtttcctgtccccaatcaaatctcatcctttgtcctcatcccccagtgccagtgccaggggaatctaacaacatggggggagagagatgccttctccagaattcaaattggtatgcctcacccacttttccataaaactaaattataactaatacttggtacaaatgaaataatgttcatgcattttatgtactttaaacactttatgaggactagtaagagctagatttcaatgatattaaaagtaccttatgacattttgagctggatgataaaagaaaaaaaaagataaaagtaccttagtagtcactgaggtatacaaaaatacataggtaaaaaagattttctactatactctcataaggagataaaatatatacatcaataagcatagcatgaagcagattacagtaagtataataagaccgttataagcaaaatgtccttaagttggggaccacccacattaatcttatttgagtgtcttaaactacttgatggtcgacatctagcaactttgcttaaaagcaatacactccgagtcacaggatttttctgtgactaaattctagctgtcctccaatgcaatgtgagaaggaccctagttgactatggcaaatcccataatgcagttcttccaaaacttgctttaagactaacctaggccacttatgaaaaatatagatttcccagactccatgctgaccaaataaatgagagtctccagtggagaagcctgtaaatttgtgttttggataaatgccccagctctcagtttttattttagcataagagagactgagctttctctgaagtgtctttaaggacagaaatccaatcattcattcattcaatcaacaaatatttagtaagctcatgcagcatgcaagatcagatttttcttaatctatgtttttagactttatttatagcatgactatatcatttttagctgaaaagctcttttttagtaaaaatatttgttttattggtgccatttttacaacactacccatatatactggaaaccatatcccctaacccaatattctcttctgtgcggtgcttgttccactaccctagactgcctcgagataaatcagagaataaatttcatcaggatcattactgaagtatgaaaaaccattttgatcactgccctatacatccttaaaatatgaaggacacaggatttaaaatatagaaacacatataccaaaagctgttttctttaaaatgctaactctccaactttgcaattttggcaacatttcccatgttctatatttctgctttctgccttctggtgggaggaagtaatgggtagaaagaggaaaatactttggaaaggcagaaagaaaagtaaaagcttattactaaaaggcttgtttgtttgatgatgttgctatttaatgaacacaatggtgaggacaaaggattaggaaattgcacatagcccatggttttaagcatggcattatctattaatggtaaaaaaaaaaaagaaaatcagcaaattgaaattgtctatttgtaaaagctcagttaaatacaggatctgctaaagaagccgagtgaaagaaaatcagcatctatggcagtcacccagccacctctcatgaatttcctagcagcagtgaaacattacccacaaaacagccctgtgttctgggatgctgtcacttcacctaatttccatcactgatcctgaggtaggtggatgtggcagtaacaggaacatgaacgtggtgcacagagtgaagcgaggccctggtaggctgcaaggtcgaagccttcaaaccttcacaagcccatttctcactcaccttctgcagatatgcatgaagactgtttatatgaatactcaaagcctcaacatactctggcctacctacttacatgctttatttgtaacatcgataaacatataaccactcataacactactatgtttttggtaaattgtttttagtaataccttgatttgcaatactttcattgatttcataaagaaaaataatgtgaatttaaattccagttaataacaacttctggttgttatttaaataaacttttttataattcacacaatactgatgtaagagcctcaataacagaagtgaaacagacaacagaaaaataagcagcaaatagtaatagctaaatacttaaagctgatgtcccacaaaaggtgaaattctatagatagaatgtaaacattacataaattctttggcctagaaaagaaatacaataataatttatgattttaattgtttagttatttttaataaatctgtttcttagtcaggtcacctaaccttcttcagtatcaatttttctatctgcagtatccattcttctatctgggtttctgcttatatatatctgtaagtggagatgatgataatgaccaaatgtagttatgaggataaaatggagcacctagcacaacatgatgggtacttgctaaatatgacttctttcagggctaaatgctagcattcagcctctcttaaaaggggtgaatgaaagtctctcaaagaattctccttatctaaagatatgaaacaagtttacaaaagtaaacttgccaaaaggtcaaaaaactctgcaaaactaggaaaggaagacagtccaatgccataaatttccaaaatctcaaaacctgacagccaaggaaatatatggtgattccggagcccagtagaacagaacattttgtaaggctcctgatcccatccccagaacccacgtgactcttttttttaggcaaccacaaaattaaactacactaaatttatgggttcagaaaaaatgcactgctttttcaccctcatgagattccacttgagctccccaaattaactaaatgtctaatcattgttccgccgtactttaatccaatgattcagtcagcctccccacatctgtcattgttaaatggaaaaaaccggaaactactctaggtatattagacagaaattaggtaagcagaatcttctcagaagggctggaagagtgggtgtaaacaaagttgacatccatgctgttggatccatcatggctgcgactgacaacggagacagctgctgctcccgcccccaacacagctgcctctcttgacacccacaaggctggtagtacctgaaatccccttccacaattgctcctatgtttctgttttagacagagcagcaaacaaatgaccttatacctctcttctaaccaagatacatgtgagtggatcccaaatcctggctctacaggaggtgtgaaatgttgtctgaagtttttcagtctctgctgcacaggaaaacaccaatgaagttgggtcaatctacagcatattccatgacaggttccttgcagttgtacaatacaatggctgttcctcatgatctgttccattggtgactcaacatttgtatgcatttgctcctcaattgcttttcgcctaggccagcattgggttcagatttcagtcaacaatctagcaaaactactgcttgagctaacacatggaatccagaaactccaggaggtcactgtattagtccgctctcacgctgctatgaagaaatacacgagactgagtgatttataaggaaaagaggtttaattgactcacaattccacatggcttgggaggactcaggaaacttacaatcgtgaccaaaggcacctcttcacagagcagcaggagagagaatgagtgccaaacaaagggagaagccccttataaaaccatcagatctcatgaaaactcactcactagcaggagaacagcatgggggaacacgcccccatgattcaattatctccacctggtcccacccttaacaagtgggtattattacaattcaaggtgagatttgagtgggaggacacagccaaaccatatcagatacccatatcgattagctttgcctaacctaaagctatatttctacttcctggtctaatgcttgcagaaaccattctcatgcaaattccttgggtttctgcttttataaaatagcaaaatcttttggtatgtcagtcttctctaagtccaatttgtgttctgcagcatgctgggctctggctccagttataataggttgagaagcaaagaagcctggtaatgaaagggcctgaggagagttggcaacttatttacctcaagtaaagtaactcatgtgtcttcaaacaaactacaactaacctcatcagacaggaaaggggagctgcttttgcttgcaagggaggttttgtgggaaggggatttagagtggtcatatttgactgaacacacacaaatgtcccagtgcaattcacaaggtctgtcttgccaatcagtgttctaatgttcacttaaaagatatgacagacggagcacagtggcccacacctataatctcagcactttaggaggccaaggtgggaggatcacttgaggccaggagtttcagaccagccttagcaacacagagagacccccatctctacaaaaataaaaaattagctgggcatagtggtatgcatctatagtcccagctactcaggaggctgaggtgagaggatcccttgagcccaggagtttggggctgcagtaagctatgatcacaccactgcactctaacctaggcaacagagtgagaccctgtctcaaaaaaaaatttttttaatgatatgacaaaatatgaattcaacttatactgtaacttaacaacccataggatcagattctatataatgtagggatacatcagtcctaagctaaggccacaagaaataaaagattatctgagggtagttctatcacccaggctggagtgcagtgtgcaatctcggctcactgcaacctctgccccacaagttcaagcgattctcacgcctcagcctcccgagtagctgggactacaggcatgtatcaccatggctgggtaatttttgtatttctaatgggggtttctccaccttggccagactggtctcaaaatcctgacctcaagtgatctgcctgcttcagcctcccaaagtgtggggattccaagcatgagccaccgtgcccagctgtttcctttctttaatctctccagagctatttctttagcaatcccacttcacaacccttgaaatttctcattctcattctaatgatttatcgtagcaagaactttgccagagtctagccttctaacagacacatcattccaggaagccatagcaataatttaagtgacttctttttgtcactgtgtaccattaattatgagagtcccaagttctaataataacatgattgccgttatctgtaagaagaatcggaatagataacccatccgatgtttccatccttgagatgtctgagagtctgttatctgtaaccccttctggaaggaggaaacagaaaccactctagatatttttgggaaagagaagcttaagaaaaaaatatattttatacaggaaaaatgtgtttgtagaatcattttaaaggctgcggaaggagtcagaggtagggaatacaccactgtatagttgcaagcccaagatcaagaagcatttgcttctgtcacaactgctactgctaatcatctctacatccatgaaactgggaccctgaggctggctgcagtaactgccctaactgccactagatatccatgaggctggtgtgtataaacctcaggtctcacaagagtgcgtccaattggtagaagcttatctataacaagaatcctggctacttagggtctggaaaacatatatttaagttaccaacttctgaagaatacgaaagcattctaaagtgggggtagaataaaagaggagcaaacattcacaaaagccaccacagtctcaggaagttttagtctctatttggctatatatgccgactctttcaaatttccttctcctactcctgtttctctgcctaacatatcaactgatgcatgtgttaagagttgggcaggcaccttgaacttgttcctgggtgttcaggggctggtatttgctggtttctggggcactgtcccttgtccacgaagttactgatggccttctagagtcccatacagaagtctgcagtggctcacgcctaataatcccagcacttttcgaggccaaagcaggtagatcacctcacccgagaagttcaagaccagcctgggcaacatagcaaaaccccatctctacaaaaaaaaaaaaaaaaaattagtcgtggtggtgcacccctataatcccagctactcaggagcctgagggaggaggatcacttgagcccaagagggagaggttgcagtgagctgagattgcaccactgcattccagcctcagtgacagagcaagacgctgtctcaaaaaacttttttaattttaaaaattttaaaagaaatcaatgctagacttaatactaacttacagaaataggacaaacttttataacttcactctctgttcatatgtttgggcatccttagggagtcctggtagcattcaggaaaaaatttagaaggtctagagaagatcacataccaacccctaccaagagaatgaaggcttgtaccatgtgcagagatccccagagaaactgcttcttcatccctgttcactagtccactctatcacttgcttgactgcactgtctcttatgtttcaaagtaactaaaagatcattaggaattttgtgagaaaagcttcttccttttatcccacaaataaaatcttctatttttttaaaagtgacataggggtttaaaatagaaataagaaaatatagaaatatatatataagcactcagagaataatcactttagataccatggtgcctttcaaaaaagaaaaagagaaaagaaattagatcatgccagtcatgttttctttctttcttaaaagttaatcggccaggcatggtggcttacacctgtaatcccagcactctggggggccgaggctggtggatcacctgaggtcaggagttccagaccagcctggccaacatggtgaaaccccgtctctactagaaatacaaaaatttgctaggcgtggtggcgggtgcctggaatcctagctactcgggaggctgaggcaggagaatcacttgagcctaggacacagaggttgcagtgagccaagatagtgccattgccctccagcctgggctacgggagcaaaactccatctcaaaaataaataaataaagtaacataaaaaaagttaataatcatggctgtctagccatgtttatacatctccaacatcagttttagagattgaagaagatgtagggaaacataattattgtaaaatactaagaacagtgtgccatatttggatatgtctaaaatactgcttcttaaaacgtcaaaatattacttacttcaggaacacctatagtgcttgttaaaaacagagaatagtcagggcatggtggcgcacgcctgtaatcccaacactttggggggccgaggcggacagatttgaagccaggagttagagaccagcctggccaacatagtgaaaccccatctctactaaaaaaaaaaaaattaaccagatgtggtgtcaagttcccgtagtcccagctacttgggaggctgaggcaggagaatcacttgaacaagggaggtggaggttgcagtgagctgagatcgtgccacagcactccacctgggcgaccaggcgagactctgtctcaaaaaaaaaaaaacaaaaacaaacaaaaaaaactggagaatggttttttcataattcactcccccaaaatgtttttaatcgaaataattaaattaaatttaaaatggtgactagggagcccatctcagactataaaatgagaatctccaggtgggggtccataaattcacgtttatagcaagtttccagataatgtttatctcgctacatttggagaaaccactggactgttttaaagagaggacctgtctccccacaatataccagaatatctctgttccttgaacttttttgttctctgatttttattttaggagacaacaatggatggtctctgcaatttgacaaatattttgccagttactacaaaatgacttcccaatatccttttgaggcagaaacacctgaatgttgtaagtaatcagagcagttattttcttttccatgagttcataagacaccatttttaaaagtttgattcaacattttaaaaaaagattgcatctcaatctggaaatcagttttaattaaagaaacttaaaaattcgtaagaggtcaattatagttttctaattgcaaattctattaaatatacaactttaactaggaaaatttatttcaaaaaagactcagggatcttaagtgtagaagtaataaatggtgtcagatattgttatgaacagaatcaatgtcagtcaaggatgttattttatatgacttctcttttcacaatcactataaagtgtgatgtaaagaaaacagagaaagtagagagggcagaaaagctgtttggattttaatgtttgctagaaaaaattcttctgagctgcaaaacccttattcattataacccactatgttcagtcatacactgaaaacttacaaaaacactggaggggtatggaaggtataaacctgaggattaactataatattttagatcagaaagatatatgaaaataactcctcttaaataaattttgtcagttctaatacattatgcaaatgtaaatctgtatcttggagctgtcattttgaccctagcttttcaaaaccttggtttaaaagcaaggcatatttgctattcctctgacattccagacatggttccatatcacagcctctatacagactgttctttgagaaactttctcccatgtatctgcttagttggtgaccctcagcttattcagggccctgttcaaatcaaagaagactgcagtgataacgctgtataaaacagccgcgtcctcagccctaccctcattactctatgagcttactctgtgttattttctggggtggcactatcataattgctggtggtagtggtgctggttgtggtggtgtatgaattatctcatcagatcctaagcactatgacaatgactatgacaataggtactttgtttgacttttttttttttgctgatcttctagtgcctaaaataaatagtgctttgcacatagtgagcactcaataaattattgttgaagtctatataggaggctatagataggatgttttgttttatttttcatctttgtatctgcccagaaacatacatatttaatgggttaattatggttacagtaaaacccagttgaatttttttaagcccagttgaataagtatattttaaacatgtattttttataataatttttcttatagctaaaacttttagttttttagctaacaataaaaacattcacagaattctttgctgggtttttaattcatggtttatttttatccttttttgattctgaagcatgccagattaacaatatgtctgaataattgaggctttatttatgtaaatgttatataataataactacattttaataacaaatgcttaggtggttattttataacattatttttctaaggttgcattatcctaaattatgtctttagtcgtagatataagcacaatgtattatgtaggcaatgatttaactattgtagagttcaattatttaaaagagtaaaattttacactatgagttctagaaaatacatgtttatacatagagccacagtttaccttttgctagtcctagtaaatgctaattattcaattctcttactcatcatcacgttttctattctctccgttttgtacaacttatatcactcccaccttcccaaaacattatctgggcagctttgaatggaaaacagtcatgaatgagcaatcaatggctattcactacaaaatggtggagaggtgactaagagtttattttagacaaattttatatcatatatttagtttcttcatgtcacctggcaatgccagctcctcctctgttctttttttcctatatagtgccttcctggtcatatccttttcgtaaaaccatttaagatgaataggtaatggccacatattaaatactagtgttatgaattagtagatcaacaaaatatgaaatattaaaatgtaaggattgcctatctgttgcaaatataaagttttttctcttgcaaaaattatttttaaaaaagcaaggcatagaggaagaaatcctttgctatatttttttcttcatgttctaccataaattgtaaagtctagctttttaaatttttaatattttttatcttcactactcaaatgaggttaatcaaataccactaacaatctccagtttaaggggatagacgtcactcttgtgagattcacagggtactcagcaatctgtctcagcatcatgccattatttagagggagaccaaataatttgtccattaaaaagctaaaaattggctgggcacagtggctcacacttataatcccagcactttgcgaggctgaggtaggaagatctcacttgagaccaggagttcaagaccagcctgggcaacatagtgagaacccaatctctccaaaaaaaaaaaaaaaattaaaacttagctgtgctactcaggagcccaggagattgaagctgcagtgagctgtgattgagccactgtgctccagcctaggcaacagaacaaaaccctctctcagaggcagaaaaaaaaacagctaaaagtttttgggaaaggaaaacgttaatagatataatttaactgataatataatgtttaaaataatgaattaagccatgttgtctcaaaacagtttttttcttttatcatatattgttttctttttatttcttaatttttttttttttttgagatggaatttcactcttgttgcccagactggagtgcaatggcgcaatcttggctcactgcaacctctgcctcccaggttcaagtgattcttctgcctcagcctcccgagtttggattacagacatgtgccaccacgcctggctaattatgtatttttagtagaaacgagatttctccacgttggtcaggctggtcttgaactcccaacctcaggtgatccacccgcctcagcctcccgaagtgctgggattacaggcatgagccactgcgcctggtctatttcttaaattttaattgaatcttttaatacctcaccttattcccaaaaggattttcagcaacttacaattaaaatacagctactaaaagccttaaaccattcacatgatataaaagacaaaagttcagtggtgagtggaaagcgaatgacaaagaaaaattaagaaaatccttcctgagaaaagttcagtgacttcatccgaagcctagttatgaatttcatagctgtcaagtccaagagagaaaataatgggttacataactttcatagtttgtaaagcaaaacaaacaaatggggaaaaaccagataagtcagcaagagaaatatatttttgcgtgatcctgcaccctggaagacatttgtcacaagtataattacataaaaggaatgaggctatgtaataaatgctgtattaaaaaaaagtaatttttttcatcagtacttaacaaaaacaaatatatcattgagagttaaagacaatttgtggggggtagtgcagctaacgactaaatatatgtttcaaacttgaaaacagtgtaaaaatagaatggcaagtgtagtgtaaaacttggggttaaaatttaagttaaggttcctagtgtcccaccttatttaaagcagattattatagggatttattggaaattaaactgagcaaagcttataatcatttttgactagaataatgtgaggaattcacattattaaagtcatctctcaagggcaatataatggaaaatataatatctatcatgagccaataaattaacaaaatttaagtttaaaggatttgaaaagtacagagatttggaaagaattacttacttaaccataatttgaccattcagaagctaccagcattaacttgctactgcattactcgtctttttttattttaacatagttgaaatttcctatacaaaccatttttatcaaattttcaattagcatttcggcataatcaggtatccatattactacaacatcttttaaaatattccatgtaatagtatattttgtaagtgacataatttccttaatcattccttggctgttggatatttatgtgttgttttttcatttttccctattgcagataaccctgtaatcaacatatatgaattatcttaatttagtctctgtatatgaaaaaaacacactgggattaacgctaatttcactgccctccgtttctgcccttcctacttcattctcaggacctttcttccttcccaaccttttccatcccatccccacagcatacacacagactcacatatgagatatgattgtaacttaaagagacagcatcagttttcagacatccacaaccaaagtgggtacttgcaactataaaactgttgtaaagttcttggcagatactctgtttatattaaacactaaatctaggttatggtcctgatctcttgtaaccctgtgaagacgtctctggagatatttgggaggagaggaagaacacatgtcaccccatatctgagccaaaaagctcctcatgaacagtcattcacagaggtctctgcttagccactgagacacttgcttgctctctgcaagtttcaccataaaggtcagaaactggaagcctacaagcagaaaactctcatagacggttttgtttgtccaataatatttttaaatgttttcagttagctaatatcagtttttaaatagatagttatatataaaacattgtatttatggcttctttgaggaagttggtagatgtagctacacatgttcctattctaatatggcaacagatgagagaagctgttgcacttggacatctggacacagtctacagtgacattgcctgaccgctggagacactggagtctgtaacccctgctgtataggttagggctccagaagtcaatatggggagaaaacgtttctcattgctctcaggaattcgccattccccatcagagcaggaatcaaactatatttattatcctaaataataatctcattattctgtttagctatatgaatacatcattgcaaatctctaatagactttagatgtattgactcacatcctaacactatcgctacagctccacaagatggccaaggtcatacacctcattctccctctctttccaacaccaaacaccagtgaaaatagaatcctatgcagaaaaaacattcactcccataaataaacttttattcatcctttacccctatttaagccaaaagattttttaaaaaattatttgaagaactcctgattttaaaaaaaaaactatagacactatcatttgcctttagttctcctcgttcttgctagttaaaagtgatttattcctcctttaaaggttttgattatactaaatactttatttttaagtggcagttgtagtatgaacattaagcctcatcacacactatcgtgtcaatccttagcannnnnnnnnnnnnnnnnnnnccccttcccacaaaacctcccttgcaagcaaaagcagctcccctttcctgtctgatgaggttagttgtagtttgtttgaagacacatgagttactttacttgaggtaaataagttgccaactctcctcaggccctttcattaccaggcttctttgcttctcaacctattataactggagccagagcccagcatgctgcagaacacaaattggacttagagaagactgacataccaaaagattttgctattttataaaagcagaaacccaaggaatttgcatgagaatggtttctgcaagcattagaccaggaagtagaaatatagctttaggttaggcaaagctaatcgatatgggtatctgatatggtttggctgtgtcctcccactcaaatctcaccttgaattgtaataatacccacttgttaagggtgggaccaggtggagataattgaatcatgggggcgtgttcccccatgctgttctcctgctagtgagtgagttttcatgagatctgatggttttataaggggcttctccctttgaatgaatggagaacagtctgctttttttaaaaaaatacatgagctagtgtgtgtttccaaatgttgatgctctaccatcattttaaggttaaattaaaagcaaactttggagccttaatttaaagcattgcctaaattgcctacgtagcacatgatatgcttttgtactaaatgattttctcatagcttttcatttctttcttttcattaccctcctcttcctggtccctcactgtcatcatgccttaccacttccccttgattcagtggtcggttctgtgccagtgcaatgtctttgccaaggtctggagcttgactgtgatgaaaccaatttacgagctgttccatcggtttcttcaaatgtgactgcaatgtaagtagaaaagaattacttcatcctgacagctgggtagcacctgtaaaattgtattataattaagaccatgtgattattcataatatatttttattcaaagatgatgtcatttttcctgggtcaggtataataattactgatatttattttgcatttattaaatgctagaccccaccttaaattattctttatattaacccctcataataatcctgcaaggtatggagtgtcaccatattttatctaaacaaaaaaagtcatcaattgcatgtgctactaagaaaaaatggcttctaattaaactattacatagagctttcctattatatagaattttcacttgacatttattgaaagaactctgttagaatttattggacccaaattttaatataatctgatgtgtaagttaaaaaagaaaataaggtaaattggataagatattcctcccaaaacgtcatatttaaaatctgttctgaatcacattttgagtcatagatgttaatgttgttattttcttaaggaattcaaacttacatatgtaaaaaaattatcaccataagtggtttgttgatttctagtacccgtaatgttagtttccagtactaatttgaattcaatgaacttcagcaacacaaacatatacatttgactgaaacttttttaaaagaaattagtggaggacagctattttaatccaatatttttgctgagtttcttttttcatttagataccttagtgccttgtggctctcacttttgggtatatgaggacaaaataagagtaattcttgagtttatgcatattgacaagtgttaccgttttcaaaccaaaccacataatacagcaattgaaatacttggtatatgaggtaagagctacaactcagagttcctgtgcatagtggttccattgaattcacagatctgagaagtttacccaatttgtggtggccagggaatatgaactgaaaatatcagcagagttttccaaaagagggaacatttccacttgaactaaggaaaagaagagctcttcagcattctatcctcttcttgccttaccatggctctttctcatagcaattagtcctgctagaaaaaagtaataattccccaaaagaacctgaggtcctatggagcacttctctgatttaaattctaactggaaattctgagtataagaatttatgaatagtctgggcaacacagagagagcccatcactacaaaaaaaaataaaaattagccaggtatgatggcccacacctgtagtctcagctacttggaggctgaggcaaggggatcacttgagcctgggaggtcaaggctgcagtgagctatgatcaagccactgcactccagcctggatgacaaagtgagaccctgcctcaaaaaaaaaaaaagaatttatgatttcattctattttcagagaaaaaaatcataatccttctccactgcttgtatcaaattactagaaaatccaaatcaaaggatattctgatgcagccaatttcatttttcattttcccacgagtaagatttgaatccattctttaacaattcaaccaacatttgtaaaataaagaacagagagagaaagctgggggaatggaggggaataaggcaatggctaactagagagggcatgccccacacaaaggttgaatcattgaattaattcccattcaattttaaaaattgtcatgatctagtatacacatacatacgtacataaagagatgtgggcagaaagctgtgacctaccagttttcaacccctggtataaacaaaaaaactgggaccaggtccttgtaaatgattgtctgcaagaaggcaagaaagaaggagtcagagatgactccaaggtttcccttctaagcaacagtatgatcggagaatgaggagacttggtggcagtaactgaggaagatggggactctgatgttagatgttttttccaatgtgagattaacaggtcactcagtggaaatcttcaacaggcatttggagatataggaataaagctcaggagtttatgtctacggtattttttattttttgttcaaaaaatagcattatcttgtgctttaggttgagccacttgattccagttgtccatttatacttttctctgcagaacactggcttagactcatacgtagtcccagtctgttcagttccatacagaaaaagaactctatgctttatagcacatacattaaaaagtaaacatcaaatttcattagtcagttctttccagactttgagttggaactattacagggaaatgtcagaagaggactgaaccatatgtaagtatcaaagaagctaatactccaagtaatgtttattgaagttgggatttttttaagacatttcgcataaatgctaatgaacaaaacaggcaaacatagatagatatgattatttttacttttttctagcttgataaacactgattttgactatttgagacttggctttaagatcctggaatttaatcactagaactatatgatctaatactaagaactttctttataaaaactagagctagctttgacaataatgattaaactaggccatttctctctcacacacatacaaacacaaaccctctttgactctgtgaacaatcaaagttggactgtcaaattttaaaatataaggatttgttatattatattttgggttgttctattcaatgagaataacagcatctacctctttctatcccaataggatattgtgaaatgtagagaatgttatttgtcaaaatattttatgtcatttagaaagaagtaacctataaatcctagacactattaataaaaacccaacttttaagtaacattnnnnnnnnnnnnnnnnnnnnnnnnnnnnnnnnnnnnnnnnnnnnnnnnnnnnnnnnnnnnnnnnnnnnnnnnnnnnnnnnnnnnnnnnnnnnnnnnnnnnnnnnnnnnnnnnnnnnnnnnnnnnnnnnnnnnnnnnnnnnnnnnnnnnnnnnnnnnnnnnnnnnnnnnnnnnnnnnnnnnnnnnnnnnnnnnnnnnnnnnnnnnnnnnnnnnnnnnnnnnnnnnnnnnnnnnnnnnnnnnnnnnnnnnnnnnnnnnnnnnnnnnnnnnnnnnnnnnnnnnnnnnnnnnnnnnnnnnnnnnnnnnnnnnnnnnnnnnnnnnnnnnnnnnnnnnnnnnnnnnnnnnnnnnnnnnnnnnnnnnnnnnnnnnnnnnnnnnnnnnnnnnnnnnnnnnnnnnnnnnnnnnnnnnnnnnnnnnnnnnnnnnnnnnnnnnnnnnnnnnnnnnnnnnnnnnnnnnnnnnnnnnnnnnnnnnnnnnnnnnnnnnnnnnnnnnnnnnnnnnnnnnnnnnnnnnnnnnnnnnnnnnnnnnnnnnnnnnnnnnnnnnnnnnnnnnnnnnnnnnnnnnnnnnnnnnnnnnnnnnnnnnnnnnnnnnnnnnnnnnnnnnnnnnnnnnnnnnnnnnnnnnnnnnnnnnnnnnnnnnnnnnnnnnnnnnnnnnnnnnnnnnnnnnnnnnnnnnnnnnnnnnnnnnnnnnnnnnnnnnnnnnnnnnnnnnnnnnnnnnnnnnnnnnnnnnnnnnnnnnnnnnnnnnnnnnnnnnnnnnnnnnnnnnnnnnnnnnnnnnnnnnnnnnnnnnnnnnnnnnnnnnnnnnnnnnnnnnnnnnnnnnnnnnnnnnnnnnnnnnnnnnnnnnnnnnnnnnnnnnnnnnnnnnnnnnnnnnnnnnnnnnnnnnnnnnnnnnnnnnnnnnnnnnnnnnnnnnnnnnnnnnnnnnnnnnnnnnnnnnnnnnnnnnnnnnnnnnnnnnnnnnnnnnnnnnnnnnnnnnnnnnnnnnnnnnnnnnnnnnnnnnnnnnnnnnnnnnnnnnnnnnnnnnnnnnnnnnnnnnnnnnnnnnnnnnnnnnnnnnnnnnnnnnnnnnnnnnnnnnnnnnnnnnnnnnnnnnnnnnnnnnnnnnnnnnnnnnnnnnnnnnnnnnnnnnnnnnnnnnnnnnnnnnnnnnnnnnnnnnnnnnnnnnnnnnnnnnnnnnnnnnnnnnnnnnnnnnnnnnnnnnnnnnnnnnnnnnnnnnnnnnnnnnnnnnnnnnnnnnnnnnnnnnnnnnnnnnnnnnnnnnnnnnnnnnnnnnnnnnnnnnnnnnnnnnnnnnnnnnnnnnnnnnnnnnnnnnnnnnnnnnnnnnnnnnnnnnnnnnnnnnnnnnnnnnnnnnnnnnnnnnnnnnnnnnnnnnnnnnnnnnnnnnnnnnnnnnnnnnnnnnnnnnnnnnnnnnnnnnnnnnnnnnnnnnnnnnnnnnnnnnnnnnnnnnnnnnnnnnnnnnnnnnnnnnnnnnnnnnnnnnnnnnnnnnnnnnnnnnnnnnnnnnnnnnnnnnnnnnnnnnnnnnnnnnnnnnnnnnnnnnnnnnntgtttctcaaattagattccaaaaatgtgttccaaagagtccaagaaagttttttttaagaaggattcatcaccaagtttaagcaacaccacttcaaaacctaaacattgttagtgcttattgtataaaactgtcttaacctgagttaagttaacctccagacaatgcggtctgttgctcacttataagtatccgctccgtggtactatataatgatagtactaataatatcatattattagataccatctaatccaaatccctcctttcactgttaaagagactgacttggagaggttgtgtgtgattcatgcaaggatccccagctacactggttttggtttttttattgtttcatttattttgcttttactacattacattgctgttctaaaacaaaaaattaaggacttgggacctttccagtacaaccaaaattatgtggatctggtctgtgtcaaactgcttattaaattgtgatacaaaagaaaatcttcctgtacaacttcttagaagttgaaatggaatcacttattgaataaagatgatccaattataggtaccaattgatgttttccttcataactaattttaaggtggtggaatgtgagcaatgaaatattgagaaatacaatatttaatttcttgagtgtttttaaacagaaaatactgtttttattgtcacttagaaactgagatgccttctaatgtttgttaaatacaaataggaaagaaaaacataactgaaaatcaattttttcaattttattttttaacattttttgtcagaattacagtcataaccaaaattttaaaaaaatgaatagctttaatagtgcaaaactaacagctagacctagttcaagtgatatgataaatatgagagagacattatgaagcaaaatgtttcctgaaagctagtactaaagtaaatagtttgtaattatccctattgttgtaatttaaaagtaaaggaaaaacaactttaagaatcaaaatttacatttatttcaggtcacttcagtggaacttaataagaaagcttcctcctgattgcttcaagaattatcatgatcttcagaagctgtaagaaaatacttaattcctggtattacaattaactagcatttttggccatgtctttttcttcctacttctgtgaacaccaacactattccgctgcttgtgtctaatccctattcaggggaaatatttagctgttaactgaagacttccaggtaacacttattttttctgagtaattttagaaaccattctagaaaaacctcagacacatatttccaaaggaactggaacatgtgtgctgtgaatcctcctaccacaatcccccaaaacggagatacttagaagcttttatcctctgcgttattctagcatggaatacctcaatgctcatcttagagaaaaatgttacgctcttttgtcagattcacgatgaagaaagtgaagaattttcttccatgtgttttcaaattcattatccacctaaaatagcaagtcactgtgggttgaaacctctgagcatgttgtcttggagacttgattccattttcacatctgccttgtgagttgcgttttattttggccttgagtagtatctgacatgctagcttcccttcagaactctcaaaatccatactggcccacgggatgtttacctgttatttaggtctactttgtgactaaattatgttgtcatatggtgaattgctgggtttagatagtctgtacctaaatcacactaactaagaaatatctcaggattcattgtttcatttttataccaatatagattggttcttattttggttttacaatagggaaacctgataaattaatatatatctgtacatttttaaagataacagatggaaattgagtggaatcagaagaagaattaacccacttccttcagtgaaatgttctaaaaacccagatagtctgcagaagtatctatttcatatttgaaaatagaaattctaatgaaaataacttttcaaaatttcattctgaacatttatcagtcaaaagagaagaacttttcacaattaggcctgacaaaacttcaagagtacactgacttattctattttctgatttctggagactgaagaatttttctgtagcatcaccttgtgtccacttatttaaaggagctagactacaaatctaaatatcaaaattcaggtttatataatgcagtggcttagcatttttgcacaataaacattgaattaattctcttttttgaactaaccaccatactaatgtggatgaattaattcctgaatgaccaatttgttccatataacaaaatgatcaaaatagcctaattatttaaaaatttctaattggttattaaaagtctatacctttagacctccaggcaatgcagcctattccttagtagatcattataacactagaaataaacaaacaaatgcatgataaatgagaaccattcattacctactacatgattgggcccacagcatgtccggttcaggtgcataataatttttttttaagagacagggtctcactctgtcactcatgctggagtgcagtagtatgatcatagttcattgcaccctcaaactcctgggcttaagtgatcctcccacctcagactcccaggtagctaggactacaggcatgtgccaccacacctggctccttttttttttttttttagagagataggatctcactatgttgccctgcctggctggtctgtttcaaatgatcctcctgccttggcctcccaaagctctgcaattatgggcataacccacttcacccagcctataataaattttataataacatttcacaatcaaagttaggttttcttgcatgttggagaaatagggtacttttcagtcaaaatttataatttaactgaatgttcgctcatattgatttctttcttattgctcctaaaagttataacaaattgcatataaactttcaggacactctaaagaacaatggtgacctgcactcagaacatgaaggcagccttgaaatccttactttatcattcccgcaatctggggcaagtacacatagaagtgcaaaactttgtgtgggtgcaatgatgcaatagcgtatactctggtacccatttcctttgacctccagttaactcaaggtcgtattttcagtattactttagttaactatgtaagcctgcattcttgtcttgacattccaatctaatttatattcttctagtcctgattatttttatgttttttttcttttgccacttttactccttataaatttcctccaaacagtctttggaacaaggtttggatgtcaaattaatgagatcaaaattgatttggttgacagatttgtgattaacatagaatatggtttgggacattaaaaacatcatacacttttaggttggctagcactgtgttgagcacttaacaagtttaaagaattataacaagacccgtattaaaagtctggcttctagacttctgatttatgagggctttactatgtgttaacattttatttctagaaaattcaaatagtaagctttggctgttattcattcatctttataactagaatttctaaatacaaaccagcctaattgtacataaatttaacagaaacatgaagtgacatgatatctggcttcactaaattattttgtaatgtttacctttttcaatttttaaaatgtttaatcgtcatcaaatacacataacataaaatgtggcatcttaaccatttttaagtctaccttcagaggcattaagcacattcatattgctatgctaccatcaccatcatccatccacagaattctttttgtcttgcaaaagtgaaactctgcttcatttttttttctttttaataatcattttcacaggtacctgcaaaacaataagattacatccatctccatctatgctttcagaggactgaatagccttactaaactgtaagtaccagtgtgaattaatttgcccattccatggtagtctgacagcctagactattccaatccagaccagcctccctgtccatgacagtaccaaggagccatgcaagtgatgctgaaggggcagtagagcaccgtggctaagagcataggattgtgagttagacaggcttcagtccaagtcctgattgccttacttactaggtgtgtgattcttgagcaatttgtattcccttcctttttttttttttttttttttttttttgagacagagtctctctgtcacccagactgcagtgcagtggcgcaatctcagctcactgcagcctccgccttccaggttcaagcaattctctgcctcagcctcccgaatagctccagcatccagcatgagccatagaccaagaccctgtctctgacaaagaaaaaaaaaaagcctgatgatgatatttgtgatgaagaagaaaaaacccaaagacttccccagttattcaattactctttcttcactaatcccacttttacaaatgcatgaaatactgtaaggttaaagaaataaagctttttgtggtaaaatatacataagctaaaattcaccatttaactgtttttaagtaaaccattcagtggcattaagtacattgacattgttatggaaccatcatcaccatccacctccaaaactttttcatcttccccaactgaaactccatatttgttgaataataattcctcatatctgtctctcccaatttccccctctccccagcccctggcaaccatcattctactttctgtatttattaattggctactttaagtacctcatataaggagaatcataaaatatgtagttttttgtgtctggtttatttcacttagcacaatgtctttaatgttcacgtgttgtagcatgtgtcagaatttccttttttagggctgaataatagtccattgtatttatgtaccacattttgtttaactgtttatctgtcagtggacatttgggttgtttccaccttttggctgttgtgaataatgttgccatcaacacagggatacaaatatctgtttgggtccccactttcactttcacttcttctgggtatataccaagaattggaattgctaaatcagatggtaattctttgatttttgagggactgtcatttgatttgattttgattttttaagggactgccatactattttccacagcaactgtaccattttactttccaactagtgttgcacaagagttccgatttctccacatcctcaccaacgtttgtgttctcgtttcatttgtttgttttgacaataactatcctaatgggtgtgaatggtatctcattgtgcttcttttaaaaaaaaaggctttctcaatgttccgttttattgagttctgccatgcagcattctagaagtaactggaaagaagtataaccaaaaatcacatgaatacataactccctgtatttccatttatgtccccttgttttccacctatactgttctgtatcctaacgcaagaaacccattccagtcagatttttggcttgtggtatcagagtttgggattgagtcgagaagagcacctagtaatttactagcaaaatggaagaagactgcaggagactcgaagccttaacagtaaccactttagccatgtcctctccccttctaccccatctctgctcttttatgtcttagcaaagtacccagaatcaatattggactcactcttcaggctcctgactgtcttctttccatatatctttgcaaaatttactaaacactatctgtttggtttaatgttcagtgaatgtggaggaagctcttgaaaggcagtacagaactggagagtaaacttaaaagtgtcctccctctcttttcatagcttttctatagtgctggagtgttgttgagtgttaaagatgccacatatttctagttaaataatcattagtcccagcactttgggaggctgaggtggaaggatcacgaggtcaggagatggagaccatcctggctaacacagtgaaaccctgtctctactaaaaatacaaaaaattagccgggcatggtggcacacgcctgtagtcccagctactcaggagggtgaggcaagagaatcgcttgaacctggggggcggaggttgcagtgagccgagatcgcgccactgcactccagcctgggcatcagagtgagactccatctcaaaaaatgataataataatcattagatacctgatgatttatggatctaaacaatgattagatccataagtattcattaaccctcacagagtgcacatattttagttagataccatgagggcatagaaagataactcaggctggctccctttaagtagttataccttagcgtttcaggtagagcactgagctatcactggggagaggcaggactcctgttctctagaagtttatgatctaagatgggaaaacaatgccaacatatataaaacattagagaaccattttttaaaagtacttaagttccaaacctgtgttgctgaaaccaaaattgctattatggttcactgaaaggagtgattatctcaggtccagagcagtaaaggatggctctgaaaaatgaagaggactgggcaaaacaggtgagcatagggagcaatagtggatcaaatgtcttttacctggagggtttttgtataagagaacaccctgaggttgtaagtcatttcttaccccttactgtgcccacctgggctccaggtttgcaaaggagggaaggaagaggctctatcatggggtgccattgctcactagccctgagcaaaagtcaaacccagcaagggagaacagattcctggcaggagaaattctacaggatgtttactcaagatatgaaagactgaagaagagagagaaatcagtgtgaatcttgtattagtggaagtgaaacttgaactcttacttgcatatgaatcataagcagaaagaaaaaggaaagagggaagaaactggagtaagaggcgtgagcagagacactgctataaaacataatatgtactgaatgtttatggcatgcattgcctctattaaaccataggaagtagatcctgatactatccccattttagagttggggaagctgaggcttacaggaattcactgcttgctcaaagtcactgttaataagtagaggagtcaggaatcaaactgttcgatagcagatttagtgcagtgaattgctacactagagagattgagacatgagtgaacatggcaagaagaggagatcaacacaatagaacaaagagttatttcactttgcagaggagtgggatgtaaagatgggtaaggcagagtcaaaccctttagcaagggatgcaatgcccttttgtccataacaggcccctgcctgcctcctaggtttatctcctgtctctccttatagccccttcatggtgaggccccattgaattacctggtgatttcttaacttgtcagactctcatacctcttgcttttgcataagctatttcctctgcctagaatagctcctgcctgttctttgctttgtgaattgcatgtcttcatccaagactcttctcaattgtgcctctgtttagtaaagccttctcctggctcctcattcctccacactctgcagtccctacccctagcaaagctgggtgctttctcctctgcaatggcagagcaaccatgcattatatacttccctctgcttccctgacattacaaagtaatctgttcacatgctgtggcctctccagactcaaagccccttaaagaaagggatggcatgcttagcacagtgccatggggtaagtattcaaaataggttaatgaatacatgaatagatgaatgaatagattgattaattaattatggggaaatttaaaactaggtatgataaggtaagtggtagcaattcttagagattcaaaggcagggaagtggcatgatgagaatgctatgtaaaaaatttaagatggatgattattgtttttacttttcttattgtaagacatcaaaaatatacaaatttattgtagttatttctccttttccaggtatctcagtcataacagaataaccttcctgaagccgggtgtttttgaagatcttcacagactagaatggctgtatgtttaatttatgtggcattttattgcactagtttttagattctagagatatataaatgaattaatttttttcttctggctgtcaggataattgaagataatcacctcagtcgaatttccccaccaacattttatggactaaattctcttattctcttgtaagtactaaactaaagcaaatatttcaatcaaaggcaaagacatgaataaaaattaatgcttaaatttaataccattaaatttggatttgttaaaaccccaaagaggccttttcaatgaaaaaccttttcttaatcatattctataaggctatttatagttccaacaattttaaaagattttctgtcttctagaatatcagcccataaaaactgaatacattctcactcatattttatcacaatattcttttttttttttttttgacatggagtctcactgtatcgccccaggctggagtgcagtggcgtgaccttggctcaccacaacccccgcctcctgggttcaagccattctcctggctcagcctcccaagtagctgggattacaggtgtgtgccatcacgcccagctaacttttgtattttgagtagagacggggtttcaccatgttggccaggctggtctggaactcctgacttcatgatccacccatcttggcctcccaaagtgctgggattaaggcgtgagccaccacgcccagcctttatcacaatattnnnnnnnnnnnnnnnnnnnncctttatcacaatattcttaagcacatcgttactgtctatacaggcagacctcagtgatattgtgggtgttgttccagtaccactgtaataaagcaaatgtcacaataaagcaagtcacacaaatttttttggtttcccagtgcacataataaagttatgtttacactatactatattcaattaagtgtgcaataacattatgtttaaaaatgtgcataccttaattttaaaactctttattgctaaaaagagctaacaatcatctgagttttcagcgagtcataatctttttgctggtgaagggtctcatgtcaatgttgacagctgctgactaaccacagtagtggttgctgaagcctggggtggctgtggcaatttcttaaaataagataacaatgaggtttgctacattgattgacttttaatttcatgaaagatttctctatggtatgcaatgctatttgctagcattttacccacaagagaatttctttcaaaattgaagtcaatactctcaaatcctcccaatgctttatcaaataagtttatgtaatattctaaatactttgttgtcatttcaacagtgtttacagcatctttaccaggagtagattccatctcaagaagccactttactttgttcatccataagaagcaactcctcatgctgttcaagttttatcatgagattgcagcaattcagtcacctcttcaggctccacttgctaattctagttctcttgctatttctacttcttctacagttacttcttaccactgaagtacttgaacccttcaaagtcacccatgagggttggagtcaacttcttccaaactcctgttaatgtgaatattttgaccttgttttcatgaatcacaaatgttcttaatggcatctagaatggtgaatgctttctagaaggtttttaattgactttgcccaaatcgtcagaggaatcactatctgtggcatcagtagccttacaaaatgtacatcttaaataataagacttgaaagttaaaattagcttttgatccatgggctgtagaatggatgtcgtgttagcaggcatgaaaacaacatgaatctccttgtagatctccactggatctcttgggtgaccaggtgcattgccagtgagcagtgtatcttgaaaggaaatcttttttttctgagcagtaggtcccaagagtgggcttaaaatgtttagtaaaccatgctgtaaacagatgtgctgtcacccaggctttgttgttccattgatggagcacaggcagagtagatttagcgtaattcttgagggccctaggatttttggaacagtaaatgagcgttgacttccacttaaagtcaccagctgcatttgcctccaacaagacagtcagcttgtcctttgaagctttgaagccaggtattgacttctcctctctagctatgaaagtcttgtatggaatattttttcaatagaaggttgtttcatctacattgaaaatctgttgtttagtggaaccaccttcatgaatgatcttagctagatcttctggataacttgccgcagcttctctattagtacttcctgcttcactttgtaattttctgttatagagacagcttctttcctttccttatgaatcaacatctgctagctttaaacttttattctgcagctccttcacctctctcagccttcatagaatgaagcagagttaggccttgctctggattaggctttggcttaaaggaatgatgtggctggtttaatcttctatccagaccactaaaactttttccatcagcaataaggctgtcttactttcctatcatttgtgtgttcattggagtagcacttctaatttccttcaagaattgtccttagcattcacaattcggctaactggtgcatgaggcctggttttttgacttatctcagctttcaaaatgccttccttactatgtttaatcatttctagcttttgatttaaggtgaggaggtatgcgagcagtatatcttgaaagaaaacctttttttttctgagaagtaggtctcaagagtgggtttaaaatatttagttaaccatgctgtaaacagatgtgctgtcattcagactttgttgttccattgtagagcacaggcagagtagatttaacataattcttgagggcccataattcttgtgggactcttcctttcatttgaacacttagaagccattgtaaggtcattaattggcttaatttcaatattgttgtgtttcagggaataaaaaggcctgaggagagagatatgggggaatggctggttggtggagtagtcagaacacacacaacatttattgattaagatagctgtcttggctgggtggggtggctcatgcctgtaatcctagcactttgggatgccaaggcgggcagatcatctgaggtcaggagttcaagaccagcctgaccaacatgctgaaactccatctctactaaaaatagaaaattagctgggtgtggtggcacatgcctatatccccaggtacttgggaagctgaggcaggagaatcgcttgaacctgggaggtggaggttgcagtgagccgagattgcaccattgcactccagcctgggcaacaagagtgaaactttgtctcaaaaaaaaaaaaagattgctgtcttctatgggcatggtttgtgacaccacaaaactactgcgatagtaacatcaaagatcactgatcacagatcaccacaaacaatataataataaaaagtttgatggctgggcagggtggctcacgtctgtaatctcatgctttgggagattgaggagagaggatagcttgcagccaggagtttgagaccagcctgggcaatatagcaagaccccatctctaccaaaaaaaaaaattgtttttagttagcagagcatggcgacacatgcctgtagtcccagctactcagggggctgagacaggagaatcacctgagctcaggagtttgaggctgcagtgcaccatggtcgcaccactgcacttcagcctggacaacaaggcaagaccctgactcaaaaaaaggaaaaagtttgaaatactctgagaattaccaaaatatgacacagacacactaagtgggcacatgctattggagaaatggcattcatagacttgctcaatgcaaggttgccacaaaccttcaattttaaaaaatgcactatctgcaaagtgcaataaagcaaaacacaataaaacaaggtgggccaggtgcagtggctcacacctgtaatcacagcactttgggaggccgaggtgggcagatcacctgaggtcaggagttcaagactagcctggccaacatggtgaaaccccatctccactaaaaatataaaaagaaaaaaatagccgggcatcgtggcaggcgtctgtaatcccagctactcaggaggctgaggcaggagaattgcttgaacctgggaagcagaggttgcagtgagccaagattgcaccactgcactccagcctgggcagacagagcaagactctgtctcaaacgaaataaataaataaataaataaaaataaaacaaggtgtgcctacattaatcttggtaaagaaaaaaaatgcctttaaatcatctcctttccaccatttgttgttgacgggtttaggctattttttttttttttttttagttactaacattactgctttcctccatataataacttatatttgttaaaattttattactatcaagtatttacatataattagattataattaaatatagttagattataattaaattataatttaaataaaattagagggaaggctgggcatggtggctcacgcctgcaatcccagcactttgggagtccgaggtgggtggatcatttgaggtcaagagtttgagaccagcctggctaacatggtgaaaccccgcctctactaaaaatacaaaaattagctgggtatggtggcacatgcctgtaaccccagctgctcggagggccgaggcaggaaaatcacttgaacctgggaggcagaggtttccatgagctgagatcgtgtcacaccactccagcctgagtgcctccatctcaaaaaaaaaaaaaaaattagaaggaaaaaacaactaatttagtggatttgtgggtttcataagaataataataataccatgtttgacccaagatgagaagagaaccagaaaaatgtgacttgtttgtcttttcctttttcagagtcctgatgaataacgtcctcacccgtttacctgataaacctctctgtcaacacatgccaagactacattggctgtaagcgattctgtctttttttaaagaactcaactaaattttctgtttttacctaattcattccagaatataaggattgttttagtttttcttaaaaatgataagggttttagtatcatatcacatttcctcaaactgctttaacatgatttttatgttaaacatctacattatctaaactaacatctctaaactctcagcaaaataaaacatctcaaaaaaaaaaaatatatatatatatatactggagccaggaagaagaaacacagaaggaatgtcaccacatctatgtaacatctccccctttccctgctggtatactcacctactaatttggtacagaaagactaagttgttttaatttcactctagaattctgaataataagaatatgatatttagcatttatttttcaaaaactaatcatgataaaatatgttccatggaatattttacaaagtagctttgcttgtagtaataagtatcactccaccatttagaactcaaccatccagtaaatttgcctatttagaacacaagtgaaaaataaaagaaagaaataaccaaaataactactaacaagttcaatcaacaaactgccatatgctgtatcatatgaaaactccctctgtctcttattttataagaaattctcagaagttggttgtttgatttctaagctcatagcagattacaaatgtcaaattaaaaggaagaggaaaagttagagtcagaagcattgattgtagtcagaagtaacaactatcaacttgataaaaaagcataagtgagaaatgctataaaaagcaatgacagtaattcaaactgtactaatctgcaacctctcagaaaaaaacaaacattctgaaaagttactaagtccagtaggcattttggtatgacagtataatactgtactgtacattgaaaacaagctaaagccataaaggaaagggcaaattaagttcaacatccctcattaaaattgaattttggttcaaatgaatacattagcatctattacagcctctgtaatcccaacttagtaattaaacacaattgaacaatatttacataattagcaattaaaatgtgtgcatttagacagaagcaactgtgtgcagtattatgcacaagcaataataaaccttgcctttgtttacaaaaaggcaagaaaatatacaatatacttcagataaacatcaaaatgattaagatgtattactaaaaaaattaaaattaaaaatataaaattaaaaattttgttactaaagttttcatatgtaaattctagctatccaaaacaacttattccatatgaattcctgatagtgaatattatcctgattttaattctagtaataataatactttgctttataattatttacctttttataactaatgatactattcttaccttgcatgaactttcatttagcacagtatgaactagaaaatctgacagatttcttggccaaacatcattttaactctgatttaggggaaaaatacatacaaactaaagagacagatgacagcccaggaaattatgcttctaaggtatttgcaggacaataaactgaaacctatattagttcttgcaaagcaatgagaaactgtaaatgccacaataaaagttgtaaaattcaaaaaaaaagaaatataagtaataagcaagcataaggacagatatggcaatagccaaaggtgaactaaaagtcaagaataaagtaaacttttcttttgagatgaaattaagcaagtttatttattagccaaagaagtcaatatgaaaagcttgaaaatatagaagacgatgggaatacataatagtgcaaagtactagaagacatggaaaagaatggaaaagtaaaatgtgatcacacacacacacacacacgcatacacacagcagtgaaaatgaatgaattatcaatacttcaatcaacatgactcaatttcaagcacatatgaattactcaagaaaaagtcacagaagactacatatattacatttccattcctataatactgattaagatatagaaagccacaagacagcagtacttcctctctacctataagaaagagctttgtaatctacaaagtcataattttgtggagcccatcagtaggctacagtcataaggtagccaaataaatggaattctaacaagcaacaagaagatgtgggacatacatactatttcacctttggcagagcacaggatgaagagttggctggcgtgaaagcaggtacaaagaaaactaaaactttaataaacttgtaagcttaagtgtgggctactatagtgctttaaaagaactgggaaccccatatgcaaggggatttagctatctttaacaggctctttttcactgatctccaccaaccacaagaaaaactaggagtaggtaaggaaaccagacagagccctcattggtagcacaacacaaaactccaccttcttctctaaactcacccgtctcagggaacaaaagcatcaagcctttgggagtgggacagaaaatcctcctgcacccagggaccaggcaaaggtccattacttccataggaggaatagaaactagagcattctgccccagggtaccaacaaaaaaaaaaaccactccagcccaggatcttgcactgatcaaagcagtgggtagtgcccatttgtatcacggcaggaaatgctcttatgagagtttggcttctggagaagggggaacagcaaagctgagacagccccatccccaaaagcataaggaaaaagaagttcatgtcaaattataaagcaatcaacagaaccagaaccagcaataactcagattttacaacttccaaacagagacattaaaatgcttatgattaataagttaagtaatatagtggaaagatggataatatgcacgaacataaagaaaatgtcagcaaaaagatggaaactacaaaagagaaacaaaaaattatttcaacagccttagcagcagaatgaacacagctaaggaaagaatcaacaaccttgaagatatgtcatagaaagctttcaaattgaaacgaaagaaaaagagacaaaaataaaggcaaaacagaatccaaaagctgcaggataatacaattgtctaacaaatgtgtaaatggagtcacagaaaaagaatagaggaagaacaggacagaagacaagctggagaaataatagccaagaattttgttacattaatataatgcaacaaaccagaaatctaagaacctcagaaaaatccatgcagaagtcaagaaaaactagataaattatagtcaaactgctgaaaaccaaagataaagaaaagtatcttaaggcaatcagagaaaacagaaacattatacactgtaaaacaaagacaagaaaaacaacttttttttaaaagccagaaggactatggtaatattggcgaaaaagatttcagaacaaggactatcaccagggataaagagcgatatcatataataataaaaagatcaattaagcaaaaatatgtgataatcttaaatgagtaaacagtttcaaaatacataaagtgaaaacaatagaactgtaaagagaaatagctaaaagtcaaaggatgtcatttaaagctgatgaatctttggccgggcatggtggctcacacctataatcccaacactttgggaggccgaggcaggaggatcccttgagctcaggagtttgagaccagcctgggcaacatagtgagactctgtctctattaaaattttttttaaaaaattagctgagcgtttagctgggcgtggtggtgggcacttgtaatcccagctactcgggaggctgaggcaggagaatcacttgaatcctggaggtggaagttgcagtgagctgagatcacaccattgcactcccgcctgggcgacagtgagactctgtctcaaaaaaaaaataaaaaataaaaattacctgagcatggtagcatgcacctgtaggcagtcccagctactcaggaggctgaagtgggaggatagcgtgagcctgagagatcaaggcttaaatgagctatgattgtgccactacactccagcctgggcaacagagggagacttgtctctggaaaaaacaacaacaacggacaaatccatagattagatagacagtggtattcccaaggtgaacactaataaaaagcatgtaattaaccaatattgtatggtaaagagaggcagaggagcagagaggaagacaatgtacacaaattttatcatttcttagtatcatcaaaagaaagaaggtatagtgcattgagtaaagttacaaagattgccaatagaatatacaaagctttgtaaatatcataagaaataaattttttaaaacaccattaggttaagataaatattagacacaaaaaaaacctgaggtgaaagttttttaaacctatggaatcgtgtaataatatttttaaaaaacagactaaggccaactatattaatcatatcaataaatataagtaggctaaactcacctattaaaaggaaaaagactgggaaagaagacctgggaagatatttctcaaaaaatacttaaaaatggccaacaggcatatgcaaaaatgttcaacattactaatcatcagagaaatgcaaatcaaaaccacaatgaggtatcacctcacacctgttagaatctctattatcaaaaagacaagagatgacgagtgttgacaaggttgtggctagaaaggaattcttgtgcactgtggatgagaatgtaaattagtacagctattatggaaaacatatggagcttcctctaaaaattaaaaataggaccaggtgcggtggcttacgcctgtaatcccaacactgtgggtggcagaggtgggtggatcacttgaggtcaggagttcgaggccagcctggccaacatgatgaaaccccatctctactaaaaatacgaaaattagccgggcatggtggcaggcacctgtaatcccagctacacaagaagctgaggcaggagagtcacttgaacccgggaggcggaggttgcagtgagccaagatcacacccctgcactccagcctgggcgacagagcaagactccatctcaaataaaaaaaaaaattaaaaatagaactaccatatgatccagcagtcccacttctgggtatatatccaaaggaaattccattagtatgtcaaagagatatcttcactccaatgttcattgcagcattagtcacaatagccaagatattagtcaaccttagtgtccaatgacagttgaatggataaagaaaatgtggtagatatatacaatggaatactagtcagccttaaaacagagatcctgccattttgacaatatgtgtgaacttaggggacattatgctgagtgaaataagccagagacagaaagaaaaatactgcgtaatctcatttatacgtggaatttctttttaagttgaacacatagaaacagagtagaatcgtggctatgggtcatggcagggggaatgaggagatgtaggttcaagggtacaaaattacagttatgagatgaataagcatacagatctaatgtatggcatgtctatagtttaataacactgtattgtatagtggaaatttgctaaaagggtagagttcaggcactcttaccataaaagaaattaactatgtaaggtgatgggtatgttaatttgcttggttgtagtaatcagtttactatgtactgtatatcgaaacaggctatataccttaagtatacacagtttttaaaagtatgtcatgtaattgcaaacaaaagaaagcaggcatcatatattttatctaagtaggtggaattctggccaatgtgcattaaacaacacaatgacattttaatgctataactgccaatgtccaataaaagatatcacattataagtctatacacaccaaagaaattaatatagcaaccaaaacaaaagaaaatgtagacatacataagcagtaagaaataatccaccactgggtcaggtgcggtggtgcatgcctgtaatcccagtactttgggaggcccaggcgggtggatcacctgaggtcaggagtttgagactagcctgactaacacggtgaaaccctgtctctactaaatacaaaaaaaaaaaaaaaaattagccaagcatggtgcctgtaatcccagcaaatcaggaggctgaggcaggagaatcacttgaatccaggaagcagaagttgcagtgagccgagattgtgccattgcactccagcctgggcaacaagagtgaaactccatctcaaaaaaaaaaaaaaaaaaaaaaaaagataatccactacttctcactccataaaagatcaagtagaaccaaaataaataaataacataattagtaagttaatgctaatcagtgtatatcaaacttcagtgccccttctcaataacagaactgctttctttgggacagcaacataactagctaaaatactacattcccacacttctctgcattcacatataggatatgtcttaagttctgactagggaggtcgaagtattacagtgtagaacttcaggaaaatctccttaaagagaaagatgnnnnnnnnnnnnnnnnnnnnatgcaagtcctttcttttccttctttatccagaaaacaaaaaactgaatatgatggcttgagctttagcaacatcttgtaccatgaagacaagggcatgtgatcagtgaatatgaaagatcctgggtttctaacaactttgtaaaacaaccatatcagccctgaactgcccaactctagatttttttttcctggggggaaaaaaccccaacaactctgcgtatttatgctattatagatgggtctctgttatatgtacgtgcacctaatcctaatagatatgaacttgaaagcaaagaatgcccaaagaacattcaccaaaattgaccatatattttaggacataaacatacacaaaccaaactcaagaaaacagatggagggattagcctaaaacaggagaagggtcatctcttcctctgagactagaaagagaccaggtgcatatacaggtaagtttacagatgtcaggcagcaagtcaagggcttttcccttcttcatcacctcagttttctctgtgaaataggagccagaaatgtaaaaggtagaggaggaagcagatagagagtaagattttcatgttttgaatgccactaagggacaagttgagggagaatagacaagattatagtctttgtcttttgttattgttgttattcagattgaagaaccaccaaagttttcatttttatccaattctaccaggtataaagggaaaaataaaatggttagtctcagaggctcattagataggaagggtggtggtttaaacacagtaaaaaatagaaataaaaataaaaaaaccttcgttaactccattaaagcttgcagctagggagcaagaaacagattttttgttgttattttgattttgttgttgtttttgcttcagctaagaggtatgctgcaaaccagatccctgcttatcaaggactaaaacccctaactttaggaagaaaatatacatattcatatgtatgctcatatacaggcccatagaaacacatcatacaaatgtgaccccaaatgtttttattattaacacaggaggggggaaaaacagtaaataaacaacccaaggttaaaataaattcaaaattaaactaccaatttaatcaaatgtcctaatttgtgccccaatatgtgcctctttttgattttcacaaattagtaaattagtactaacaaatatttttgccagcctaatagaaaacagttacgtaagtaactaaataggaacatcaactcacctcattaagcgcattttgtgagacttaagagagcatcaccacctggtggtagattcagggtaatgattagcaaccaaatagaaggaaatggccagtccctgtcacagataacatacattatgagagaccaaaagccttggccaaaactaagaccaaaaaaagtagcactataagtgattagcttccaacttaatagaataacagaaatttggaagggtgatctagaatccacatttaagattctaatacaatatcccatgtagtacaaaaatcctgtctacaaaactatagagatatgatacattgtctgtgctaaatacctgtagtaaaaagaaacaacttctctggatatcatagattgctagataggtttaagttgggtttaaatttgaaactttttatgtccctcgatcagtcaatctaattttgcaacccaatgcaacatagaaaacccctgatatattctatagcctgacttcaaatatatctctcattttgtttttgtttgttataaataacaccccatattcttcaattgccttgatttctagataccgtacatcctggtcttccagattttacagatatatttgatttgtcagcatctatttttaatgcagcacctaaaataaaactgactcacatgttggcagtggagtataggcacttctattaatactttccatgtttcctttcagattttaatagctgtatcacacttctgctcacatgttttagtgacaattattcctgaacagctttatgttacatggtgaccagtaagctgagtgttagaagaggctgaatagatttaagggccggcatttacttttgaaagtctatccctaaacctcagctctcttcctctgctctataaagttccaccatatactcacttatgaaagaagaggaacaataaaagagtaacttcaagataaccacgaagagacagtaaaacataaaaattttgatacatttttatgcttagaccataaggaggtttatggtgacataggcatcacacagcaagggagccccaggaggattatatttagatatctatatagatagatagatagatagatagatagatagatagatagatagatagatagatagatgtagagatagagatatatgcagctctctgaattggagatgcagaacctaaggcagtctgctgtttgctctctgtctgcgctggcctttgagacaatataaaaagcaaataagggtattcccaatagtaaaagattattgaggattttttctggggagtgattaggctggaaaggtaggagctaaatattgttttggcagcagcagcttttgcaacaataatagaatctgatgcagactgtagcaaaataaaatcacaccacttagggaaatgccatcggtaactttggacaaatgtttcatatggttcattatgaaatatcggttaataaattaggtgtttatcataacaaatgttttcaatttgacttcttgttcttttcaatttctcatatacatgcccgtatgcactcatgatacagatgggacgcaaaacatttttacctttaacatagaaaaaagtgtataatatagatatttatatatataatttcagctgtaatagaaatggctacaagtgagagtctatatgaaataaacagtatgtaaagaaaagatattttattagaaggcaaataattttaaccaatttatttctctccatgattaagatttagctgtatcgttttatttttatgttccagggaccttgaaggcaaccatatccataatttaagaaatttgacttttatttcctgcagtaatttaactgttttgtaagtaatatgctatgcttttgaagtaatattatcttttcttacaaataaaatttaaaaacacccattttatggaaaaaaaatcccaaagaacatcaagagtctgttgttggatctcagtttgagaaacactaaattgaagtcttagcctataagaatgtttatcctttgcaaattattatggtataaattaagtttttctttacaattgtgaaaaaatagttacaatcaaaatgaaaaacaaaatactgctgaatgttcacaaccttgaggatgtaattatggacatcaagataaaccttgaagtgttaatgagtgtaattccttcttatgcatctctggcctattttaaattcacatggtattttctgttaaaagtaaaggatgttaggtcttccttcagtaaaaaaaaatccaactctcctattcacagcttattttaccagaatgtttttcaaactatggattgcaactaataagtaggtgatgaaagtaatatatagcacaatttattatacccttgtcagcatttttaagggaaacagaatttaattgaatagattatatcagactgcaatgcagataataaatgtattgtttcatgagccttagggtgtgtgtgtgtgtgtgtgtgtgtgtgtgtgtgtgtgtgtgtgttttatgatccaatataaaacacattttttactgtgtgttaccacaggaatgatttgaaaaccattatcctagactacacaggacccctgtatataggcgatacaatagctcccactgatattaccatatgttttctccaattccccccattccaatgggttccaatgagttccagtttgaactcctcctgagttcagcaatcttcaggtacagggtgcttgatataaataatgcaaaatagtgtatagtaattgcccaaaggaaaccaaattgcacctgaaggacacagaacaaatagatatctgaaaaacttagaatttcttttctattgtacttgtatttattttttaaggaaacctctgtattaagagattatttgtggatttcctcttggcaggtgttgtgcttttaaggtccaagaatattgggaaatggtggtaatggtttggagtgcagtgaggaaataaatgggaaaggacaatttgaagacatgtcatacaatgtttaaaaaattaaaagccctttaaaacttagttctgagttggtcctctaggctagctggtaacacatgagatcagtgcagaaatgtcaagagttaaacagactgattcagcatcccaaattagagattcttctaaaggggttcagctaagagtggacttccttaggcagatccgcccgaaatcacatcaagtaacaaatgagtaggagtgctgtggtgggtgggctattttgttagacagtcatgctatgcagactgaaaagacaagtctaaaacagctcctatgctcttggttgcaagatatgcagtctgtattctcaaaagttggggttttcaccatttctcgtgcaaagctcttcctccctatttcacttaaaattttgaatttctattattatcatcatcaaaacatttgagaaatttaggattaaaattaaattggataatttatactacttcaaaatgtctttatgtgaaaaatgtactgtatattcattatctttgtttctgcataccgttcctctctttagtaattcttgtcggttacctaaagaagttacaatgtatttttctttttactttcagagtgatgaggaaaaacaaaattaatcacttaaatgaaaatacttttgcacctctccagaaactggatgaattgtaagtatgactgaacatatactgataagaattttctttctactgttttttcacacttgtacttacatgtgtttatacatttaagaaatattacttatctcctctttctaagcattatttacatatatacacctcaagccacaaaggaattcagatggcatacaaaaaatatggaaaataaaaatataaatatttgaggaaagtgggttaaaggaaacacagctgtaaagaaataataaagccagtataaaattaataaataaaatacattctacaccactctgttctactcctaaagaaggacggtaaatttatggggggttttttgttttgtttttgttttttgttttgtttgttttgagacagggtctcactctgtctcccaggctggagtgcagtggcatgacctcggctcactgcaacctccgcctcccaggttcaagcaaatatcctgcctcagcctcctgagtagctgggattacaggtgcatcccaccatgcccagctaatttttgtatttgtagtaaagatggggtttcaccatgctggccaggctagtaaatttgttattatgtttcctaaaggattaggattcagggaccataagattagaagataccactttgctgatttgaaaccaaaggataatcttgtatccataaggaaattagacactactgtggataatattcctacctataataatggaagagataaattatttttataatgcccctttttaatgccaatgacataattctaaagggcactataacaattctatgatgaaccaaagcccgtggtctaagtacattgtagttgattttcagaataaaatagatgtagaacaatggatgaagtgcttatccttcagaccatttttttatattttagtgtcaatttttttcttttcattttttgtttgctttttttctagtaccagggtgtcactctgttgcccaagctgaagtgcaatggtacaatcatagctcaccgtaacctcgaactccttggactcaagtgatcctcccacctcagcctcctgtgtagctacgactatagcacaccaccatgcccagccaatttttttttattttttgtagagacagggtctctgtgttgctggggctggcctagaactcctggccttaagcaatcctcccgcctcagcttcccatacttttggtattacagacttgagccactgtgcccaagtagtatccatcttctggaaagaatctgaatgtggacagagctacttgttttgacaattagctagacagaacactgatttattaaaacttttccataaaaattaaagaatacaattagaatgttatgaaaataacaccaggacaccttacttgggcactcaagaagttacaatgtgtttttccttatgctaggtagagggaatacatgtaccaggagcaggaacgtttctcaggtaacaatcctgcattctgccccaaaacatcagggaatgagccattaaaaacccaacattttatctgtagcctgaaacacttttggtggtcagtaccaatcattcacaaaatgtgcaggaaaatctcaaaaacaaatagacccaaccatctgttgtagcaactcctggcacgtgataattgaaccatatcatcagcacataggaaagtagtctaaatagtagggggagatgcagctggatgatccaaagtattatctagacattagaatacaagttagtcaaggaatactaactatatactttttcttgtttcatccacttgaaatcatacctgaatatcaagggacagttccttcaaatcctagccttcatggtggcagtcaggtgcagattttatatatcaataaccaacagtgaacatgaactcaaagggcttagtgcataaccaatgctaatccaggttcagaagtaaaggaaagaataatacaaactgcagagggtgaccaaggccaataatttgtcttgctaattattaggtggactttaatgcacctaatcccatattaaacacttacctgaaaaatcagattcaccaggacaaaaatagcatgttttctaagagtcgatggctttcattggatgagtctatatctaaagtgtccttttgagagagggttgaactacactctgtgcccctccaggctccatcacaccaacagagttaatgaggacaaagaggattcacttgtcacagaggactttaagtagctctagtgacagaaaatctttgccacgtgggtgacttaatttgagcttttaaagtcaactactctagtttacaaggtgtttcctgagttcattcagaaatggaccttgactccaattaagtttagcctaactttcctaaacttaagctgagaaaatggccctttcaaatgtcacttgggatctgggccaacactatcccattacatgattcatgctgttagaactatctgccaggatttgctctgataacaaaacccacactcccaccagtaattgttgaacaagacatttggaattttaatatcccagtgcaccattttaaatccatttgcacattgctttactaatatgatcaatattttacttggcttcctatacaaggaactgaaattgtgccccacttttactaaagatgaagcagatagactcagtgtattcatagtcttctaactggggatggagaaaacagctagtccaaaactgagctaggcactgggtagcccagatgaatagatatcgttcttgtactcaaagaactcacgtttcagaaaggaagcacatatgtacagaaacagttgtagtatgatgttatatgtgctatatgtgttatatgtgctatactagaagtgtgcaagaggaatgcataggagaacaaaggacaaaacacttaacctccctgggctcagaggttaaacagaggaatgacgtttgaatgaagtctagaaggatgaatatgagatcacaaggagggaaagaagagcatggggattaaaatactgaagtgcattcgggtcatggtgaaaagttactttggatagaaagtggtaggcaaggagactggaaacatagtcaatggcaagacatttgaatatttaaaggttcattatggccaggcgcagtggctcacatctgtaatcccagcactttgggaggctgagacgggatgatcacttgtgcccaggagttcaagaccagcctggggaacatgaagaaacccagtctctatcaaaaatacaaagattagctgggcatggtggcatatggctgtagtcccagctactcaggaggctgaggcgggagcatgcttaagcccgggaggtggaggttgcagtgagccgtttgtgccactgcactcacacaatgcggttttgatttcatctcctaaggtacagtaagctattgaaggagattccaactctttatgaaagagatggaatttttgagtaattccttcagttgtctaatcagaacaatctgttgacaattcaccgataaatatgtaactaacagcaatagtctccaggttcagtttgcagcaaagacgtttataatatttatcacattatattagccacttatttttagttttaaaaactcagtctaaaaattgtcctacccttcgaggtcaaaaaatctaacgtttgccttataagcaaaccagcatatataacaaatacatctattcattctcctacctatcccagtggcaacaaatatgatttggagatgaatagaagaaaaggttagactttcccttagtatctcttgatcaccttacagagctcaagtctattgaaactttttcttgtataaaagaatctgaggcctttcacatgagagctgccactgtcaaagctaccacgagaggtgctgctgtcaaacacctttttaggactaaggtacgaggtcataccatgttaagcagaccctctacacatacatgagatggcatgcaaagtatcctaccccaggataatatgagagcctgtgtatatcagctgtggaagaaactcgaacttgaaataatacacttccataataatcacaacaatcctaagcggaagaaaaaaattaagatcgcaaaccatgcatctattctaacacacaaaaaaagagaacaaaggaagaaggggcacaacacagaaatcaaaagaatgagaaaatgcgattgattaaaaccagatcaggccaggtgcagtggctcacgcctgtaatcccaggactttgggaggctgaggcgattggatcacaaggtcaggagttcgagaccaacctggccaacatagtgaaaccccgtctctactaaaaatacaaaaattagccaggcgtggtagcacacacctgtaatctcacctactggggaggctgaggcaggagaatcacttgaacccggggagacagaggttgtggtgtgccaaaatcgcaccactacactccagcctgggtgacagagtgatactcggtctcaaaaaaaaaagatcaaataccatcaagtatttgtcttccaggggatgatgaaatggaataaaatatttttatattttccaactttgctccttttttaaatttttagacttctggtgattaatataactcaccaatggcattgttgaaaagttgtatagtggtttcctaatgaatttcagaacaatgagtaaagtcttaagaaaataatatcacatatttgcaattatttctccagggatttaggaagtaataagattgaaaatcttccaccgcttatattcaaggacctgaaggagctgtcacaattgtaagactgatgttaattttgccacctcgtttctttattttattattttttaaattgtaaaatatgcataacataaaattagccatttttaagtgtgtagttgagtagcattagctacattcacattgctgcccaaccaccaccaccatctacctccagaagtttttcatgttgcaaaactgaaactctagccactaaacactaacttcccactcaccgtttccccatcccctggctaccaccattctactttgtgtctgtgtgaatttgactactccagatacctcatagaagtaaaatcatggaatatttatctttttgtgacaggcctattctacttagcatactgtcttcaagtttcatttctgttgtagcagaaatgaatttccttccttcttaaggctgaacaatatttcattgtgtatatgtattgcagtgtttattcacccatcaatggacattttagttgcttccatcttttgcctattgtggataatgttgctatgaacatgggcgtacaaatatctgttgactctgctttcaatttttaggtacctactctcaaaagtagaattgctgtttcatacatttctgtcattttatttttaatgcatgtttcattctgttttccataggagtttaaccattttacatttccgctagtagtatactagggtttccatttctccacatccttcccaacacttggtattttctgtttttttgataataggcatgctaatggatgtgaaatggtatctcactgtgattttgttttgtgattcccagtgattagtgatgttgagcaacttttcatgtgcttattggccatttggataccttcttgcagaaaaatctgttcaagtcattcactcatttttcaattggattgttcaggttttctgtagttgttagattgttggagttcttatatattctggatgttaacttcttttcagatacatgattttcaaatattttctcccattgtatgggctgccttttcactctattatggtgtcctttgatgcacaaaagtttttaatttatgtatagtctaatttttaaatttctttttttgttacttatgcttttggtgtcatatccaaaataacaccaaatgtcattggtgtcatgtcatgaagcttttcctgtatgatttcttctaagagtcttatagtttttagctttaatatttaggtcttaaatccattttgagttaacttatgtacatggtgtaaggtaaggatccaacttcattcttttgcatgtggatgtccagttttctcaacacaatttattgaaaagactactctttccccattgaatgtccttggcacccttgttgaaaatcatttgaccatatatctgtgagtttattcctgagctctctattctattccattagtctacatgtctgtatttcagccagtaccacactgattgctgtagctttgtagtatgttttgaaattaagtggtgtaaaatctccaattttgttctgcttttttcaagattgtttggctatgtgggctccctgcattttccatatgaattttaggatggattttcatatttctgcaaaaaaaaaaggcaatgggattttggcaggttgctttgaatctgtagctcactttgagcaatactgacatcttaatattaagtcttctgatctgtgaacatagcatgtctttcctttcattggtgtcttccttattttctttcagcaatgtttcgcagttgccagggtatttatctttcacctccttggttaagtttatttaagtatattattcttttgatgctattgtaaatggaattcttttcctcattttcttttgtgattattcattgcatatagaaacacagctgatttttgtgtgttaattttatatccaggaatgttgatgaatgttttagttcaaatggatttctttttagttaaatctttaggatattctacatataagattacatcacctgtaaacagagatcatttttttcttcttttacaatttggatgcctgcctttcacttttttttcttgccgaattgttctaattaggacttccaacattatgttgaatgaaagtggtaaaagcaggaatccttgtcttgttcccactcttaagggaaagcttttggtcttttaccattgagtgtgggttttcatatacatcctttattatgtgaggtagtttccttttatttttagtttgctgagtccacttcatttttttatacaacccattggtcattgtcattctttctctctttccttctttctgtaactgtggctcccccagcagttccttccatcccccatgtaacttatggtctaatcttcagtaaatatttttgtttatttcctctttttttttaattttgtttttgtagagatgggggcctcattatgttgcccaggctgctcatattggacttcaaggctcatgccattctctcacctcggcctcccaaaatgctgcgattacaggcatgagccaccacacccagtctaaatattttaaaaagagaaattttcctgagaagtttcctttaatcaatgattcttgtttcaaggtgttgtttttcaaagattctgaaattttctccatttaaatttacctttcagttctctttaagaaggcaggtgcttgtagtcccagtgagttgagaagctggggcaggaggatcccttgagcccaggagtttgagtacagcctgagcaacatagcaagtccccatctctaaaaaattaaaatataacaataaattccctttaaagtctacttttcatttcatgtttcatgacttaagatttattgtaaaatatatgatatattattccattaattcaaattttgactaaatgagattattttatttcattttgtttaaaccatatctgatcttaggcaaaatgtgaagtagatgcggctctttctcagtcccctaccacttctctggtggcagccctttcttgacagctccgccttcatgcctatgttttattaggtctcagtctatcactaccgtaatcacagagtatctaccacaagctgggcactgttctaagtgttttatcttaattaattcacttacatgtacaatcaaccctgtgaggccaatgctattgctatctctttatttcactgacaaacaaaaattgtatatatttatcagtacaacatgatgttttgaaatatgtatacattgtggaatgcctaaattgggctaattaacatatgcatcatctcacatacttattttttgtggtgagaacacttaacgtctactctcttagcaattttcaagaatacaatacattgttatttgctatagtcagcatgttacacaatagatgtcttgaacttattcctcttttctaagtgaaatttttgtaccttttgaccaatatattccaatcctttcccacctgcctctagtgaccaccttctactctctacttccatgagttcaacttttttagattccacatataaatgagatcatgtggtaattgtctttctatgcctgacttacttcatgtagcataatgtcctccagattcattcatgttgttgcaaatgacaggattttctgtgttttttaaggctgaatagtattctattgtgtatgtatacatatttttttatcaagtcatcctttgatggacacttgggttgaatccataccttggctattatgaataatgctgcaatgaatatgggagtacagaaatctctttaatatactgattttatttcctttggatatatatccagtagaggaatttctggatcatgtagtagttcaatttttgatttttgaggaagccccatactattttccataatggttgtactaatttatattcccatcaccagtatgcaaggggcaaccttttcttcaaatcatcctcaacccttatctttcatctttttgataaaaattattctaaaaggtgtgaggtaatattgtggtttcagtttgcatttctctgatgattagtgatgttgagcactttttcatatacctgttagtcatttatatgtcttcttttgaaaaatgtctattcaagccctttccctaatttttaaccagcttatttgttttcttgctgagttgtttgagttccttacacattttgggtattaaccacttaccagatatatgatttgcaaatattgtcccccattacacaggttgtctcctcactctgttgattgtttccttagctgtgcagaggctttttagttttatgtaatcccattcgtctatttcacttttgttgcctatatttttggggcaatatccaaaaaaatcatcacccaggttaatgtcctggggctttccacctatgttttcttctagtcgttttataattttacagtttaagtctttcatccattacgagttattgtatactttcgttcataaatatgttaaagtaacccaaaataaacagattcactcgctttactcatgtagtttttagaaatgacctattgctgctttttttaaaaaacaggaatctttcctataatccaatccagaaaattcaagcaaaccaatttgattatcttgtcaaactcaagtctctgtaagtattcacatatggggatagttttatgataaaattgttttttaaatactaacaatgtatatttttatatatttacttcaaatcataagctttatttccaagacattagtttagctccacaaaaacatatgggtgcttgctgaactataaacagacaactattagttttatcttatatacttgtaaattaaaaaataatgatgaattattttatatttttctataagtcattaggagcttatgttgatttgtttgctttgacccttcaaagacatctgtgcatattcactctcttaacactgggtattttataatttattataagtgtttttaccccaagatggaatatgctagattatataaatccttacttgtaccacacacacacaaaaagacaaaaattctgttagagccaaagaattgccttaaaagataagcttcagggctgagtgcagtggttcacacctgtaaactcagcactttgggagtccgaagcaggaggattgcttgagatcaggagttgaagaacaacctgggcaacatagggagatgctgcctctacaaaaaaataaaaataagcaaattagttgagtgtggtggcatgcacctgtggtcctagctacttgggaggctgaggtgggaacattgcttgagttgggaggttgaggctgcagtaagccctgttcataccaccacaccagcctgggcaacagaggaagaccctgtctcaaaaaaaaaaaaaaaaaggtaagcttcagttcatttaatttgagtgttccctcagtaaaatgacattttattagaaaaaaatttattaattaaaaattactaggaaattttcaaggatgtaaagcatcctctgctattgtaatattgtacaaaagataatgcttgtgcatttattccacacatatttattgattagttaaaatgcacaaagcattgtgccatgatctgtgaggatctgaaaaaaatcaaataaggaagataatacgtgtataaataacacaatcagaaggaggaggatttggggaagtgggtgggttgagtataattattttgttcagagtaagtgttaactaaaagcattttattaaattgtccttcacagaaactcaatttattaaaccatgtataatacatgttcctttgattgattattaatttgatatttttagcagcctagaagggattgaaatttcaaatatccaacaaaggatgtttagacctcttatgaatctctctcacatgtaagtagatattttattgtttttcactgtgatgttaatatttgtttccatgtgtattatgataatgcatccaatctattaatattttctactaatttgccagctataaactgaaagtttgtgttcctccaaaatgtatatattgaaatactaaccccaatgcaatggtacaaggaggtagggcctttgggaggtgactaggtcatgaggacagagccctcatgagtgggattagtgcccttagaaaacagactctggtccaggccagtggctcatgcctgtaatcccagcactttgggcggccgaggtgggtggatcacctgaggtcaagagttcaagaccagcctggccaacatggtgaaacctcgtctctactaaaaatacaaaaattagccagtcatggtggtgattccagctactcaggaggctgaggcaggagaatcgcttgaaccctggaggtggaggttgcagtgagccaagatggtgccactgcactccagcctgggcgacagagtgagactccatctcaaaaagaaaaaaaaagaaaagaaaagagactctggagacgacccttgcccctccaccttgtgaagacagacagagaagatggccatctatgaaacatgtggtcccctaccagacactgaatctgctggcaccttgatcttggtcttcccagcctccagaactgtgagaaatgaacatttgtcgtctaagtcactcagtctatggtatttttgttacagcagccaagtggactgagacatgtctaaacaataattaaaactcttaaacctttgatattgggtgagatgattttagttttccacagtctggtagaatctcataggagattttttgaatctcaggaaacatgatgtgaggggaatccacttggtcttgtaagaagttctcctcagctctaataactgttcacagatattgatgtttgcctaatgagctagtaattggtgtatagggtgtgttagtccattttgcattactacaaaggaatatcggaggctcggtagtttataaggaagagtttattttggctcacagttctgtaagttgtaagagaagcatggtaccaacctctaattttggtgaggtcgtcaggaaagcttttaatcatggcagaggacaaagagggagtaggtgtgtcaaatggcgagagagaaagccagagagagaagaggaggtgccagctctttttaacaatcagatttcatgtgaaataatagaaggagaactcacttattactgcaggaaggacaccacaccattcatgagggatctaccccatgacccaaacacctcctactgggccccacctccaacattgggaatcaacttttgacatgagatttggagtagacaaatatccaaactatatcacatggtacaagtgctaccagatgaagaggaaggaatttatataggcaatataaaataattataaataaatcaatgctgcaaatgaaggtagttaagaagaagtctttctcaatgaaaatatccccatatatcaaggcatgattcaagcaagcgtgcatggatgaaatggtaaactttgaaacatcttttattcaaagagtatgtctagttgtacctgtgattacatgctttagaagcacttttttaattgaatgcaatttcatagcagttattagaatgatccatgccatggaaattaattttcaataatttagatactgtcagctaccatcaactctgtaatcttgcttgtattttaagtctaacacagaaccctgtttttgttttccatagttcctcagaaagatggcttataaaagattcctttcttgtatgcaacataaagcaatctgactaaattaaacagaacagaatttattggaagaaaatggtataacacagaatctgaggaataatttatagcctctggaattatccatccaagtgtcattcaatcagattcagtttcagggaagagaatctagttgatcacgtctagggtacttacctactctgggctagggattgcctccactgaaggtcccaccataacttctcaaaaagggagaagtaattctctcaaaggaaatcagaacactattatcagaagagtgattgagtgctgggcagccaaagcggcaaacagagttactataattctgttgataaaagcaaaacttcagcctaagacacatagtaaaataccaatcaacactccttctttcctcatgttctgctctcctgtccttcatggtttacagaataaatggatataaccgaatggggaaatatcagcaattgaccttgagcttgacaggacaaattgtaatcatcaggtttttatcttttcttattatagctctttatacactaaagatcgtttatattttttggcagaacacatagctttatagacaaatagatctaatttgaagttcaatttgcatatttagtagaaaatttcctagcaaataacttgcctccactgaagattcatctcttcctattaatgatgctaacacctacctcacggaattcatttgagaacttatttctgatacttaagaaatgctcaataaaaggtgttggtgttggtggtaacacaatagtaattataaattatccacatggtatatttatcaacaaggaaattctctctgttgatgaaagaagtcactcaacaaatatttattgaacgctttattatgtaccaaaatctagtgtgagagataggcatgttagcaagtagttacagataatataannnnnnnnnnnnnnnnnnnnnnnnnnnnnnnnnnnnnnnnnnnnnnnnnnnnnnnnnnnnnnnnnnnnnnnnnnnnnnnnnnnnnnnnnnnnnnnnnnnnnnnnnnnnnnnnnnnnnnnnnnnnnnnnnnnnnnnnnnnnnnnnnnnnnnnnnnnnnnnnnnnnnnnnnnnnnnnnnnnnnnnnnnnnnnnnnnnnnnnnnnnnnnnnnnnnnnnnnnnnnnnnnnnnnttattcttctttctagttgtaactttgaattctttaataagtctgcctgtctcttccttctccttaccctccccagcctgtagtatcctctgttctacttttacttctgtaagatcgacatttttagcttccatatatgagaacatgaggtgtttaacattattcctggcttattccacttaatgtaatgtcctccatttcccacctagttgccacaatgacagaatttcattctttttttatagctgaatattccattgtgtatatctaccacatttttttatccattcatctgttcatcaacacctaggttgactccatatcttggctattgtgaatagtgctgaagtagcattgtttgtatggggtaattcctgaggtttgttgcctcacgccaaggaaattaaggacgtggacacacagggagtgaggttaagagcagaggtttaatacgggagagaaagagaaaagctctctctcctgcagagagagaggggctcctgaataggtcttccagttctgtggtgaaatgcacagggttttaatacagtagcttgaggaagccatgtttgatttacatagggcccaaaagattgcttggaccaggtgtgccatttgtatagcatgcgaagaagctggctgccccaccctaatctttcattatgcagatgggttctctacctgtttggcaccatgttgtctgcttctttattgtacatgtggttgacaaagaaaaggaaagatggagcctccatgttgaacatgcttggcccccaggtagccttttcctattggcacagctgccagcattcacctgtgcaagcttctagcttgcttttctatgtctgcagcttaatttttcaggctgctctttgttagaaaagaaattatttggggctgctttttattaaaagagaaagcttaccaaggactctcttaccctcactaactgcctaaatactttctttttagctcctgtatcagtgctgcaataaacatgggggtgcagatatctctttgatatgattttcttttctttgaatagattctcaggaatgggattcctggatcatatgctagtttttttttttttttttttttggagacagagtctcgctttgtcacccaggctggagtgcagtggcgcaatctcggctcactgcaacctctgcctccacaggttcaagcgattctcctgcctcagcctcccaagtagctgggactacaggtgtgcgccaccatgcctggctaattttttgtatttttagtagagacgggttttcaccgtgttaaccaggatggtctcaatctcctgactgcgtgatccacccacctcggcctcccaaagtgctgagataacaggcatgagccactgctcccggcccacatgctagttctatttgtagttttctgaggaacccccatattgttctccgttctccatagtgcctatactaatttacattcccgccaataacagttcccttttctccagattctcatcagcatttgttactttttggtctttttgataatagccatccatccaacgttggagtaagatgatacctcattgtggttttaatttgcatttccttgatcattagtgaggttgaacattttttcaagcataggttggccatttctatgtcttcttttttttttttttttttggagacagagtctcgctctgtcgcccccaggctggagtgcagtggcacgatctgggctcactgcaagctctgcctcccaggttcatgccattctcctgcctcagcctcccgagtagctgggactacaggagcccgccaccacgcctggctaattttttgtatttttagtagagatggggttttaccatattagccaggatggtctcaatatcctgacctcgtgatccacccacctcggcctcccaaagtgctgggattacaggtgtgagccaccgcgcccagccttgtatgtcttcttttgagaaatatctgttcagatcatttgcctactttttaatgggatgttttcttttctttttttcttttctttttttttctttcattggtgttgaaataacatcataacttcaataacaaaaagccacggaagcacagaaaagaaaacacttaactcttcccctgagggatagaaagcagtcacttgcagcacaataggagctgtgtaactgcatttacgtatactaaccattgcgagtacgataacggtttctctggagggattcattctcttgatcacatctaacagtttgtattctaagacatgtctaacacttgttatgtttattatgcctatttgctactctcacccacacattctttaacaatgaaatcaagctaatgataattggatgtaagtttaaagtttcagaatccctaatgttttagtcctctcaatttcatcttaagacattttctttctaccgataaaatgtaggaaataaatatgaatgtatggtgacactgaattaaatggaaaatcttattttactttctctttgtacaccagatattttaagaaattccagtactgtgggtatgcaccacatgttcgcagctgtaaaccaaacactgatggaatttcatctctagagaatctcttggcaagcattattcagagagtatttgtctgggttgtatctgcagttacctgctttggaaacatttttgtcatttgcatgcgaccttatatcaggtctgagaacaagctgtatgccatgtcaatcatttctctctgctgtgagtatttcctggttaaaggagaattgtagttttgaaatatacaaaagctttattattagaaaataagttgtgtgagtggtagaattatggaattttacatttttctcctttttgcttgtatgctgttttcacattttctacaaagaaaatagaattactttagcaataaaaaaatatgttttttaaactaggaaatttaatcaccttatgcaaattaaggaagctttcatttattagttctctctcatacagtggctctgaaggcacaatattttgttgacgcatctaaaatcttttactacaaataaaattgcaacctcctatggtcacaattttacatgcagacctatacttacttttttatgtgtatgtccagttcacagatattgacttaacaactacatgttttcctgatctctgagctactagaagttttttccactctaactgaaatgtgtaaataagaaaatatttttagggagtattcattttttcaaaaagtgtgcgcaatgtaatggcaaggtgttatgttaaatgaacactgcaaagaaaaataaggaagaaaccagtcctcaggatgtttgtagtctaggtcaagtgttctagaatttatccatgctccctcaagcaagtaaagcatcaatctacatgaggttctacttttgtatgtgtgctgcccccatgtgctgtccccatccttattcaaagtctaatgtctaaatgttttttttttattgcaagctatgtaagaaacagaactcagaagccatttactattttgtattgctagctacaaaatttttagtaagttcaatttccttggtgaagcctagactgtaacttcagagttaaaggcttagggtcagccttgtgatttatacagtgatgtgattttagggattttgtgtagaatgcttgtgcgatccaaaaatctcacccactttctgatatgtaacgtttgcttaaaaagaaatatgccaagtagtgtaagagagctaattcctgggatcggagaccctaaaaagagacagaaaaagatgtaaaaattgaaagagagagaaaacagttttgcttagaccaactctggtaagtaatttaagccccttaaaattgtactgactgcaaagcagttcataattatacatatctcttaaattataggcttcagaattcagtcattattctatcataggaacttgtgaattactttctccaagattttatatgacaccttgagcttgttgcgttgggagaatttcagtggaagagcagaaccaagtaatgccatcctcatctgagtccctaactgaatgctctacgtgattgcattttgttcatttattcgacacttctatgtgatgggtctagaacaatagacaagatctgtgctgttagagacttgcactttaaaggaaaatgaagaaatgattgcataattaactgtagagagtaactttgagagtggttaccaaagagagtctatgaatagatcctcatctgtaaatgaattattaggagaataaaaattacctcttcctaagttggaagaaacttgactattttttctagcattaaaaatattattgcttattgatgattttatgatacctatttatttctctaaatttgtgaaactatgactcctctaggtgccgactgcttaatgggaatatatttattcgtgatcggaggctttgacctaaagtttcgtggagaatacaataagcatgcgcagctgtggatggagagtactcattgtcagcttgtaggatctttggccattctgtccacagaagtatcagttttactgttaacatttctgacattggaaaaatacatctgcattgtctatccttttagatgtgtgagacctggaaaatgcagaacaattacagttctgattctcatttggattactggttttatagtggctttcattccattgagcaataaggaatttttcaaaaactactatggcaccaatggagtatgcttccctcttcattcagaagatacagaaagtattggagcccagatttattcagtggcaatttttcttggtaagaaactaagaaactaatgttcacaagtttttatttcaaatcttccaaccagtttttgttagtaagaatgagggtgaattctatcagaatccccagcaaggattttcctccccaaattatactctgatataaattccaacctgacacagcttaataaaagacactaaacacctgtatttcatgtattcaccctaaacatgctaagcaacatatgttttggctctttgttttacaatatgaacataatgatatttattatcttttcaaattcatggcaacacacatctttggcttgtgagtatacatacaactgttctaaatcagcaatgtaaaaatattttcagagtacagcaaaaagtaactgaattagaaaaaaatcactaggccaggcacaatggcttgtgctataatctcagtactttgggaggccaaggtgggaggatcacttgaggccaggagttgagaccagcctgggcaacatagcaagaccccatctctacaaaattatttttaaaaaattagctggtgtgaggccaggcacggtggctcatacctgtaatcccagcactttgggaggccgaggcgggccaatcataaggtcaggagttcaagaccagcctgaccaatatggtaaaaccccatctctactaaaaatagaaaaattagccgggcatggtggcacgcacctgtagtcccagctactcgggaggctgaggcaggagaattgcttgaacgcagaaggcagagttgcagtgaggcaagatagtgccactgcactccagcccgagcaacacagcgagactccatctcaaaaaaaaaaaaaattagctggtgtgatggcatgcacctgtactcccagctacttggaaggctgaggcaggaggattgcttgagcccaggagtttgaggctgcagtgagctatgattgtaccactgcacttcagtcagtgacagagcaagaacccatctctaaaaaaattaaaaataaaacatcactaatactagaaagcttaaaaacccaagatattcattgaattactgtaatttcaatatctcattttaaaagtaaacattttatcattcttcactacttccacaaaacctcatctcaaaaaaattcacgatttttgtggactttagtaattctttgtgaagaaaaaacccacacattatagtctttgtatctttagtaataacatctttgtatctttaataataaaaatgttttatttatgtttgttcattttgaaagaaatatttctatgcattaataatactgtttgtattccaaataggtattaatttggccgcatttatcatcatagttttttcctatggaagcatgttttatagtgttcatcaaagtgccataacagcaactgaaatacggaatcaagttaaaaaagagatgatccttgccaaacgttttttctttatagtatttactgatgcattatgctggatacccatttttgtagtgaaatttctttcactgcttcaggtagaaataccaggtacaatattttttaatctccttaaagaaataataaatctgtttttacagtgttcttttaaggaaaacaattaaaattcttaacactaaacaattcaaagaattgtacatcagatccgagcacagtggctcatgcctataatcccagcactctgggaggccaagacgggcagctcacttgaggtcaggagtttgagaccagcctggccaacatggggaaaccccatctctgctaaaaatacaaaaactagctgggcatggtggtgcaccgctgcagtcccaactactcaggaggctaaggcatgagaattgcttgaactcaggaggcagaggtggcagtgagccgaaattgcaccactacactccagcctgggtgacagagccaaaaaaaaaaattgtaaaaattgtaagtcagagttgtaggtacttttggctctgctcatcaatataacatttactggggaagaactgtttatttttttccataaatgcctaacaatacaattactatggaacaaagaagcaatgagtgaccaaaataaattccacacggtgttgaaattctaatcatcacatgcttaaggtgactagaaaggaaaacaggccaaaacaattcttaaataattactgcattttttttcaaaatgtaagaaaattttcttcctgtaatacatgcaatttagagaagatcatgccagagtgtgagagataatagaagcaaacattcttggcatttagaaagaacgttggctggcatgttgcctcacgcctgtaatctggcactttgggaggccaatgtgggaggatcacttgggcccaggagttcaaagctgcagtgagccatgattgcaccactgcactcccgtctgggtgacagagcaagatcctgtctcaaaaaaataaaaataagaaataaaaaataaacaatgtgcattacatccattaggatgactactattttaaaaaaacacacatacaaaaaaataagtgttggtaaagttgtggagaaattagaatccttgtgaattgctggtagaaaaataaaatggtacagctgctatggaagacaatatggcagtccctcaaaaatttaaaccatccaatggtttagttaccatccaatgtggaaatggtccagttaccatccaatgtggaaattctccttctaaggaaaaaaccaaaacaattgaaagcagggactcaaagagatatttgtacacccatgttcattgcagcattattcacaatagccaaaagttagaagcaatacaaatgtccatagattggtaaatggataaacaaaatgtggtacatacgcacaatggattagtatttagtcttgtaaaggaaggagattttgacaaatgctgcaatatagatgaaccttgaagatactgtgctaagtgaaataagttagacacaaaaggacaaatattttatttcacttacatgacgtttctgatatagttagattcatagaannnnnnnnnnnnnnnnnnnnnnnnnnnnnnnnnnnnnnnnnnnnnnnnnnnnnnnnnnnnnnnnnnnnnnnnnnnnnnnnnnnnnnnnnnnnnnnnnnnnnnnnnnnnnnnnnnnnnnnnnnnnnnnnnnnnnnnnnnnnnnnnnnnnnnnnnnnnnnnnnnnnnnnnnnnnnnnnnnnnnnnnnnnnnnnnnnnnnnnnnnnnnnnnnnnnnnnnnnnnnnnnnnnnnnnnnnnnnnnnnnnnnnnnnnnnnnnnnnnnnnnnnnnnnnnnnnnnnnnnnnnnnnnnnnnnnnnnnnnnnnnnnnnnnnnnnnnnnnnnnnnnnnnnnnnnnnnnnnnnnnnnnnaatttagctgcgcctggtggcatgcacttgtagtcccagctacttgggaggctgaggccatgagaatgcttgaacttgggaggcagagacttcagtgagcggagattgtgccattgccactacaacctgggtgatagagcaagactctatctcaggaaaaaaaaacaattgtatatattaatacataattttaattgtgttctgtactatggatgatggtgatagtatcttacattttatgaacaacaaaaagaaggccaagtggtgaagactgattgaacccaggagattgaaaccaacctggacaacacagggagaccctgagaccccaactcttcaaaaaataaaaaaataaaaaattaaccaggcatggtggcacatgcctgtggtcccagctactcaagagggtgaggtacaaggatcgcttgggcccaggaggtcaagactgcagtgagccatgttcacaccactgcactccagcctgagcgacagcatgagaccctgtctcaaaaacaaaaacataaaaacaaagagtaatgacagcatcaattaaattataatcaaatcagagtattttggtatttctatatatattagagtgatttttaagatgggtttagccaaagttattttttacagaaataaatatctggtcaaaagctaaaaaaatgcacactttgttttaaaatcaaatggcaaaaaagaaatctattaaatacaagcttacatattctgacaaatactatatgcaccattaaaatactcaaaaagtgttttaattattaagcacttaaatttatgacttaaatactaaacaatatgtttttcctaaaatataatcataatatgtaatcactttgtgaaaaatatttctacctaaaggaatatttttgttagtgtattcaagaagagctacttagcaaagaataccattctttttcagcactagcattcccctcacacactggcactctggaaagatatcttggaaacaaatatagacttggtatttaattatgtgacatcaaaggaaaaaaatcaaaactcaaaaaggggttgggatgaaagaaacagggaaattgggtttctataccttgtaaacatctataaacactaaaactatttcatttttcttttttaggtaccataacctcttgggtagtgatttttattctgcccattaacagtgctttgaacccaattctctatactctgaccacaagaccatttaaagaaatgattcatcggttttggtataactacagacaaagaaaatctatggacagcaaaggtcagaaaacatatgctccatcattcatctgggtggaaatgtggccactgcaggagatgccacctgagttaatgaagccggaccttttcacatacccctgtgaaatgtcactgatttctcaatcaacgagactcaattcctattcatgactgactctgaaattcatttcttcgcagagaatactgtgggggtgcttcatgagggatttactggtatgaaatgaataccacaaaattaatttataataatagctaagataaatattttacaaggacatgaggaaaaataaaaatgactaatgctcttacaaagggaagtaattatatcaataatgtatatatattagtagacattttgcataagaaattaagagaaatctacttcagtaacattcattcatttttctaacatgcatttattgagtacccactactatgtgcatagcattgcaatatagtcctggaagtagacagtgcagaacctttcaatctgtagatggtgtttaatgacaaaagactatacaaagtccatctgcagttcctagtttaaagtagagctttacctgtcatgtgcatcagcaagaatcataggcacttttaaataaaggtttaaagttttggaatactcagtgtatttgcatcatagaaaatgtctgactgtttgcaaaataatattctgttttaagaatccatcttacctctctttaagtttccatacacttgagagccaacacaacatatttattactaaaaagatgctttgctagaaactcaaaaacagcacttcttttggcacttcctgcccagttttctctttgctttaaatgaacatcatcatatggaattggaataggagagtatgagtacggcagagaagtggatcagaaaaactagaatgaggataaacatttacattagtggaaactcctgaaataaatccttgtattgtcagttaactgattttcaacaaggatgccaagacaaaaaggcttttcaacaaaccgtgctgttttaagaacagacctaagtggtttaattcacccactttagatgggtgaatgttatggtgtgtgaaatatctcagtaaagcagttaaaaggaaaaagagctggaatgcactgattcaggaacttaatttcaggaaggaaaggtctgtatgtacacatttcactttaagcagaaaatctttcttcaagaaatgactttactttctctttgcactgccagcacgtgagatactaactttttaactagttgttcttctctagtctctacgttattagaattttttgctttcataatgtgaaacctttaagcaggagaagaaaatgttttcagatagtttcaaatacaccaaaaatgtttgaaacacaaaaatactggaatcaaaccataatgcacttattgaatatatagttgtatagatttgttctgaaaataaattatctgaaatttaactattaaaaatggattgcttcggggttttttctctgcttacttggaataatctcaataagttttctacatgaagaacatggtataatttcaatataactcagagcataatagaaaactatagttctgcttataatattcaataatataactactgatagttctataataaataaaatagccaggtgcagtgacatgcaacagtagtcccagctacatgagaggctgtgtccaatctgggcaacctagtgagacactgtctcttaaatataaataaataaataaaataggctgcaatttttaaatttaaagatagcctacaaaaagtaaatttaaaaaagcttatacaaaatgaaaacagaccaagtgcagtggctcacacctatcatctcagtactttagaaggccaaggcaggaagatcattgaggccaggagttcaagaccagcctaaacaacgagacccgaaattataaaataaattagctgggtatggtggcacatgcctatagtcctagttaatagggaggctgaggtgggaggactgcttgagcccaggagttggaggctgcagtgttctgtgattgtgccactgcactccagcttgggtgacagagcaagaccttgtctctgaaaacaatttttttaaattctttgttttgttttttgtttttttttttttgagacagcctcactctgttgcccgggctggagtgcagtagtgcatctcggctcactgcaacctctgcctctgaggttcaagcaattctcctctctcagcctcccaggtaactgggactacaggcacgcgccaccacacctggctaatttttgtgttcttagtggagacagggtttcacatgttggccaggctggtctcgaactcctgacctcgtgatctgcccacctcggcctcccaaagtgctgagattacaggcatgagccaccgtgcctggcctaattctttcttaagattattttaggattagttccttagaagtcctattactactaattccaagtaatagaataggaaattttatttttatttatttattttttatttttatttttattttttccaagatggagtcttgctctgtcacacaggctggagcgcagtggtgcagtttcagctcccactgcaacctacacctcctgggttcaagcaattctcctgccttagcctcccaaagtagctgggattacaggtgcacgcctccacgcccaggtaatttttgtatttttagtagagatggggtttcaccatgtcggccaggctggtttcaaactcctgatcttgtgatccacctgcctcggcctctgaaaccaaagtgctgggattacagatgtgagccaccacgcccagccttttttttttttttttttttttttaagatggagtctctctcttgtcgcccaggctggagtgcagtggcatgatgtcggctcactgcaggctggagtgcagtggcatgatctcagctcactgcaccctccacctccagggttcaggtgattttcctgcctcagcctactaaatagctgggattgcaggcttccaccgctatgcccggctaatttttgtatttttagtagagacgtggtttcaccatgttagccaggctgatctcaaactcctgacctcaggtgatccacccacctcggcctcccaaagtgctgggattataggtgtaagccaccgcacccagccaaatatttttattaaaaagaataaccaaaaaagaataaaaacaatactcatggatacaagaaatttagtccaacaaaaatcatggtcttaacctgtttaagagtcttagaaatgcattaaatttacgaagtacacatctgaaacttcctttagcatttaacatatttttaaacaactttctagaggccatttgacttcctgtctgctcaacccattcgctcttccacccttcgacctcctgaaatagagtaacttcggatttaatttaatttgataagtaattattaacatactacataactatctccttagaaacttccacagataatgcaacagaagcactcagttaactacgatttgtatcaaggtttgcttagaaatgtagcttataaccatgatctaggtcaaatcaatcctctaaatcaagccagcctaagttgttttaaaaatctaaagtttatatcaggaaaacctcaacttttattttttacattttttaagaattactaattcatcatactaacacatcatctctcctaaatgactgggtaaaccttggcaatttagatgtggataaagtagaaggcaaagagcaaagtggaaggaagacacagctggaattgtaaagccatgcattttactcgacaaagtgtcaagtgaattgctctaggtaagagacctcaaaaatacaaaaagtggtttactttttataaaattgcttctcttttagagaaaatctttcactggaagcttcattcactcttgttttaagcctttttcttatctacagactactttaatatgtcctcagataccgtggatatactaatgattcccatatttttgcctttagcttattctatcccctaaactgcccacttgtgtatacaactgcccacttgacatttccacttgagtatctcactggctttttaatgtcattattctgcattaaataatagactagaatctgacatctgattcttctcctatagaccctgtcttgctgaattgcacccgatggcccaagctcaaaatctgggagtcatccttgactcttccttctcctttatccacaatatcaaatcacccagtcctcccttgattctacctcatacacatctcttaaatccttccactctcttcatcccaattcccagtaccttagtttgggccaacattatgtctcattgggatatttgcaataaccttttaacaagcctccatacctccagttctaatttggtcaattgatctttataggtttttagagcttacgaaaaaaattaaaaataatcttagaaaaaaaattgagtgttatacagttactagcacaaatattctgcttttggatgttgtattattttgggtttgccatagaaacagagagagagattctaaggaattgtcttatatgattatggagactggcaactctaaacatctgcagggccaatgtcccaattgaaagacacacaggctgtttagaaccaggaagagccagtgccaattcaaaggctgtcaggaagagctgattttggaagaccaggccttcaggcagaattctcccttggtgggggagggtcagccctttgttctattcaggccttctagggataggatgatcacaacacacactagaaagggcaatccactttacttagtccactgatttacatgttggcttcatccaaaaacatcctgactgaaaagtgagaatattatctaaacaaatatctcgggatctgtagcccagacaagttgaaacataaaattaaccatcacacatggggagagtaaataatataataagcctgagtattaataagtctagctaggtggctaggtgtggtgtagacaagcgtaccagttttggtgtcaagactcacaggcatattttatctcagcctgtttcagtaaacagtaatgacactttcctcaaaaaactgatttggttacatgaaaaaagctttttttttttttttttgagatggagtttcgttcttgttgcccaggctggagtacagtggcgcaatctcagctcactgcaacctccgcctcctgggttcaaacgattattccgcttcagtctcccgagtagctgggattacaggcacctgccaccatgctcaactaattttttgtatttttatagagatggcgtttcatcatgttggccaggctggtctcaaactccagacctcaggtgatctgctaccccacaaccccccagcctcccaaagtgcaggtgacaggtaacaacatgctagcagccctggcttgctctcggtgcctcctcagcctcagtgtccactctggctgcactggaggagcccttcagcccgccaatgcgcagtaggggcccctctctggggctggctgaggccagagctggctccctctgctcgcagggaggtgtggagggagagatgcgggagggagctggggctgcatgcagtgcttgtgggacggcgtgggttctgggtgggtgtgggctcagtgggccctgcactaggagtggccggccagcacctactgggcttgatcagggggacgagctccctctgggctgccagactgtctgggctaggagccacaaagtcccacgacgagtgccattgagaggtgaagctggctaggcttctgggtcaggtggggacttggagaacttttctgtctagctaaacgattgtaaaggcagcaatcagcattctgtgtctagctaaaggtttgtaaactcaacaatcagtgctctgtcaaaatggaaccatcagctgtctgtaaaacggaccaatcagctctctgtaaaatggaccaatcagtaggatgtgggtggggccagataaaggaataaaagcaggccacctgagccagcagtggcaacccgctcgggtccccttccatgctgtggaagctttgttctttctctctttacaataaatcttgctgctgctcactctttgggtccgcgccacctttatgagctataacactcaccacgaaggtctgcagcttcactcctgaagccaacgagaccacaaacccaccggaaggaatggacaactccagacgtgccacctttaagagctgtaacactcaccgtgaaggtctgcagcttcactcctgaagtcagtgagaccatgaggccaccagaaggaataaactccggacacatctgaacatgtgaaggaacgtactccagacacaccatctttaagaactgtaacactcactgcgagtgtctgcgacttcattcttgaagtcagcgagacaaagaacccaccaattccggacacattttggcgaccacgaggggactatcgcctatcgtcaagtggtgagactatcgtcaagcggtgagactatcgtcaagcagtgagaccatcgcctattgctgagaccatcgcctatcgccaagtggagagtcccatcgaacccctttcgcttgctattctgtcctatttttccgtagaattcgggggctaaataccgggcacctgtcagccagttaaaagtgactagcatggccactggactaaagacatgggtgtcaggctttctgggaaagagctctctaacaatctccgactcttcagagttgggagcattggtttgcctggaaccagcttccgcttttcctgtacttctgggctgagccgagcatcgacagagaggaaagccattcagctccggggtgccgacaacaagttggttgacccagcagccatgagcggaactctcaaaggcatgtcgcccaagtgagactcacccatctatcctatctatcctgacccttgtcccctgggtcctaatgcttgccagacaaacttccccttgcctcttttctctgaggctagcctcccttctaaaaaccactccctatctctggtgcttttctagtttctcctataacaatgatttctagtatcaacttcaggactctgttaccttctttaggcacccaggctcaccaatcagaaagacataatttttgcccaaagccccatcatagggggaactatctggaattttaggatacctcctcagacaagcaggcgtaacaaaagctattcctgaagctaggatatggggagcctcagaaattgtatccttcctattcatataagtgaggacaaaaggcatcactcttccaactctggagatcccttccctccctcagggtatggccctccacttcatttttggggcataacatctttataggacacgggtaaggtcccaatactaacaggagaatgcttaggactctaacaggttttcgagaatgtgtcggtaagggccactaaatccaatttttcttggtcctctttgtggtctaggaggacaggcaaggttgcaggtttttgagaatgtgtcagtaagggccactaaatccaaccttcctcagtcctctttgtggcctgggaggaaaactagtgtttctgctgctgcgtcagtgagtgcgactattccaatcagcagggtccagggatggttgcaggttcttgggcaggggttgtttctgctgctgcgtcggtaagcacaactattctgatcagcagggtccagggaccattgcaggttcttaggcagagggagaaacaaaacaaaccaaaactgtgggtggttttgtctttcagatgggaaacactcaggcatcaacaggctcacccttgaaatgcatcctaagccattggggccaatttgacccacaaaccctgaaaaagaggcagctcatttttttctgcactatggcctggccccaatattctctctctgatggagaaaaatggccacctgagggaagtacaaattacaatactatcctgcagcttgaccttttctgtaagagcgaaggcaaatatggagagaaataccttatgtcctagctttcttttcattgaaggagaatacacaactatgcaaagcttgcaatttacatcccacaggaggacctctcagtttacccccatatcctagcctccctgtagctccccttactattaatgataatcctcctctaatctcccctgctcagaaagaaataagcaaagaaatctccaaaggaccacaaatccccccggaccatcagttatgtccccttcaagctgtagggggaggggaatttggcccaacctgggtacatgtccccttctccctctctgatttaaagcagatcaaggcagacctggggaagttttcagatgatcctgataggtatatagatgtcctaccgggtctagggcaaaccttcgatctcacttggagagatgtcatgctactgttagatcaaaccctggcctttgatgaaaggaatgcagctttagctgcagcctgagagtttggagatacttggtatcttagtcaagtaaatgatagaatgacagccaaagaaagggataaattccctactggtcagcaagccatccccagtatggatccccattgggaccctgactcagatcatggggactggagtcataaacatctgttgacctgtgttctagaaggactaagaagaattaggaaaaagcccatgaattattcaatgatgtccgccataactcagggaaaggaagaaaatccttctgccttccttgagcagctatgggaggccttaagaaaatatactcccctgtcacctgaatcactagagggtcaattgattctaaaagataagtttattacccaatcagccgcagatatcaggagaaagctccaaaagcaagccctgggccctgaataaaatctggagacattattaaacctggaaacctcagtgttctataatagggaccaagaggaacaggcccaaaaggaaaagcgagatcagagaaaggccacagccttagtcatggccctcagacaaacaaaccttggtggttcagagaggacagaaaaatggagcaggccaatcacctggtagggcttgttatcagtgtggtttacaaggacactttaaaaaagattatccaatgagaaacaagccaacccctcctccatatccactatgccgaggcaatcactggaaggtgcactgctccagaggacaaagattctttgggtcagaagcccccaaccagatgatccaacaacaggattaagagttcctggggcaagcgccagctcatgtcatcaccctccctgagccccaggtatgtttagccattgagggccaggaaattgacttcctcctggacattggcatggccttctcagtgttaatctcctgtcctggacgactgtcctcaaggtctgttaccatccgaggaatcctgggacagcctgtaaccaggtatttctcccacctcctcagctgtaattggagactttgctcttttcacatgcctttcttgttatgcctgaaagtcccacacccttattagggagggatatattagcaaaggctggagctattatctacatgaatatggagaacaagttacccattttttgtcccctacttgaagagggaatcaaccctgaagtctgggcattggaaggacactttggaagggcaaaatatgcccatgcagtnnnnnnnnnnnnnnnnnnnnnnnnnnnnnnnnnnnnnnnnnnnnnnnnnnnnnnnnnnnnnnnnnnnnnnnnnnnnnnnnnnnnnnnnnnnnnnnnnnnnnnnnnnnnnnnnnnnnnnnnnnnnnnnnnnnnnnnnnnnnnnnnnnnnnnnnnnnnnnnnnnnnnnnnnnnnnnnnnnnnnnnnnnnnnnnnnnnnnnnnnnnnnnnnnnnnnnnnnnnnnnnnnnnnnnnnnnnnnnnnnnnnnnnnnnnnnnnnnnnnnnnnnnnnnnnnnnnnnnnnnnnnnnnnnnnnnnnnnnnnnnnnnnnnnnnnnnnnnnnnnnnnnnnnnnnnnnnnnnnnnnnnnnnnnnnnnnnnnnnnnnnnnnnnnnnnnnnnnnnnnnnnnnnnnnnnnnnnnnnnnnnnnnnnnnnnnnnnnnnnnnnnnnnnnnnnnnnnnnnnnnnnnnnnnnnnnnnnnnnnnnnnnnnnnnnnnnnnnnnnnnnnnnnnnnnnnnnnnnnnnnnnnnnnnnnnnnnnnnnnnnnnnnnnnnnnnnnnnnnnnnnnnnnnnnnnnnnnnnnnnnnnnnnnnnnnnnnnnnnnnnnnnnnnnnnnnnnnnnnnnnnnnnnnnnnnnnnnnnnnnnnnnnnnnnnnnnnnnnnnnnnnnnnnnnnnnnnnnnnnnnnnnnnnnnnnnnnnnnnnnnnnnnnnnnnnnnnnnnnnnnnnnnnnnnnnnnnnnnnnnnnnnnnnnnnnnnnnnnnnnnnnnnnnnnnnnnnnnnnnnnnnnnnnnnnnnnnnnnnnnnnnnnnnnnnnnnnnnnnnnnnnnnnnnnnnnnnnnnnnnnnnnnnnnnnnnnnnnnnnnnnnnnnnnnnnnnnnnnnnnnnnnnnnnnnnnnnnnnnnnnnnnnnnnnnnnnnnnnnnnnnnnnnnnnnnnnnnnnnnnnnnnnnnnnnnnnnnnnnnnnnnnnnnnnnnnnnnnnnnnnnnnnnnnnnnnnnnnnnnnnnnnnnnnnnnnnnnnnnnnnnnnnnnnnnnnnnnnnnnnnnnnnnnnnnnnnnnnnnnnnnnnnnnnnnnnnnnnnnnnnnnnnnnnnnnnnnnnnnnnnnnnnnnnnnnnnnnnnnnnnnnnnnnnnnnnnnnnnnnnnnnnnnnnnnnnnnnnnnnnnnnnnnnnnnnnnnnnnnnnnnnnnnnnnnnnnnnnnnnnnnnnnnnnnnnnnnnnn

SEQ ID NO: 18 - DNA, 3175 bp, Homo Sapiens
ggaaatgggagtggaaggagggaggactgctttgtaactgctaagattgcagacagaaatagcacacaaccactgtgagctgtatgcgattcagaaaccaagaccaaattttgctcactttcattaatcagttgctcagatagaaggaaatgacatctggttctgtcttcttctacatcttaatttttggaaaatatttttctcatgggggtggacaggatgtcaagtgctcccttggctatttcccctgtgggaacatcacaaagtgcttgcctcagctcctgcactgtaacggtgtggacgactgcgggaatcaggccgatgaggacaactgtggagacaacaatggatggtctctgcaatttgacaaatattttgccagttactacaaaatgacttcccaatatccttttgaggcagaaacacctgaatgtttggtcggttctgtgccagtgcaatgtctttgccaaggtctggagcttgactgtgatgaaaccaatttacgagctgttccatcggtttcttcaaatgtgactgcaatgtcacttcagtggaacttaataagaaagcttcctcctgattgcttcaagaattatcatgatcttcagaagctgtacctgcaaaacaataagattacatccatctccatctatgctttcagaggactgaatagccttactaaactgtatctcagtcataacagaataaccttcctgaagccgggtgtttttgaagatcttcacagactagaatggctgataattgaagataatcacctcagtcgaatttccccaccaacattttatggactaaattctcttattctcttagtcctgatgaataacgtcctcacccgtttacctgataaacctctctgtcaacacatgccaagactacattggctggaccttgaaggcaaccatatccataatttaagaaatttgacttttatttcctgcagtaatttaactgttttagtgatgaggaaaaacaaaattaatcacttaaatgaaaatacttttgcacctctccagaaactggatgaattggatttaggaagtaataagattgaaaatcttccaccgcttatattcaaggacctgaaggagctgtcacaattgaatctttcctataatccaatccagaaaattcaagcaaaccaatttgattatcttgtcaaactcaagtctctcagcctagaagggattgaaatttcaaatatccaacaaaggatgtttagacctcttatgaatctctctcacatatattttaagaaattccagtactgtgggtatgcaccacatgttcgcagctgtaaaccaaacactgatggaatttcatctctagagaatctcttggcaagcattattcagagagtatttgtctgggttgtatctgcagttacctgctttggaaacatttttgtcatttgcatgcgaccttatatcaggtctgagaacaagctgtatgccatgtcaatcatttctctctgctgtgccgactgcttaatgggaatatatttattcgtgatcggaggctttgacctaaagtttcgtggagaatacaataagcatgcgcagctgtggatggagagtactcattgtcagcttgtaggatctttggccattctgtccacagaagtatcagttttactgttaacatttctgacattggaaaaatacatctgcattgtctatccttttagatgtgtgagacctggaaaatgcagaacaattacagttctgattctcatttggattactggttttatagtggctttcattccattgagcaataaggaatttttcaaaaactactatggcaccaatggagtatgcttccctcttcattcagaagatacagaaagtattggagcccagatttattcagtggcaatttttcttggtattaatttggccgcatttatcatcatagttttttcctatggaagcatgttttatagtgttcatcaaagtgccataacagcaactgaaatacggaatcaagttaaaaaagagatgatccttgccaaacgttttttctttatagtatttactgatgcattatgctggatacccatttttgtagtgaaatttctttcactgcttcaggtagaaataccaggtaccataacctcttgggtagtgatttttattctgcccattaacagtgctttgaacccaattctctatactctgaccacaagaccatttaaagaaatgattcatcggttttggtataactacagacaaagaaaatctatggacagcaaaggtcagaaaacatatgctccatcattcatctgggtggaaatgtggccactgcaggagatgccacctgagttaatgaagccggaccttttcacatacccctgtgaaatgtcactgatttctcaatcaacgagactcaattcctattcatgactgactctgaaattcatttcttcgcagagaatactgtgggggtgcttcatgagggatttactggtatgaaatgaataccacaaaattaatttataataatagctaagataaatattttacaaggacatgaggaaaaataaaaatgactaatgctcttacaaagggaagtaattatatcaataatgtatatatattagtagacattttgcataagaaattaagagaaatctacttcagtaacattcattcatttttctaacatgcatttattgagtacccactactatgtgcatagcattgcaatatagtcctggaagtagacagtgcagaacctttcaatctgtagatggtgtttaatgacaaaagactatacaaagtccatctgcagttcctagtttaaagtagagctttacctgtcatgtgcatcagcaagaatcataggcacttttaaataaaggtttaaagttttggaatactcagtgtatttgcatcatagaaaatgtctgactgtttgcaaaataatattctgttttaagaatccatcttacctctctttaagtttccatacacttgagagccaacacaacatatttattactaaaaagatgctttgctagaaactcaaaaacagcacttcttttggcacttcctgcccagttttctctttgctttaaatgaacatcatcatatggaattggaataggagagtatgagtacggcagagaagtggatcagaaaaactagaatgagga

SEQ ID NO: 19 - protein, 757 aa, Homo Sapiens
MTSGSVFFYILIFGKYFSHGGGQDVKCSLGYFPCGNITKCLPQLLHCNGVDDCGNQADEDNCGDNNGWSLQFDKYFASYYKMTSQYPFEAETPECLVGSVPVQCLCQGLELDCDETNLRAVPSVSSNVTAMSLQWNLIRKLPPDCFKNYHDLQKLYLQNNKITSISIYAFRGLNSLTKLYLSHNRITFLKPGVFEDLHRLEWLIIEDNHLSRISPPTFYGLNSLILLVLMNNVLTRLPDKPLCQHMPRLHWLDLEGNHIHNLRNLTFISCSNLTVLVMRKNKINHLNENTFAPLQKLDELDLGSNKIENLPPLIFKDLKELSQLNLSYNPIQKIQANQFDYLVKLKSLSLEGIEISNIQQRMFRPLMNLSHIYFKKFQYCGYAPHVRSCKPNTDGISSLENLLASIIQRVFVWVVSAVTCFGNIFVICMRPYIRSENKLYAMSIISLCCADCLMGIYLFVIGGFDLKFRGEYNKHAQLWMESTHCQLVGSLAILSTEVSVLLLTFLTLEKYICIVYPFRCVRPGKCRTITVLILIWITGFIVAFIPLSNKEFFKNYYGTNGVCFPLHSEDTESIGAQIYSVAIFLGINLAAFIIIVFSYGSMFYSVHQSAITATEIRNQVKKEMILAKRFFFIVFTDALCWIPIFVVKFLSLLQVEIPGTITSWVVIFILPINSALNPILYTLTTRPFKEMIHRFWYNYRQRKSMDSKGQKTYAPSFIWVEMWPLQEMPPELMKPDLFTYPCEMSLISQSTRLNSYS

SEQ ID NO: 20 - DNA, 35187 bp, Mus Musculus
cagaggcagagagagctctgactgagttcaaggtcagcctgtactatagagtgagtgggacagccagggctacacagagaaattccattagaaagagagagagagagacagagacagagatggaaagacagagaaagacagagagacagagacagagaggcaggaggaggaggagggggtaagaggaggagaagaagaagattaagaaaataaacagttactttggatctgttaccaaagccttgttcttgagtccagaagtgagtctggattcaaaggggcaaagcctttcttaggacatcaacctaagctacatagatgatctggctctgatcaagagccagacatgcctgcatctcaccaggctagggggggtatcaaaaacaaagaaagaagagctctcgtcaaaggtgtccattcaaaacctttcatgacaaggggttcaaacttgcagagtcccaatcctgactggagagtgtctgagatcaagtatggacagctcactggcctgctgacaaggagggcaaggcaggttttcaggaggctttgctaaaagtctgtgcgtgcagcttctggggttctgttgctgttggttatttgtgtcacgggagagactcaccacatagctctggctgtcctggaactcacagagatcctcctgactctgcttcccaagtgccagaattaaaaacgtgtgcctccactttacaggtagatgtaattatgattcccagttgtgggaaagctgagggtttctatttatgtcctcatttgactttgctgcaaaagcataaaacagatacattcattgtgaagcctggtcctggcatctgattgttcagtccattctcactttgggtaggtcccaactgtgtcaggtcatcatgtgaagtcatgatttattactgctttcacagctgtatcaccacaggacccaacaaatgcagctgaagtcaccttgggctctcgttcatttggatgtgattgatttagaatagaggcactggttttcttaaaactgtttatttcgtgtgtgtgtgtgtgtgtgtgtgtgtgtgtgtgtgtgtgtgtgagtttgtgtatgtgtatcacatgcctatagagcctgtggaaatcaaagacggtattggataccctggaactggagttacaggcagttgtgagccttcatgtgtgtcttagggttttctgtgaacagacaccatgaccaaggcaactcttacaaaggacaacatttaattggggttggcttataggttcaaaggttcaatccatatcatcaaggtgggaacatggcagcatccaggcaggcacaaggcaggaggagctgagagttctacatcttcatctgaaagctgctagcagagtatttatagcagagactagggtattaaaatctattcccacagtgacgttcctactccaacaaaaccacaccttcaaataggccactccctggccaagcatatacaaaccatcacagtgtgcatggtagaagagggtgctcttaggctcggagccatgtctcttgccctgagacactgttcttcagaaagaatcaaacaataacaaacaaatgaatctggcagtgcatacctgtaatctgagcactcagaaaacaagaggatcagagttgacggccagccttggctacattctgaaatttgaggctatgctgagctacaaaagaccaacaaacaaaccaataacaacaacaacaataaaaattctaatatgctttaaagattgtctaaaaatgaatacatttaagagaaataataactcttccacaccttaatattctaaaaaagagtttgtctttattttgaaacagggctttctgtagtccaggctggccttgaactcccgaatcttctgcttctatcaaatgccaagactataggcatgtaccatcactcatagtttagagttaaattggtttatttaaattaggagataaactatcatttttgtagtccatgctgaccttcaccattccattctcctgccttaaactatcatgtgctggcctcacaggcactcgccactatgcttgagtcaaagagtaaattagaatgcaagtagagattgctgggtggttgaagggcttccctcgcacgtcggaggatccgagagcccatggaaatgccaggtgggcccggcagggcacctgtacttccagttttggaaggttggagacaagggatttccagagcagtgtggttattaagatgaaccaatccacaagctctgggtttgattgagagacactggttcaagaacaagatgggagagctacagaggatgacttcccacatcgacctacctgggtccccacatgcatgctcacaatgtgtgccctcacacatgcaagcataaacacacacacacacacaaataaataaaatgcttttgaagttaattcaaacactatttgtaaaatagtgataagaaaaactgtgtgctctgtgtgtatgtgtgtgtatgagtgtgtgtgtgtgagagagagagagcaccaaaactgaatttagagagaaaagtagctttaaacatttaacattatttgaaaagaatgatgataaaaacaggaggtaggtatggtggctcaagcatctaaccttagcattcaggacacaggtgggattacggcaagtttgaggccagcctggtctacataacacactctgtgttgatcaagactacagaatgagtcctgtctcaataaataaatacataaataagtaggtggaacttgataaacctggaaagcgaatgggaaataaaacaaaaacaaactattaaaagttccttcaaagtaaagaggaagaagcaacaaaggcgcaagtcattttttggtaaattgatagtcctggtaagcaaatccaggtacattttgtttgctgtttaaaatgtatttttcgagatgtgccatggcttcggtagcaacccgttatcctctgctgcttgagcagagccagctgagaggagctcacagcggcggccaccgcagactggcctctgccccatggtaaccatgtgtgaccggaaggcggtgatgccagcactcaggaggcagaggcaggcagatttctgagttcgaggccagcttggtctacaaagttccaggacagccagggctatacaaaaaaaaaaaaaaagcagatgtgtcagaagagatgtaacaggactcggtggagtgcgctactcaggcgttggagaagtacaaaatagagaaggatattgcggcccatatcaagagggagtttgacaagacttacaaccctacggggcatttcattgtgggctgaaacttcggtagttacgtgacacacgaaaccaaacacttcatctacttttacctgggtcaggtggccattcttctgttcaaatctggttaaaagcatcgactgtgccaaacatccagtggtccatccaaaaacaagaactgcatcctaaattccaaataccagagagggcatcttcagccttgctaagtgaacacctcgtttgactctgttgtgttttgtacacggcctcattctctgtacgagtttgtggttataaaattagtaaaacagcttacatttgtatttattttctagtccatacttctgtacctccatttttttctcctttagatcattcctataaaaataaatctgttggagatgctaaaaaaatatttttcttatttatgtgtatgaatgctttgcttgcatgaaggtctgtgtaccgtgtaccatgtacatgcatgatgctcttggagaccagaaaagagtgctggaccgccctggacccgccattataggtggttgtaagccaagccgactgatgtaggtgctgacaaccaaactttggttctctggaagaacagccggatgctgaaccgtctctccaaccccagttttgttcattttaagaaaggagtctttctctgcagtcagactagcctcaaatttgcatcttcctacttcctgagtgatgggattacaggtgtgtgccaccacacccagatccctgggagtaatctgctcactgataatggcctctgctgctctggatcgcttgtcgctggaactcgggaagtgtctgaggcagagctgggagctggtcatactgcttctgatactcttgctttccacacacgggtgcagtcccctatcccgcaagactcagctccaatgctggccacctcccagctgagctttgtggatgctaatgactaaacccacaagtcggctgagggtgagcacttggagagagtgggtgaatccagcatttgtggaggagtggattggtgtgttagtggatgagttaagcccagccttgggggtgggacgcctcagaaggacaggaaaagcacaaggctgtgtgtgtaaaaggactgaggcgtgggcaatagtgagatgtcccatgtgacaatgatgccagaggcttttgaggactggagcaggtgacacctgctcactcaaggaaagtcacgaaaggctttgaatggaacactaaaggactatgttttgtatgcctcagggtggtggggagtacagaagccagatttggagactgccactgcccttaatgaaataggagaccatgcaatgaggagcatggggcacgatgccagaatggggctcgggcagtctgccctagtggaagactgtgggtctggaggcctggaacagggtgttagagcccaggcgcagatctaattctccctactgaccatttttctggctcctgcatgccacgcccatctcccatcccagctatgaagggatcaagaggtagctcctggcagctcccccgataccatgtatagcttcactatgctccatccatgccttcagcccagccccacagggattctacggtcaggtctttgtgtccacacaatggttgtctttgtcttgagcagcctcctccatctctgctcctctctatcaatccctcagcctccctcccctccgcctctcatcttggcttccctcactgagtctctgtacaactctgatagtgttgtacagaaactgacttctctgacacagactgagtgcttgaaaaggaaaatgaaactattaggactggaaagatggctcagtggctatgattgcttgctgctcttccaaaggatctgagttcggttcccagaatctacatcaggtgctcaggaccacctgtaacaccagttctagggcatctgatagcttttcctggcctctgaaggcactgcactcaagtacacacacacacacacacacacacacacacacacacacacacacacacaaacacacacctaaaaataaaatctcttttgttttttaaataaaaagactcaagaagctcggtattaagagacttgatactctttcaaaggatccaggtttgatttccaaaacccacacagcagcttacaacatctaactcaagccctaggagctctgatgttgtcttctgacttccatgggcaccaggcacacatgtggtacacagacatatatgcagtcaaaataatcatacatatagaacaaaataaaaatttaaaaagaatcaaagtcttgtcaagaatacatccatcaaaaagtctgctgtccataggttgggttgtgtgtgcatttagggacagagagctagctcagcagatatagtgttcatttgcaggtgagggtctgagcttggaatccctgggttagcccatttgacagatgaggaaagaaaggcctgtgagcagggctggcttcccagttgcaagacaagcaccattagtgcttgtctattttgtgacaaagcctctctattatgtagctctggctgtcctgcaactaactatgtaggccaggttggccttgaactcacaaagatccacctgtctctgcctcttgagtgttggcattaatggtgtgtgctaccacatccggcctagtgcttgatttaatacttctgtcaacatcttaaaattcttaactcactgataagtggatattagcccagaaacttagaatacccaagatacaagatacaagttgcaaaacacatgaaactcaagaagaacgaagaccaaagtttgccccttcttagaattgggaacaaaatatccatggaatgagttacagagacaaagtttggagctaagacgaaaggatggaccatctagagactgccgcatctgggaatccatcccataatcagccaccaaatgcaaacactattgcatacgccaacaagattttgctgaaaggaccctgatatagctgtctcttgtgaggctatgccggggcctagcaaacacagaagtggatgctcacagtcagctattggatggaacacagggcccccaatggaggagctagagaaagtacccaaggagctaaaggggtctgcaaccctatagatggaacaacaatacgaactaaccagtacccccagagctcgtatctctagctgcatatgtatcagaagatggcctagtcggccatcattgggaagagaggccccttggtcttgcaaactttatatgcctcagtacaggggaacgccagggtcaagaagtgggagttggtgtgtaggggagtaggtgggggagggtatgggggacttttgggatagcatttgaaatgtaaatgaagaaattacctaattaaaaaaattcttaacaatctttaaacaaagtatccacattttcattttgtacagagtcttgcaaatttggtagctgatcttgctttggggaaggtggaagtgacatttgccaaggcagaaaatcaggcttcctgctcgaagggtgcctccctggagtgcctgcctcctggcagtgccaacagctgagcttccaggattcatttgcctctcaagccctggccctggtcagggaaacttgaggagcatcaccccagttctgaaggagggagggagagagagaaagactaagagagggagaaagaagctaaaaagaccaggcaaggtagtcagcccagctctgcagagtgggagccagggtagaccccaacaccaaggtccagccatgatccaagaactctcttcagggcctttccccccaagcagagtccagtttcagagttagtggacccacaacatactcactatacaagcctccgtttccctcagtgtgccatgggaatggtagctcctaactcacagggtcctggtgaagactgagatgccttaaacagtcactagcacacagaaggggagctataaagagtccttctggaggatgctcatgtgacagtgccagtggctggacagtcaactgtgggtaggacagactgggccccaccttcaaagagatccccagcagagggggagacagtcacagcacactgagaggtatggcatctggaaggagtcttagaagatcagtggttgggagtcaagagaagcaggccaaacagagaaatacaggggcagagggagtggccagcacccagcaggcggtgagtgagggttcagggtttcagcctgcctagctaaatggaagcaggagagaaggcagagagggaaaaacctggagtggaggctgggaagctgggctgcctcgagggcagaggaagcccccaagagagtgtgaagcaaagtgtgtcagtgaggggggacagaggcacaattctggcagtgacagagggttggagggctgcgttagaggcttggccaggcagggacttcccacccccaccaccccccaccctgcctgcccacccgcccacatcttagattctcagagcaggaggttttctcatgggatggggatgcctgccagccggcaaatgcttgctcagggatggagagacaggaaaccttctaatgtgaggtgggccgggggagccaggactggcgctttgacaatcccctcctgaacttctgttgctaatgcagatgcccctgtggcttcattacacttcacagggaccattacagcgcctgggccttaccattagcctgctttggctgcgagattcagggagacgccctcagtgctggtctacacttcatagggtactcactgtgtctcacagagctcccatttcctggctggatcaatagaggttctaaactctttcagttgcaaactctcaagtccagagtacgtgaaaatatgaacgcaaatgtgctcaaactagaatgcgagggaagtctactggatttggtgatctacaaaatctgaggattgggaaacctaacctcccaggctcttctgagaggggatactcactctgcagacccagaaagctcaggatcatgggcaagaccccaaataaggacatttagtcagaacagcaagacaggagtacataacacattgtgcagaaaagaagatggagagccaggcgtggtagcacatgcctagaatatcagctctcaagaggctgagtcaggaggactgctgaatgaggccagcctgaattacatggtgagttcaaggccaacagggcctacatagggagatcctagctataaacaaacaaacaaacaacaaaaagagggctgaatcttagaaagtagacacagaaaaagtgaaggaagacttgaatctgagtactcgggctttaccaggtcacctgacatgatgttatgtaccttgggaatgtcgtttctttggctataaagtaaaggaattggaccacagcaagggtaaagtccaagactgcccactgtccagcctgtgggtcttctagaggctaggatccatcctgggtcctaggggaagcagcagaaaaagacctgacggctcagaagggagatcaggaaaaggaaatccgctgggatttcaataaccagaaagacttccctcacacgaggaccctaaagccacaagggtggctgtggagagatctagatttctggaagctgcctgcaccagctcccatagccagcagaggttagacaaggagcctttgtgtctgctcaaaggccccaggaggctgcagagaggctcagccacccagctctgtgtattcacccttctcactctggacagggctgcagatcggaccctttctggacccctccaggggctgcgaatgggactttagtcagcggatacacaactaacaaagtctacagcccttgggcagagagcaaactcctcaccataggaaaaggcttgtcctgaacttgtccgtttatttggccaccccaagactccctggatggacacgaaaagtaggatcatggaaggactggcttcatttcgcagaaaatgtgtcttacagtgctaaaggtggcctagaacttatactaacagatgcctgagtcagaaatgggagggggcagacaccctctcattcatccaccccttcacaggacagcagtgaggtggctggtgtggtccttgcctttttgagctcaaactaggacaggaatggggtttgtgactacagaaagtcttcagagcaggccagagagaagaattgaggcagttcaagatgagagatcaaactaaaccaggacttcatggacccgttagtgacctgaacgaagagcaaaagcagacggaggtggtgaagccggcaaagatttctgctggtaccagcagtctgaaagcacatccatctgtccatccgtaagtgacgcgggatggggcagcagcggagggaaggctgagggtcagtataaaggtccatcggtgggcagtgacaggagccaggccagcacaaagcaaaccttgtaaaacttgggcgtcgctgaaaatcggtgagctaagcaggtgacctctgctcagccaggacggtcgccttccgcctctccctgctcaacagccgtggcggacacgctgaccggcggcgacactgaccgaccgcgtccccaagcgggtggcagactggaagcatctgtttagaagggttgggggcggctccggcgtctgcccagagtctgccccgccctcctgctcacagccaggctatggggtgcggagcggggcggagtagggcggggaccgcggcgcttccaggcacgtgggaccctgcgccactcggcatgggactcgggcaccaggaacagcggcggcagcccttggaggggaccagcgcagcggggaggtgagaggtgcttcctagaggggagcggacaccaagagaggtcgccaagtgaggcctggggacgggagcgccggtcgagtcagcgccaaacagggagagcccattacgtgactgtcccgagggctcgggctcccagcccttgtactgcgcaaaactgggcggtgagagccggctgccggtgcgctgatgaactttgtttcctctagagcgtgatctcggtgagtgtcatcttggtgtgtttaccagcatactgggggaatctgtgtgttagtgggcaaatgcgcacacccttagggtgtgagtgactgaacttagtctgtgtgtacccctggggcgtaagtctgtgggctaagagacctgggaatcctggagacttcttgcgcttgcactcttaactctccccagagtcagtctgggtagctcactcggtgtcagtgaggtgtcagtgaggtaccggaggcagtggcagcagcggcggggttgtggggttgggagtggggggtgcggtggggtgggaatgtgggttgctagtgcaatttcatataaggacagttaagactttgatctgtctggaaacttttaatcgggcaggtggtgctgtatgaagggtcaggcagaagaaagacagtgttcacctcactagggctacagtgtgtgtgtgtgtgtgtgtgtgtgtgtgtgtgtgtgtgtgtgtgtgtgttactgatctccaggagctagacccaagtgtagatccttctgggaactagcctttccagtttggagatttatagggctaggtgactgctgtgctcagaatggcatccctagagtccctgggtcagcagccttgttttggatcaagtttggaatagtggcttttgaagatcaggctggggcggcagggaagtggcaattatctgtgggtgggagtgggaggaaggagagtctctgaacagactctacactgctgccagtgtgggtcctgcatgagggctggggacaagccctgctgcggaggtctgcccctctccttttccatgctttggatactccagagttttgaggacatgggcaggttggcatactgggtaatcctcagaaatggctgcccagatgcagagtgaggttgtggcctttccgggatcccttttgcccacctaccccaggcaccagatgagcatgtgaggatgtcaccaaggcctcatgggtgacaccaggagttctttaatttcctggctgtagtctttcttcttaatgagaagtgcttatgctactattggaatgttgttgaactgttacttgttacagtttataagaatccctcatcttttcctcctaaaggccccatgagaaaggaactattgcctttattttgtagatcagaaaatagaggcttggagaatgtcttctctaaggtcacaaagccacataaataaaacctgggactccgcttacctgccccagctgaggcctccctgcccagggccaaagtttcaggatgaggcagtgctacttatttctaggctgaggggagtttgatttctccagtgtctcactctgtgtcctggatgtcagtctatggaccaggctgacccccaactcgcggagacctgtccatagcctaactctggaactctaggattaaaggcaagcaccaccatgcctggctgcccccaggagcctttctttgggtctttcttgtggcctaattgcccagctgtttatgggatgaccaccattatccccaggtctgctcacaggaccaggaagatcttgctgacctgctaactaagaagtgccctctgatgcatctcttctctctcctaactgccttccctgagcctgtctgtgcaccctttaacctatagtttcctcctgagatgcctttgggtccctaagccatcagaagagcctaatgggaagaacatggctgcaagaccctccttactctctagagaaggtggttagttatattatgaagcccggccatctctttctcactttgtccttattatctggcacagatggagcacatagcaggtgccggggagtagttgggaaatgagcaaccaggtgctgtgggtattcagaagagaaaggtcttgatccatgaagagtcgctgtagtggatccccctgtcccaagacaaggtcttatgaagcctaggctggccttgaactcagtgtgtagaatgaccttaaacttctaatctttctgcttccacctcttgaatgctgggctcgtaggcatgcacccattatatttggtgctggcaatcaaaccaagggcttcctgcattctaggtaaacattctaccaactgagcaacatcctagtccttcagtctcaagagagagtagctctctattgccctgtctcccaaaccctagggcatatatcaatcttgatatagaatgagtagcaggattctctgatacagagagtgacatctggaccctgctgggcccaactggatcctccattttggtgtcctgtccctgccactgaagaagaaaggcctgggcactaggtcttcctctggcttgtatggatacagtgtcctgaagagtgcctagcctccagtgccatttgtaagagagactttggtcaagcctgtgcttgggttgggaaggaggctgacagggagtcccaaagcaagatgctagttcttctgcctgcatcattataactatggtggtcccctactctccaaactctggtactaaccaccttccatgtggtaccatctttgtaaactctgagaaagccttcccttttaatctggagaatacgctctcagcttggcatttgagccctttcaaatgaattccttggcccccacacattccatgccacataaccatccaagccagccactcatgacctactggcacttcctcaacagcctgtccccttgcccactgagtctggcttggacttcctcccttctcttctgtcttcttcacaaccccaagttatctattaaggtccaactccttgggaaaagcttccactgaccacatccccaagacacacgttgtcctgactgtggcccctgaattcttagtccccttgttccttttggagatggttggatctcccaaaatgacctaaacattcctggctcttttcccaaagcttgactgggcactcttctggacctggaagagttaaccctctgaagccatgcctatagagacattggcagctagagctttgtggctcttaggactgtgggttatggttgtgttactctgagcacaaatacctggggttctgagaatctcagccgaaggctttctggagccacgagaaacacaactttggatacaacacctgcttcagcaggcaaactgaaggaacagcatgggattcaggcactctgggattagactctgagagctgctggcctgggaacattccaaaagtgctccaagaagacagtttccatcccttagcctcctgtgcatcctatgatgtatgcccagattctcccatctcataagctggatgcttcctgctccttcccagacatgatcacagtttagaccacgacccctctctctgctggagacccagggcagacactgtgatgagcagtgttgtaggatcctagaattcagtgttttcctgtcatgatgggaagatactgcctgcatgtcaagtatacatcttgcttcccataggccccaccccaatcactcccatgtcttattcattcgtagtgaactgccctgtggatctgtgactcttccagtttgaccagtaggaacttacactcagagacaggatttgactagacccagactgcacagtgtaacaggctccaagttggagcctgagcccagggctcttgcctcttgggtctcactggaggcatgcaggtgtgattggctgaggtggagtccaggactttgtggttctgagtcattcagcccatctctgaagtcctgtactgcactcagctgagctgggccacttaggatcagtggtttggagtcctgccctggttaggtagaccctttctctttaggagtctcagctttgagcactcagtgttccctcagcctcagtgagtggctcccacagctgagattgtgggaggtttagggaaagtgctgtagagcacagggacctcctaggggaggcctcgtaccacacacatacacacactcacacttacacacattcacacatacagacacatacatacacacacttacacacatatacacactcacacttatacacatacacactcacacacatacacactcacattcacatatccacacacactcacacacatacatacacacattcacatagacacactcacacacacactaacacttataaacacatacacatatacaagcattcacatatattcacacacacattcacacagagacacattcacacacacatactcacacttatacttacacacacatacacacatataaacagttatacacattcacacacacattcacaatatacacagacacacacacacactgacacacttgtacacacatacacacatatgaacattcacacacattcacacacatacacttacacatgtacatacacattaacacaggcacattcacacacatacacacactcacacttattcatacatacattcacacagacacactcacacacacctacatacatacactcacacttacacttacacacacatgcacacatataaacattcacacacacacagacagacacacaccatctgataacatcagaggtcacccctgaattgtgtccccagactagcccctgtgctcagtgctcatgatgtaattaatataccaggcatagctgaggggaactgctgtcctctaaccccttggaggacatttgggaggggacaggcagtgacttcttaatcctctgttaccctgtacttcgctcagccacaggggtgcttagtggttcaggccatcttgcccagatttgtgctctctcctctctccacccacctgatacctactcatctttctaaccacaagtcaggtgatcttttctctaggaagcctcccccgaccaccagggcctcctttcccagcagggcctccagggcttccttcaagcctggcaccctggctgtcattgtctgtttctgggtgtgcctccctgaccttgacagtgaacttcttgagattagggaagaatgtacgctttgagtcaccaggtaatctgcacaggggcaatctggggacagaagggaacgtggaaagctctggacagcccctttcccttgcccccatctcccacccccaccccatacacccaccattcacccctacccccagccccgaggacgggatggggtgtgatcttaggtcagcctggctgtacccttgccactgtggcctcacctgtaattcctgcaagagtacttgctccacacatcttttaggggtaccccatccctcctctctgccctacaaggcaacctcctctcttactattctgaaatgtgagtgtgacttttttttattgatctcaacagctcacaagcaagttccgtttcattaagaggagagtgaccagcgggctatggggttgtccagccaacaactgagaagggcagaagacattccctgccaccctgtgctctctcctgcctcttgatgctgttttaagtccaggtcctcagtgccccctccccaaaatctcttcttgacaaaggcagatgggaagcaggggtctctgatagaacactctcccctgccaggctggacagggtccaccagcctagcaggtggcacattccagagccaccctagcaaaggagctggaatgttgtctaaccacccaggaaattccgctgccagcctaagagtagccgcttcctcctcctggccttagactcactagcctgggactagtaagaaagaaacagagggtcaggggaaaggccacagcagaggcaggggttctacccactgggcttggctttgcctttgactctctagggatcgtgactgagacctcgagctcctattttgtggtcttaggtttttaacctgagaaatgggtacatcttggcatcatcccagttgggaagtcctgaggggtccatccctggttctgccggttgggaccttctctgctggagatggagcagagagccagagcttgggatgttggagtcaaagatgaatgggcaggggctccctggggatgggacttggaccttgcagggtagggtacagtggccaagggcacagcagagctctgttttttgctgcttttgtgaccctgggaggttactttagcctgttggagccttcagattaaatatgaagagacgtatgaagccacctaacatagaaatggttccagagaatgctcagctctcgagaggagataggtggtagaagatgagggaagctgtcactgaacgagatggaacaacgtgactgcttcagttgtactgagacaggaggataagggagaaggtaaagatggcagatcttctagaaggttggcaggaaccagttcggctaggacttgaggtaaagctgaggaccttggacgatgcttgacagtactagggagctatggagggcttgagctcacggtggtcatgtgatcaaaggtgggcataaagaagacaatgtgactggagagttaaggttggaaaggcagggcagagggaggtgaggactgcagcaaggagaatgggaggggttcagagggaaggaaaggttggctctaggtctgcatcggacaaagggcatagggaaaggttagccctacatctgcatcgggcaaagagcataaaagcacatctaagagctgcactggttgaactggcaggacttgctgagtggtaggcatctgatagggtggagagttgccatggcaacctagaaggatggtggaggccctttggctgccgtcttctgccttacttagcggttggttaggtacctcctgaggacagacctcaggggatgtgcctgagtggggcaaggtgaaaggggagctccttcatcttgccaccaagaccttgagcagacagccagatagcaacccacagtctggaccatgtcagcctgagatgccagggctgggtgcatcaagtcatcagtggctggaagccacttcccaggcccacccttggtcctcctcctgcagccacccatctcctcctgctctcctatatacacctctagcttaggggctccactgccccactgttaagacagtaaacagatgggaaaagatattcatggggatgaaagcatagctcagtggtatagcattagtctatcatgcttcaggtcctagcaccaaaaaaacccccaaagaatgtgtgtgtgtgtgtgtgtgtgtgtgtgtctgtctgtctgtcatctgtctgtctgtctcagttactaaagcttccctagcatatctgaagcctaggttatctactccagcaccacataagcagaatgtggtggttcatgtctataatgccagcacttgggaggtaagggtagaaggatcagaaagtcaagttcatcctcaattatccagtgagatcagcctgcgatgtatagctctgtgttaaaagaaaaaaaagtattcagaaaacttctggtaggtgctgggacccgtctacacagagagcttcttccactaggcagctaacctctctctagcatatgccaaataccctgtgcctgctgtctgtgaggggctcccagctcagctccatccttgagtttcattctccattaaataaggattcagcacaggtagcttctagaggttgtaccaggccccatctagaccatgtcaatatgtccactgcgtgtacacaggagtgtgaatgtgtgtgctctgggtgtgtgtgtgcatttgtacgtgtgtgtgtgtgtgtgtgtgtgtgtgtgtgtataaaacacctgtggaggaatgactagatgtgtaatgaagtggcggggattccagttagacacctatcctggacaaaggtatgttagcattcatgtgcagtatatgctgggccaagcgggtattgaccgtttcctgctgtggggctaaagtgcagaacccaggaccaaaggaagggacactggagacttggctcagctctgcaagataccaggggagatctttcacaatgcctccttcctgttaaagggggtgcagagagtgaggctatgaacagcccattcctggaacatatgagtgagcaggggatagcagggtgagtgggtgtgcagagggcactgtgaccaggcaagcacaccgagtctcctcttggcttctttggggccacagttaaagaagaggaggcaatccataggggaagagagagagagtggaaaaaaaacatagcctggctgacagattctgagcccacatttgcttcttcatctctgggtgtctacaggagtcctccgggcagctgcttgtcttaaaaaatgctggaggctgggcgggggcccaggcctgggaacctgttcttcctgtttcctgcctcagtcccagcagctggtccaggcctgtgcatatgtgagtgaagaactggagcaggcgctgagcatcctcaccaccccaagagcaggagctgatcaggtccaggtgtgtgaggcgggacactggctgggggatgggcattctgtattcaatgtgaccggagaccgggaccctgctctgctcatttatcccaggctctggagccacacagcccttggtgtcaagcctagttgtctccaattccttcccatataaccataacaaatagcttgcgtagatatttataccagggactgaaagctgccttgtgggagctgcttaaacctaatccgatccccactgaacagggagggtagcagaggggactgcaggatatgaagctgatgagacagagccatagatgggccaagtgaagtatgggactgccttagcctactgaccagtccctaggatgcattcatagactgtttccatggctccagaagggcagggcaaagtttttctgttttgtatcagggttgaccaagaggtggtgtaaggatccttctggggcaggagaagggcttgggtgggctgggccccatgactcctgtgctcagttcctctgggttcccatggcttccagtgcttcatttacccatccgttcattcatcctttctttcttacaacaactgcttgcatcttgggctgctagctgggccataggtacagagacaatcatcacatggatccagccctcaaagaaatatgttgaggagggagtggaaggacagactaccaccaggctggagaaaagtcttgaggggctggtgacctgagaaagttccagtgattgaggaagagcctggagaaacggctgggatgtgtctggaaaggatcgttctgaaaggcttttgggacagtccgtacaacgttaacaaagataatgaggcctggacgggttggttcacttctccattaaactgggagttcttgggacacagccagcaagacctgggtatagcagagccagccagtgtgaggggaccagtgacggagtcagatggagcagtctccatggagctgagatcactaatcagtgctaagggagagggctgggggctagcaagccggctttccaggctggtgagttggcccagggaaggagaggacaggcagtgtccgtctggaacggggccatcgtgatagagttttcagctgtcttagagggcagaggccaggatgtctgaaaacaggtggaaagggaagctccttggttctggggacaaggaagttccaccctgtcctttagtgtcagagattccatgggcaaggaacagcagggagctagtgaccttgactagagagctcggcatgtggagagcagtgaagggcaggagtggagcacacatgacgggcacgtgggttagaagaagccgccccctttctccagtggggcagcgctcctcctgaggggagtttggcgctaccattctcccaggcggggatttgacccctgagatgaaagagggcttcttagccaggactctcatgttcagtgtgctgtgccctgcggtccaggtgcccttccgtccaggatgcctgctccccgccggcagctgaaagtgatgttgttattgtcctttttgctttgcttccctttagacagagagaatgtagatttattatgaaaaagtgagcaaaaaattccatacggtgcttccaaaggaggagcactacagtttaagaaacacttttgttgttaaacttgcgatttcttggagctgcagagagggcccagcagttttcttgtggaggagccaggtttgattctcatttggtggttcacagccatttgtaactccagctccagggaaccaactggatgccttctttagcctgcatgacacagcacacgtatatccaggcagaaactcatatgcctacattttaaatttcatatttccgagctgaaaatggctcagtggttaagagtaattgctgttcttttagaggacccagggcccacatggtggctcacaaccaaccctaactccagttccagcagacctaacctgccttcggaactctacaggcattaggcacacacatgtacataggtgcacacaggcaggcaagacattcatatgcgtagaataaatcaaaggttttttatttattttgaatctgtctaataaaataagatttagctgcacgatcttgctctctgtagccatactgaattattaggtcaggaaaacgaaggtaaaagaagctgataattcactacctaccacattgtattaggtcaagtcttgccttgggcccctttgggtaaaacttttatactctagcccaaaaagacttgtcattttcttattcatgcacatacttcatgtctgttgcttatttgttttgcgtatatgtctgtggtgcacatgtgccacagtgcctatgtaacggtcagaggaccacttgggagagtcactccttctaccaatgtagggtccttggcctcaggtcattagtcttggcagcaggcgcctttaccagctgagtcatttcacctgcccctcactgttctgagacagtctttctaggtagccaggctggcttcaaactccttctactcctgtctcagcctcccgagtgctaggatggcagatgtgggcctcctcaccctggtctgaaagagctcttagtggccacagggtggaattcagagagaaagagagatggctacttgccctccagccattccttgaccactggctggccaggccctatgatcaggggcaaagtacaaggctcaaagatggtggaaagtcatcgggtgcaaaaggtaccagggaaggcccagaagagctaaacttactcctccaaagaaacccccactccctccctcatcccacagcaaccccaggctcccctgtgctctccaggaaggtcactgccccatctggttgtcccctcacaggttgagaacaggattgctctttgcagatgtaaaagggccagaatatagcaataacacttaaaaaaaaaaagttgagccaggcagtggtggtgcacatctttattgtctgaacttgggaagcagaggcaggtgaatctctgtgagtttgaggccagcctcgagttccagacaggcagggctacatggagaaaccctgcctcaaaaacaaaacaaaaccaaaaagttgaacaagggctaaagagataggtgtattgttggttagggccatttgtggttcttgcagaggactggggttctgttaccagtacccagagagagtgtgctggttaccatagcttcagttctagtgagtcccctgagctctgcaggtaccagtcacacacttggtgcacagttatagacacaagcaaaacactcatacacataaaataaaagttaaaaatctaagaagaaagatgcacaagaaactgggtgatggaagaggggacccttgcatatcctccagtccccagagactagatgatgggttttgaagctgagagctcttgaggacttaggcatgctggatgcgctgaccaaagaaactcagtgggcaatgggcactgatgggttttgaagctgagagctcttgaggacttaggcatgcagcagagggtgagtcttgagaccacttcctatactttgaagttgtacccctctgggatccccagatctctgtcccaagcctctgagtcctcagtcttggactatctgatccaggggtttagagcaagggggtcatcgggttcaagagtaagtattttagactttgaaggccatgtggtcttgatcagaactgctcagcacaacagatgggcgtggctgtgttccaacactgcttctcctacaaagacaggctggtgggctggagtcaatcgctcaccctgttgtgaagttagaattgcgtgatgttggttttcatggatctcacaagtttctggggctttaggagattctgggtgcaggagggggtgcaggtcacatgacaatacaagttttgatttggagctgggcagtggtggtgcatacctttgattctaccactcaggggacagagacagaggcagatggatcactgtgagtttgaggtcagtctggtctacagagtgagttctaggatatccagggctacacagagaaaccctgtcttgggggaaaaaaagcctggatttgggtaaacaagttttgttgttgttgttgttgatgatgatgatggtggtggtggtggtggtggtggtggtctttgggttgttttgttctatttgtttgtttttcagacagggtcttacttactatgtagcccaggctacccaagcaaaccttcagcacacaattctttacctctgtttcctaagtgttaggaatataggggcgggtcactacatctggcttaggcaaatctttagtatgtgtgttggtagggtatgaacccagggcctcttgcatgccaagcaagcgatctatcaccaagctctacctccagccttaggcaaatcttagcaagtcccctccccctctgagcccagacatgacagctttcttaccacacctccctttcctgcagggcaatggcagcagacctggaaccctggaatagcaccatcaatggcacctgggagggggacgaactgggatacaagtgtcgtttcaacgaggacttcaagtacgtgctgttgcccgtgtcctatggcgtggtgtgcgtgctcgggttgtgcctgaacgtcgtggctctctatatcttcctatgccgcctcaaaacctggaacgcctccaccacctacatgtttcacctggcagtttcggactctctctacgcagcgtccctgccgctgttggtttattactacgcccggggtgaccactggccatttagcacggtgctctgcaagctggtgcgtttcctcttctacaccaacctctactgcagcatcctcttcctcacctgcatcagcgtgcaccggtgcctgggagtcctgcgccctctgcactccctgcgttggggccgggcccgttatgcccgccgggtggctgcggttgtgtgggtgctggtgctggcctgccaggcacccgtgctctacttcgtcaccaccagcgtgcggggaacccggatcacttgccatgacacctcggcccgagagctctttagccattttgtggcttacagctccgtcatgctgggtctgctttttgctgtgcccttttccgtaatcctggtctgttacgtgcttatggccaggcggctgctcaaaccggcttatgggaccacaggaggtctgcctcgggccaagcgcaagtctgtgcgcaccattgccttggtactggccgtcttcgccctctgcttcctgcctttccacctcacgcgcaccctctactactccttccgatcacttgacctcagctgccacaccctcaacgccatcaacatggcatataagatcacccggccgctggccagcgccaacagttgtcttgacccggtactctacttcctggcagggcagagacttgtccgctttgcccgagatgccaagccacccacggagcctacccccagcccacaggctcgtcgcaagctgggcctgcacaggcctaacagaactgtgaggaaagatttgtcagtcagcagtgacgactcaagacggacagagtccacaccagctggaagtgagactaaggacattcggctatagcacctcagtcaggtgtcagtttatgtaggggagctgtaggggaccaaggcttgttaaaggggctgatatcctctgatgcggatcaacagctctcacttggcaggggctcaggatactcatcttgcggtcccaagagtagcaggactccaaagtccccaatcatttgtacgtgtgagttgggaaaccatatcttaagaaaggcagtgccacccgactcctatgcagacagctgccattcctgccaaggtacctaggctgagattcagcctcccagatccaagggggaagcaggctcagagaggacacagcagagcccaggctacctggattaggagtagaatcccaaggtgactggagggctcttgttcccatggtgatgtaggatggacctgggcacgatggacttagctcagaggaggaccctcaggccaagagacaaacctctgagagctaatgtcaggtccctggagactcccctggctggcagcaggtgggaaccataacttatatgaaaggctgtgccacccattgggctgtgctctggggtatgacctgggaagctgtcaccacccacacaaaggcctgttatctctgcctcctgccttccttcagtagtaggaagtcttggatgggtgtgtgtgtgtgtgtgtgtgggggggtgatcccttctcaatcccccaggtcaaccctgcctttcagccacttgtcttctgtattgtactgtgccaagcatggagaggagtcaaatagggttctggttcttggggttccccagttcacaaaacctctcatgtgctggcaaatgtcaaaccattaactgaactgggttggggaggggcttttatttataacactgccaatccctgtggtgcaagcaattccactgtggccaatcctatttcaatttaaaattaccaatacaaaggcgaacccattgcaaaattcctgaaaaatcaacaactggttcttttttctgggctcgtgggggagagtagtgtagctgatgaggctcatctcggagaaccaaaggcggacttcgaattagccatgtagctgaaactggccttgaacctcttaccctcttgcctccatcgacaaagcgctgggattacaggtagatgccacacctatccaacaactggttcttaaaagcagatgcagggtacttcagcacaaaccatgctgactagctgggaccgtgtgagccccagtcagggaggggtccctggaatgcatgacagtggaccatgccagctctggagtttaggcaggaatgggcaaaggtgacaagcctcatgatctcaaggacaggaggtcccttgtaaggaccctctccccattccaccctgcccatctcctctatctcccctcccccctctcagccattaaagctgaggcatcaccagttgctctctgtgcattttgttgctttgatttggagtcttgcaatgtggctcagaatacttagaatccctgggctcaaaggactcattacaactcccccaagtagctggtttatgagcacagtctctttatacagctcacctccagagcacccttcaatgacaagaagccatcacaggccaggacccaactaattattctgcagtgtgtaattcagagtcacctgcccagaagagcatgagatgcccaccccaaacattcgatgttcatgctacagttaatgtacctggaaacccctctgagcttcgggaacttccacttgtggcatgccctgggtctttcttgcaggcttgaacctatctatttctaaccctgcacagacagggctcagacagtttaagggcagaccagacccttcctacagataaactctgagctgtgctgagccctggaggcagagatgcatatcatgtcttggaggggccatcactgtttgcctgtggtaggggatagggctattttcaccgtggaccagagtcaccctagtttacacacacacacacacacacacacacacacacacacacacacacacacacacacactgctctacaaactgcagaactaagcacccacatggatggagaccacactgtggctttccgaggacacagagcctagggacacttctcaccacctagttctgtggcagccatgggtagtaatgcttcctagggaaccagggataggtctccggtcccacctccagaagccaatcagattgcatgttcccgtggtgaccagcatccaggccacttgcctggcgggtaagattcttgacccttctgcctggtactattttcagcccaagtaagaacaagattttccaccaaccctggaccattgtccagcaatgacgtgaggtgacctgcctatgctcaaaatatctcctcttagcctttgggcctccctgcccacccctcaccctcacaccatgatccagggctgtcctgaaggccattgtgaaagggcacaggagccacatggctactagaccaggatcccaagggttgtccagcccagctgcagactcaatgccagagaggggagagaccatggccaaggtcagcgtggttcctgggcatgaaccagggacttggattgcttctgttactgtgccactccctccatataggtcagtgacttcatgagtgtcctgtgccccctgaacagcccagctctcccgaccccccgagctggaaactgtgatcatggacttgacacagggaaactagaatggggcagatttgacaaacagggtaaacgcttactgctctctacagctgttctcagagaacaccaagtaacaaggagtgaccctcctatcccctagaccctgtgtcctataaaatctgaatgcagtggattaaagaaagcttcctgggagcaagccacagtgtggtctccatcccatgtgggtgcccggatggaggggagggactgtagaggacactgatacccttgtcctccaagatcagaaaatattctagacaacatgtccatgcctggtggccccagtcttggtacacatcagccaccatgccagtcccatctacactcatcctggcagagttgggcttatgtttttagaacgggtcatagaggctggaattcctgttctggcctaggtctcccacatgatttagttacccatcacacccagtccatgacatagatattgttagtgctgcttaacagcagacagcagttagaagaaggcttggtccaggtaggttgcaggtaacactgtatcaaggaaaagttcctatctccaaaggtccccagggattctctagtgtcccacactgccacaggtcaggaggctgtgtccatgttctttcccatgattcagatctagacagtagtgtggggagagggctcagcacacagatttggtttgaagatcacacctcctcttccaacatagccccttgagcacatggctccatctcatagcacctcacttttctcatcttagtgagatccagcctcccatgccgactcttaggaggcttacctcagactgcacacatgtacatacgcatgcacgcatgcatacacacacgtcacttagtccaatgtctaccacctagaaaactttatgcatatactgctaagggacatagagattagcccttggacctagctctcccagagcctggtcagcatgattcagatctaatgtgcctggaaccctaatcccctggggagaccgaaatccccacccccacaggctgcggaaggaaggttgcaggtccatcctagagaaaatatggcctcagttctgccctgcctgccactgggcggcttctaggtgcacaggcctatgtgtgtgtccagaaccttgcctgaaaatggtaaccaaagggggatagcagatagtgagagggagaaaagaggagaagaaagatcctaccaccctcagagagggcttgcctatcatcccctgactgcatgtgcctgccctggtggtctatagctgcatctccattccatcaagtgccctgaaatccggagggaaagcattgacctggaggtgggtcgtagaagcttttgctgtgtgaccttaagccgctccacttgccctttctgggcgagtctggaggagttgtttctaggttctggttctcccatcaaagcattaagtgtccataccataaggcacaagagctgttctgtaaggattgaaaagcctaccaagaggtaaaggactccattgctaccacacaatgccacaccgtatcacacagtaaactgcttttgtaggagaagagggtaaggtagccaggctgacttggctgccagctgagctgccccagggcagagaaagaagaacagagcccaaaggtcaaaacccactgccctctgtccaggttggcaggacctgggcaagctgtttctgttctctgggcctcagtttccccatacttggcaactggctctgtctagtttgcctttgttcaggagaagcttttggggtttgccctggtttctgcaccggcccatctgggtgtcctgtttcagctctgtcccagccaggaacaatgagccagtcacttgttggaccaaaccctgtccccagggtctccgcccactatgttggactattgtcagcaatggagtcaaaaaagaactttccactcacaacacaatgattccccctagactattgtccagcagtgacgtgggggatctgcctgtctcaaaatatcccctgtgcccatccttgggagctcccgaccctgctcctctcctccctactgacataatttcctggagctgttggctcctcatggctagctacaaaatagcacaaacacttttccttgtttggctgtttaagagggcagaaggcccagagagggctatgccctgtccaaggtcacactgtcaaagaagagtctacacatatcttaagccacagagaagtcagagtgaagtctccttatgagcccacagctctctggatattccttctttctcagccagcctctttagctctagcatgctttcaaaggccccagactggagactcctacaagactaggtggtgagggaaagagaggtaatgggctgaatctctggttattatctttgagcaaagagctcagagcaaaggcctggatttccaggctcatttttaccaatgtggctattagggactagatatgtcctcccataatccatatgctgaaatcctaattgcctgccagatgtgatgtgacgtgccagtgcaaggccagcatgggtgaggtgaggcaggaggatcaggagttcaaggctatccttggcaactttgagagctcatggaagaccagctacataaaactctgtttcaaacaaacactcaagaaacttgaattaccaaagtgctgatttggggaggtgagccttggcgaggtatgtaggtcacaaggatgaagacctcatgaatgcaattagtgcctacattggccagctttctgctactgtaacaaaaatactgaaagttataaacttctaaagagaaaaggcttagaactcagagagaggctgagacagcatctcatatagcccaggctgtgtgaattcctgttccgacttcctgagtgctgggattacaggcgtacattaagtcccagtaggaagggtttactctgactcacagtagaagggtttccagttcatgattggtttattctgtggcttgaggtcaccagagaaacctaagtttgatgacaaaccaacttcagtatgttgtcctcggaactccacatgtgctccccacaacacaaataaatgtgattctaagaaatgttcaaaggaagccctccctcaacttctgcccagaaagctctctcatctctttgtaccatgtgagggctcaacaggaagttcatgtgttgtaactgggaagaacccagccatgtgacctcacaccaccaaactctgacttgtgaaacatcactgtccaccatggaaaagccatgacagtagcaagggggttggagagagggctcagctgttaaaaacacttgctactcgccaggcagtggtggcgcatgcctttaatcccagcacttgggaggcagcagatttctgagttcaaggccagcctggtctacagagtgagttccaggacagccagggctacacagagaaaccctgtctcaaacaaacaaacaaacaaacaaacaaacaaacaaacaaaacaacaaaaaaacacttgcttctcttgcagaggaccctggtttagttcctagcacccacgtggtggtccacagccaaccctaactgcagtctcaggagacctgatctcctcttctgacctccatggccaccaagcacacaagtggtgcacatacagacagacaggtaaaatacttacacataaaataaatctttaaaaataaagacagtagcgggctggagagatgactcaccggttaagagcactgactgctcttccagaggtcctgagttccattcccagcaaccacatagtgtctcacaactatctgtaatgggatctgattgatgcactcttctggtgtgtctgaagacagcgacaatgtactcatataaataaaataaataaaactttttaaaaaataataaataaaaataaagatagtagctttagttgtggttgtggtgttctagggaaaaggagtcagctgggaacacaggacactgggacagggacaggtacgtgcccaggccaccatcatcctcacaaggtgggggaggggcaagggattggactgcaaattcaggctcttcctctgacaggcagggctagtatttgtcttccaggttactcaactgcaaagctgcagctaggcctgaatgggaatggctacgtccttcccatccaagctgctgctgggagatgtgtgacttccctttcctgtctgtacactgtcttttggccagcgctaacaccctgagtcactttgggtagctgataaagttcactggaatctgagagttcagtccctgcttgaattaatgcccagccctctgcctggaacacagctccttctccacccctgtcttcctctgggcacctctctcctcgggccgctgggcagggagtaggcagaggctgtctgtggcattggctcacagactggagctctaagctgcctataaggtcccttataatggcttccactcaagcgcagccgggactcttgacttcactgcagaaaagaatttccaggctagcaaattggttatgcttggttgcccacaactctaattgaaaaattaaagtcccagccctggagaggcagagacgagaggatctctaagttccaggccagccaaggctacacagtgagaccgtgtctcaataaaacaaaacagtaaaaacaaagagaaaggagcctgtcaccaagcctgacagcgggagtttgtagactcctgggactcacatggtggaaggagagaactgactcacatgctgccctctgacctccacactcatgccacagacgcgtgtgcgcatcacacgtgcacacacacacacatacacatgtgcacacatgcatgtatgtacacacataacaagtaaaatgtaattttagaaatttaaaatgaaacagaatttcagagggaacaaatatgaaccagcattgagtttattcagaagagttgagtatgcacttaagccttgggggcttagaaagccaaatctggggagacagctcagtgggtaaaggctccaacaccatgtcagacagtctgggtttgagcgcaagacccacatggtgggaagtgactcccacctgtatatacacagcaagtagacagatggacagacagatgtacaggaaaagaacatgacatgtccaagtgtgactgtggtcttctcaagagaaaatcaagattgtctttaaaatcacacacacatacacacacacacacacacacacacacacacacacacacacacggagtgctggggatgcagctcaattgtagggtctgtcgtgtataaagccaaaggtttgatctccagcatcacataaaactcagcatggcggtacatccctgtcaccccagcagcactcaagaggcagaggctggtgctcagaaattcattgccagccttgataccacagtgagtctggggacccagaacctctgccttaagaagcttttttttttttttcatttaaaaaaatttaaatcaccatatatacaattttggtgacttctgaagttacacttactctgttatagacaatagggtaaagtccaggttgcatggaaacttaagatgttctccacatcttgtttgtgagattcccagaacatagctgggaaaggaggccgtgtacactcagcccttaatcatggctcattgcaattttaacattcttatttgaaaatacctctacatctccataaaaacctactatctcagggctggggagttgggtcagcgcttcggcgtggctactgttcttattgaggacctggattcagatcctagcacatggcaagcctgtaactccagctccaggggaacccactgcctccagcctcctcaggctcctgcacacatgtgcgcataccaaacactgacacacatacatagaatttaaagatgatagaaaataaaaatttttaaaagaatattatctccatctatttccacatcagcaaccttcacagcaaatgctaattgtgaaggtgttgttgttgttgttgtttacagactttcactgtgtattcctagctggcttgaaacttactatgtagaccaggctggctggcctctgcctcctgagtactgggattaaaggcatgcacttgattctcagcaggccagggggttaatccagaccctatggttaactcccccctttccacatttgctttctatctttttattgtgcctttttattgtaccagcagtcactgctatcccccagcttctctgaccatgtccagctgtgcatttctgtgacgagggcttcaaatgccagcatgccttcatgttagaaactaaatttcttcaggttaaagagacagctccacagttaagagagctcactgtacaatcatgagacccagagtctagatcgcagcagccgtgtcaaagctgtagggaaggagcagagacaggattgcgggagcttgctgcccacaggcctaaccagaaaacacaagctccaggtttgaccttggctcaaaggagcaaatgaagacagactgacgagggtgagcattctgtatgaggggagaagaaggaactaaaattctacaggggtgggcacaccatatctgggtgagtgtttacatgtttaggaatgtggtgaggggtctagagagatggctcagtggttaagagaactggctgctcttccagaggtcctgagttcaattcccagcaaccacatggtggctcacaaccatctgtaatgggatctgacgccctcttctggtgtggctgagggcagctacagtgttctcacatacataaaataaataaataagtatttaaaaaaaagaaaaagtgtgctgagggaacaggttggcgttggggacagaagacaggcctgggggagtggcacgagggggctggcagaagaaacgggagtatggacaggatctagctgccttctctccttttccctcttcactccacacattcctccagcttgcacttcctgtccccggaattcctggcagcaaagggatgcgggtggaggcagtccacagcttaacttctaggttgtcagttcctggagctgtctctgtgctgtttcacggctgtgctttgaccatggtaggatccgggtttttgatgctgcactgctgccccttggtggtcaaatcctgatgaggactcagggaatggagaagagtcgtctattgcgatctatctggatgaattcgtgagctgtttggtagtcaggctgttgctggatcagggtaatggtgggataggaacaatggattgacagaggatctagcatgtttattgtcacttaccaactaagtgacagtggctgattctgcctctgccatagtgtcagcttcctccctccccagccagggctggagatcattctgttctgggcactcatttgcctgtgggaaagccctattcagtgctcagtcacagccaaagaagggtgcagcccagaccaatatccaggtggaacactttttccttgtctcattttagcaaagcaccagagacccctgccctgctgtcttgtcttctcagggtggctcccaaagctgtactctgttccctgggaagtgtggcaatagagttgtcttagcagccagtggtgttgacctttaaaggacggaagctagtcctatcgtttggatgcccaagcacagaagtagggaaagtgcatctgactgatgcagaagtggagctgaagcgctggtccgtgggatggaacaaaatgcacaaaggtgatggatgggcaggcctaggctagatttccaggccctcctgctctctgccgccccaggcctgctcattgctcatccccaggcctctgctgacccacagacagacagatggaaaccccttgttgacccacagacagatggaaactccttgctgacccacagacagatggaaactccttgctgacccacagacagatggaaaccccttgctgacccacagacagatggaaacccctcaagtcccacatcatatagcattgaatctgagccccagctcttactccatgccatttctttgcatctgtgacatttatatacctcattaatcacgtgaccttaggcatctgtttcctcattatataaaaaggcaaaattgtactcagtcaatacttcatcctcaacatctgccttgtcctgctggaataagaagtttccagagagaactgcctctctctgtgtccagaacattgcctggcttgtaggtgccacacaactattttctgaatgaatgaatgaatgaatgaatgcagtttgcaatgaggaatgaatgagatacact

SEQ ID NO: 21 - DNA, 2541 bp, Mus Musculus
gactcgggcaccaggaacagcggcggcagcccttggaggggaccagcgcagcggggaggtgagaggtgcttcctagaggggagcggacaccaagagaggtcgccaagtgaggcctggggacgggagcgccggtcgagtcagcgccaaacagggagagcccattacgtgactgtcccgagggctcgggctcccagcccttgtactgcgcaaaactgggcggtgagagccggctgccggtgcgctgatgaactttgtttcctctagagcgtgatctcggagtcctccgggcagctgcttgtcttaaaaaatgctggaggctgggcgggggcccaggcctgggaacctgttcttcctgtttcctgcctcagtcccagcagctggtccaggcctgtgcatatgtgagtgaagaactggagcaggcgctgagcatcctcaccaccccaagagcaggagctgatcaggtccagggcaatggcagcagacctggaaccctggaatagcaccatcaatggcacctgggagggggacgaactgggatacaagtgtcgtttcaacgaggacttcaagtacgtgctgttgcccgtgtcctatggcgtggtgtgcgtgctcgggttgtgcctgaacgtcgtggctctctatatcttcctatgccgcctcaaaacctggaacgcctccaccacctacatgtttcacctggcagtttcggactctctctacgcagcgtccctgccgctgttggtttattactacgcccggggtgaccactggccatttagcacggtgctctgcaagctggtgcgtttcctcttctacaccaacctctactgcagcatcctcttcctcacctgcatcagcgtgcaccggtgcctgggagtcctgcgccctctgcactccctgcgttggggccgggcccgttatgcccgccgggtggctgcggttgtgtgggtgctggtgctggcctgccaggcacccgtgctctacttcgtcaccaccagcgtgcggggaacccggatcacttgccatgacacctcggcccgagagctctttagccattttgtggcttacagctccgtcatgctgggtctgctttttgctgtgcccttttccgtaatcctggtctgttacgtgcttatggccaggcggctgctcaaaccggcttatgggaccacaggaggtctgcctcgggccaagcgcaagtctgtgcgcaccattgccttggtactggccgtcttcgccctctgcttcctgcctttccacctcacgcgcaccctctactactccttccgatcacttgacctcagctgccacaccctcaacgccatcaacatggcatataagatcacccggccgctggccagcgccaacagttgtcttgacccggtactctacttcctggcagggcagagacttgtccgctttgcccgagatgccaagccacccacggagcctacccccagcccacaggctcgtcgcaagctgggcctgcacaggcctaacagaactgtgaggaaagatttgtcagtcagcagtgacgactcaagacggacagagtccacaccagctggaagtgagactaaggacattcggctatagcacctcagtcaggtgtcagtttatgtaggggagctgtaggggaccaaggcttgttaaaggggctgatatcctctgatgcggatcaacagctctcacttggcaggggctcaggatactcatcttgcggtcccaagagtagcaggactccaaagtccccaatcatttgtacgtgtgagttgggaaaccatatcttaagaaaggcagtgccacccgactcctatgcagacagctgccattcctgccaaggtacctaggctgagattcagcctcccagatccaagggggaagcaggctcagagaggacacagcagagcccaggctacctggattaggagtagaatcccaaggtgactggagggctcttgttcccatggtgatgtaggatggacctgggcacgatggacttagctcagaggaggaccctcaggccaagagacaaacctctgagagctaatgtcaggtccctggagactcccctggctggcagcaggtgggaaccataacttatatgaaaggctgtgccacccattgggctgtgctctggggtatgacctgggaagctgtcaccacccacacaaaggcctgttatctctgcctcctgccttccttcagtagtaggaagtcttggatgggtgtgtgtgtgtgtgtgtgtgggggggtgatcccttctcaatcccccaggtcaaccctgcctttcagccacttgtcttctgtattgtactgtgccaagcatggagaggagtcaaatagggttctggttcttggggttccccagttcacaaaacctctcatgtgctggcaaatgtcaaaccattaactgaactgggttggggaggggcttttatttataacactgccaatccctgtggtgcaagcaattccactgtggccaatcctatttcaatttaaaattaccaatacaaaggcgaacccattgcaaaattcctg

SEQ ID NO: 22 - protein, 373 aa, Mus Musculus
MAADLEPWNSTINGTWEGDELGYKCRFNEDFKYVLLPVSYGVVCVLGLCLNVVALYIFLCRLKTWNASTTYMFHLAVSDSLYAASLPLLVYYYARGDHWPFSTVLCKLVRFLFYTNLYCSILFLTCISVHRCLGVLRPLHSLRWGRARYARRVAAVVWVLVLACQAPVLYFVTTSVRGTRITCHDTSARELFSHFVAYSSVMLGLLFAVPFSVILVCYVLMARRLLKPAYGTTGGLPRAKRKSVRTIALVLAVFALCFLPFHLTRTLYYSFRSLDLSCHTLNAINMAYKITRPLASANSCLDPVLYFLAGQRLVRFARDAKPPTEPTPSPQARRKLGLHRPNRTVRKDLSVSSDDSRRTESTPAGSETKDIRL

SEQ ID NO: 23 - DNA, 2108 bp, Mus Musculus
caggaacagcggcggcagcccttggaggggaccagcgcagcggggaggtgagaggtgcttcctagaggggagcggacaccaagagaggtcgccaagtgaggcctggggacgggagcgccggtcgagtcagcgccaaacagggagagcccattacgtgactgtcccgagggctcgggctcccagcccttgtactgcgcaaaactgggcggtgagagccggctgccggtgcgctgatgaactttgtttcctctagagcgtgatctcgggcaatggcagcagacctggaaccctggaatagcaccatcaatggcacctgggagggggacgaactgggatacaagtgtcgtttcaacgaggacttcaagtacgtgctgttgcccgtgtcctatggcgtggtgtgcgtgctcgggttgtgcctgaacgtcgtggctctctatatcttcctatgccgcctcaaaacctggaacgcctccaccacctacatgtttcacctggcagtttcggactctctctacgcagcgtccctgccgctgttggtttattactacgcccggggtgaccactggccatttagcacggtgctctgcaagctggtgcgtttcctcttctacaccaacctctactgcagcatcctcttcctcacctgcatcagcgtgcaccggtgcctgggagtcctgcgccctctgcactccctgcgttggggccgggcccgttatgcccgccgggtggctgcggttgtgtgggtgctggtgctggcctgccaggcacccgtgctctacttcgtcaccaccagcgtgcggggaacccggatcacttgccatgacacctcggcccgagagctctttagccattttgtggcttacagctccgtcatgctgggtctgctttttgctgtgcccttttccgtaatcctggtctgttacgtgcttatggccaggcggctgctcaaaccggcttatgggaccacaggaggtctgcctcgggccaagcgcaagtctgtgcgcaccattgccttggtactggccgtcttcgccctctgcttcctgcctttccacctcacgcgcaccctctactactccttccgatcacttgacctcagctgccacaccctcaacgccatcaacatggcatataagatcacccggccgctggccagcgccaacagttgtcttgacccggtactctacttcctggcagggcagagacttgtccgctttgcccgagatgccaagccacccacggagcctacccccagcccacaggctcgtcgcaagctgggcctgcacaggcctaacagaactgtgaggaaagatttgtcagtcagcagtgacgactcaagacggacagagtccacaccagctggaagtgagactaaggacattcggctatagcacctcagtcaggtgtcagtttatgtaggggagctgtaggggaccaaggcttgttaaaggggctgatatcctctgatgcggatcaacagctctcacttggcaggggctcaggatactcatcttgcggtcccaagagtagcaggactccaaagtccccaatcatttgtacgtgtgagttgggaaaccatatcttaagaaaggcagtgccacccgactcctatgcagacagctgccattcctgccaaggtacctaggctgagattcagcctcccagatccaagggggaagcaggctcagagaggacacagcagagcccaggctacctggattaggagtagaatcccaaggtgactggagggctcttgttcccatggtgatgtaggatggacctgggcacgatggacttagctcagaggaggaccctcaggccaagagacaaacctctgagagctaatgtcaggtccctggagactcccctggctggcagcaggtgggaaccataacttatatgaaaggctgtgccacccattgggctgtgctctggggtatgacctgggaagctgtcaccacccacacaaaggcctgttatctctgcctcctgccttccttcagtagtaggaagtcttggatgggtgtgtgtgtgtgtgtgtgtgggggggtgatcccttctcaatcccccaggtcaaccctgcctttcagccacttgtcttctgtatt

SEQ ID NO: 24 - protein, 376 aa, Mus Musculus
SRAMAADLEPWNSTINGTWEGDELGYKCRFNEDFKYVLLPVSYGVVCVLGLCLNVVALYIFLCRLKTWNASTTYMFHLAVSDSLYAASLPLLVYYYARGDHWPFSTVLCKLVRFLFYTNLYCSILFLTCISVHRCLGVLRPLHSLRWGRARYARRVAAVVWVLVLACQAPVLYFVTTSVRGTRITCHDTSARELFSHFVAYSSVMLGLLFAVPFSVILVCYVLMARRLLKPAYGTTGGLPRAKRKSVRTIALVLAVFALCFLPFHLTRTLYYSFRSLDLSCHTLNAINMAYKITRPLASANSCLDPVLYFLAGQRLVRFARDAKPPTEPTPSPQARRKLGLHRPNRTVRKDLSVSSDDSRRTESTPAGSETKDIRL

SEQ ID NO: 25 - DNA, 38019 bp, Homo Sapiens
gttggagtagaaaaacctttctaattatgactcaaactccagaagccataaaagaagagattggccaggtgccatggctcacatctgtaatcccagcactttgggaggctgaggtaggaggatcacttgagtacaggagtttgagaccagcttgggcaacatagtgagaccttgtctctacaaaaaacaaaacaaaattagctaggtgtggtggtgcacgcctgtagtcccaggtacttatgaggctgaggagagaggattgcttgagcctgggaggtcaaggttgcagtgagctgagaaaatgccactgcactccagcctgggggacaaaatgagaccctgaataaaaaaaaataaaaataaaaataaaagattgataaattaaatcacagaaaaattaaaacttctatgttaaaaaaaagttacaaacctaagtgctatgatttgaacatgtcctccaaatttcatgtgttagtgacttaatccctaaattcattgttgattggaagtggggccttcaggaggcacttaggattagacaaagtcatcaaggtggggcccacatgatgggactggtagctttataaggagaggaagagaaacctaagctagcatgcttgctccatattgccatgcgatacctctcaccatgtcatgctacagcaggaaggccctcactagatgcctgaaccatgctcttgaacttcccagcctccagaatcatgagctaaataaatctctattctttattaattaccctgtctatggtattcagtcatagcaacagaaaatggactaagacactaagtaaaacctaaagacaaatgacaaactaggaaaaaatattttcaattcaggtcacagacagagggatgaataatcttcctaaaatacaataagctaatgcaaatcagtaagaccaacaacttaatagaaaaatggctaaaggatatacagtcatgcaccgcatagtgatgttttgatcaatgatgaactgcatatacaacagtggtcccataggattataatactgtgtttttactgtaccttttctatgtgtagatatgtctagatatacgaatacttaccattgtattacaattgcctctagtattcagtacaggtacaagtttgtggcctaggagcaataggctataccatatagcctaggtgtgtagtaggctataccatctgggtttgtgttcacgttcacacaatgatgaaatagcaaagtgacacgtttcttagaaagcatcccagtctttaagcaactcatgactgtaatggaaaaggaaatggaaatggatcataaattatacttttgttatgaagatatgcactcaaaacaaaaaaaaaaacctgacaaattaaaactacactgagacatgacttttcacctatcagactggcaaaaatccaaaagtttgatatcacagtgttgatgaggctatggagatacaggcactcccatacactgctggtggaagggtaaatgaatacaatctcggtggctgacaatttgacaacagttatcacatcttcaaatgcacaatccttttgatcgagtaataagtttctgtgaaattttcctacatatatttacacccaagcaaaaaaatatgtacaaggctattcattgcagcattgtttgtactagcaaaaaattggcaacaacccaaatgtccaccaacagaggactggttaaatacattatggtatgactatacaatgggatactatgcggcccttataaagaatgaagaagcttccaatgtactgacttggaaagatctccaagatacactgttaagtgataacatgcaagggtcagtgtgtatctttatgatactcttttgtgttttttcaaaaaggaaaatgagggaagctgaggcagatggatcacttgaggtcaggagtttgaaaccagcctggccaacatggtgaaaccctgtctctactgaaaaaaatatatacaaaaaattagccaggcatggtggtgcaagcctgtagtcccagctacttgagaggctgaggcacaagaatcgcttgaacctggagggtggaggctgcagggagccaagatcacgccactgcactccagcctgggtgagagagcgagactccatgttaaaaaaaattaaaaataaataaaaattaaaaaggaaaataagtggaaatgtttgtattcacacaaaggaactcaaggatacgcaataaactaacaaaaacactttccaggttaagagtgaagggagcagtggaaatcaggcaactgaatgatgggggatggagggagacatttctctgaatatctttttttcctatactataacatttttgaaccatatattactcattccaaattttaaatagaaaagttaaatgacacaacaagtttacatttggaagcacagacaaagctatgttggctaaatgcaaatgaaataaagcaggggatggtagtagtgatgtaagaaatattttaaaatatggctaaaagcattagatgggacaaaaaggggacacttttatctataaaaatatgtaagccatagtgaggatgtacttttatatattgaataacagaggatcaaaatagatgaaatagcaatagaaggagaggttgatataaacaaaaaagtagtgggagacacatcattttcagcctgctgggttatataagtgaaaaagaaatactgaggctggacgcagtgactcatgcctataatcccagcactttaggaggctgaggcaagcagattgcttaagcctaggagttcaagaccagcctgggcaatatggtgaaaccccatctctactaaaaatataaaaaattagctgagtgtggtggcaccagcctgtagtcccagctgggaggctgagctgggaggatcacctgagcctgggaagccgaggttgcaatgagctgggctgggcaacagagcaagaccctgtctcaaaaaagaggagagaaagaaagaaaaagaaagaaagaaagaaaaagaaagaaagaaagaaagaaaggaaggaaggaaggaagaaaaagaaagaaaggaagaaaggaagaaaagaaagaagaaaggaaggaaggcaggcaggcagaaagaaagaaagagagaagaaaacaaaagaaaagaaaaaaaggaaggaaggaaggaaacgaaagaatgaaagaaaggaaggaaggaagggaggaagaagaaataaagagaaaattatttttcaatattatatatgtgtgttacttacgtatatagtacaactaggcaaataaaatatcaagaggtgaatctataaaaagaaaacacacatctcccttaaaaatatccatggaatgcataaaaagtaaattataaaaaataaaatattcaccaactacagactttaccctttctttacagactttaatttaacctttcttcctccacatacctgcaacaaaactagaaactcataacatgtttaagcaataaacagaactccaaaacctaaatattcccctaaaaagacttttggttgtgtcaaagagtaattacaaattcaattactactatattatagtattataatatataatattttatatatattatatatattattgttataataatttataacaattataactattgttataaaacaatgataaagaaagctttacatatcaaaatgtatgtaacatagacgaagctgaattcagagggaaatgatagccttaaaaatgcttacattattgaaaaagaatgacaacaaaataggtattcacatttatttatttatttatttatttattttgagacagagtcttgctctgtcactcaggctggagtacagcggcatgatcttggctcactgcaacctccaactcctgggttcaagtgattttcacgcctcagcctcccgagtagctggaattacaagcgtgtgccaccatgaccggctaatttttgtatttttagtagggacggggtttcatcatgttggccaggccagtcaaactcctggcctcaagtgatccacccacctcggcctcccaaagtgctaggattacaggcatgagccaccgcacccagcctaagtattcactttaataagcttgtagaaaaagaacagaaaagctacccaaggtaattaagagggagaaaatagtaaagataaaagccagaacttaattacttagtaaactatagagctgagaaataaattcaaatgtgttttaaacaagcaagcaaaaaaattccttagtatggcattataaaacccttcgtggcttggccctggtgaacctcttaactttatcccttgacagtgtccctgcacactcaactcctgccattctgaactatagactccttgctatttgaactcagcaacctggctgatgcagataaaattttggagatagggctgatatccctgattctttgagctcctgtcacttcttaccactgacattcactagtgaagtccacctgtcctgtaaggcccagctcaaaggtcccctcttccaggtaggctttgtggattggaacaactacaacacaagccagcgtgggaggagcaccgctagagtgggtgaacccaacatgtgtagattaacaggttaatgagcgaagctaaacccaactgtgggcatggaggaaagctggctactggaggtggcatttgagctggttcatggaggagaaatgggatttcagtctactggagcaggggaaacagccccccaggaagaaggaaaagcatgagccaacatgggggcgtgtgtatgaaaggacagagtgtttggagaatggtgggacgttccatgtgactgcagcgtagaaggctgaggaggagtggggacaggtgagtgaagaaaggtcagcagggcaggtcacacagggccctgaaggacactgcgccgagggcatatgcttcatcctgccactggtgatggggaagggtcagaagtattgtgaggctgggactgccagacagtgagttgcctgaggctcaccctcactgagaaggaggaatgtggggcggtggatggtttgtgggagattccataagctggcaggctgcccaggaggagctagggggagatggggtcagaggcctggggagtggggaaggggcccatctctgagtttgtttctcctccctgacccatttcctggttcctgcacaccaacaccctccccaaccctcatcacaaccaggtagggtctaggaggcagctcctggcagctaccccagtcaccacagatagagtcacagggctccatccatttgtctgtcccagcccccagaggggcctctgtggtcaggtctttgtgtctgcacagtggccctctttgtcctgagcagcctgtccccatcccacctccctcctgcgcttctctctctcctgcctgggtcacaaaaagcaccagcttcgaagagagccaggccagaactctgatcttggcttcccccactgagtctctgtgtgaccctgagcaagttactttgcttcatggatttttagttttttggttctgtgaaaaagagctgttgtaagcaatcaaactcctggcaaggagtttggcctgccacccggtgctgagacccagataacaaatcatgaactcggagactcttacctcatcctcatgctgttcactggacctcttaccaccagctcccacctcattctcaccctcacccttttggccagtggctaccattctcccacttgacagacaaggaaaccaaggcctgacgacagggctgactttgtgggcatgtgacctggacagtaagggtcatgatttgaagtgttaaatactctgccatcaccatcttgaaattcttaattttttcttattttttcattcttttgttggaaattttaaatttttgaatgaggggcccacattttcattctgctctgggtcccgcagattaagtagctggtcctgcttgaggggagatggaacagaggcatgcccaggcctggactaagcttcctgcatcccaggcggcctcacttgggtgcccgcatcctggcatgctgagagctagagtttccaggctgcgtttggcatcagagccctggaccctgcccaggaaacctgaggagcacagttctcggctggcaagggaagggaggatggtgcaggtcaatgcagcagttcagggagcaagtaagacaaggctgctagagccagcccagccctgtgtaactggagctgccagtgtgggtcccaatgccatgacccagccataactctgggaactcagcagggccttccttcccatcaggctgcaattctggggccaggagacccaccgcagattcactgctttggactttcgcttcccctttctgaacctgtttctctacatgtcacatgagaataaaataatgcctatctcacagggttctggagaatattaagcgagataccttaaacttaatgactagcacaaagaaggtgaccactaaaatagagttcttactcattcactcataatatattgtgacaaatgttcagggacaggggtcaggtacggtggctcacgcctgtaatcccaggactttgggaggccaaggcgggtggatcgctttaggccaggagttcaagaacagcctggccaacatggtgaaaccctgtctctactaaaaatacaaaaatcagcagggtgtgatggtgcacacttgtaatcccagctacttgggaggctgaggcaggagaatcacttgaacccaggaggcggaggttgcagtgagctgagatcacgccactgtactccagcatggatgacagagcaggactccatctcaaagaaaaaaaaagaaaaattattcagggacagtgctaggtgttggccatttaattgtgaacagaatggaccctggctctgctctcagagagatccctgttagagggggagacaggcagtgatagcaataacagcatggtaagtggtggggcacctggcctgggtcttcgaggacccatggtggggagccagaagcagggggcactgtgggcagagggagcagcaagaggcaacaggaggctggtcagaggtgagaggtgaggcagagaggcagggaggctggagtggcaggctagagagctaggctttatccagaggatggtggagccaccagagagtgtaaggcagggtatggcatcaaggggcaacagagacaccactgtaccctgggaaggggggattggagcctgggccagggcagaggcttcatccccagcatgcattttcagagcaagttttcccaggggcaatgagagaagttgagagaaggaggatgaaaaggcctgaatgagccaaatacctcctcagggctggagagacaggaagcctcctaatacatgggagaagctgaggctggaactttgcccttcccctcctgatctgctactgctaatggaaccctcctcccgcccccatggttccattacccacctccaggggaccattactgtgcctgggccttcaccattagcctgccttggctgcttggttccagggagactccctcgatgctattccagcctttcagatggcctgttgtgtgacgctggctgtgtctcaatttccggtttgatcaatggttttacattacttcagccacaaaatctttcatgtgcttgcaacaaattcttaccaggaaatgtaaataaataaaaatacaaaagcaaaggtgctcaagttgaagtgggatgggagttccccaagcagccccaggtaagggggactctgttgggggatttgaagcctgctgggcttgatggcctctgaaacccagcgatgggactgcctggggaggatgtcaggagacgaaacttctaggccctcattgcatgggatactaacgccttgagcccagacagcttgggatgatgaataaaaccatgaaaaaagaatttaaggatagggtgcaggggctcatgcctggaatcccagcactttgggaggccgaggcaggaggactgcttggactcagcagtttgagaccagcctggtcaacacagggagatcccatctctacaaaaaatttacaaattagcccggcatggtggcatgtgcctgtattcccagctacttgggaggctgagatgggaggatcccttggccctgggacatagagactgtagtgtgctgtgatcatgccactgcactacggcctgggtgacagagtgaggccctttctcaaaaaatttaagacaggccagcaagtgagagattagtattactcccttttgcaaaagaggaaactcaggctcagagaggagtcataggacaggtgaggtaagactggaatctaaacccaaggctatggggttcaaggactaggccccttcctctgctcctcaagcctcactaagtcacctgtgtggtagctgaaacgctgtatgtctcaggaatgcagtttcctcagctgtaaagtaagggaattgggccagagcaggggcagagccctgggcaggccaccaaccagatttgcccgctgaaggctaaggtcgagcctgggtcctcaacttggcgtcaaagaaacttgtttctcctgggctaaatggcagtgacagtataaggtttgaagttttggaagaggggagagaaagagagggttggctggagttccagtgcccaaagggtcttccccacactggaacctgaaggcctaggccctataactcgggctatgaggatacttaggtccctggaaggtgcgtggcccagcttagacaataggcgcaggaggctagacaaggggcctttgtgtctcccaagcaaaggccccagcaggactgcagaggcggctcagccactatgggctgtgtgtccactctgctactgctcctggtggggctgcagccagcacccttcctggcagccaggcccagtcagctgatatggagcccaagagggcccaaggccccgaaggcccggggcaagttccttggctacaggaagaggcctcctctgcacttgtccagccagcggagcgattggctccatttcacaggaaagaagaccctgccagggaatggaactgggtcaaggtctcccagagtcagtgctgaagccagacaggaacctacactcctgattcctagaccagaaatgagagagaggcggggtgctcattcattcatccattcacaccttcaaggattgagcacctcccaggacctctaggacagcagcaggaagaaggcagacctggttcctgccctcgggagctcacagtctccgaacgggtcagacatgcagccggtagcccgaccagggaaggccattagagtggggttgacgacagagaagagaggtaaagcagctcaagataaggggccagagtggggagttcagggagctgctgataagattaaggcagggaaagtggggagcacgggagaggcgggatcctgagtaccctgctttcctaaccacggtaatggagagaggcacccccttcccccactttcaagcaagggaggtgcgtccttagcctggggttccgagcaggtatctcccagtaggtcccttcctggccagccgggctggggcaggggcgggacaggggtagggtggcgcggtggctgggcgcaaaggtcccgcagtgggccacgcaggcaccgggctgacctggcaaaactttggcgtctctgaaaacctctggtaaccagctcccttctagcgtgagggagccgggaggcctccttctggcccggcagtgagagcgtcgccgcccgaccctcccgttgcagcaccggtacagacacgctgaccccgcggccttgtcgctgggcggcgtcccggagcgggtggcgcggtgtctacccgggcgggttgagggcggtgccagggtcagtcaaaagtccgccccgccccctgcctggcccggcttcggggttggggaacagcgcagggaggtgggtagccgggctcccaggcacgtgggtctctgcggctgcggcgggacccgggcactggcacccgggagcggcggcgacggcaccccgagaggagaagcgcagcgcagtggcgagaggtggggtggggcgtctggagggaacaaggcgctgggagaggcccggggaagcggcgggccagactggcgcaggtgcggactgggcgcggggcaggggagggcgctgtggagcggctgtcgccccggggcacagttgcgagccggcgtgtagcgcataactggacggcttgaacgcgcctgtgggtccgtggttgaactttgtctccacgggagcgtcggtctcggtgagtgtggacgggcgccccagtagtgaggctgtgcgcgtcagcgtactggggaggtctgcgtgttagcgggtgagtgtgtgcgcccctcggggcgactggccaagcctgcggaacttgtctgtgtgtgctccgatgtgagcgtccccgtggcgtgaggcggtggccggtgcccagagacgcgaacccctggagaccccctaccactgtcctaaccccagggtcactctgggtggccacctaccattggtaatgttgagggggcagttgcagggagtgggcgggggaggagggagtggccagaaaggacagttaagcctctgtccccgggcttttaatctggcaaatggtgcggtagaaagggtcagtcaggagaaaggcgataccccaccccgcaacccgaaggctgccagtggccctcttggggtcctccaggagcgcagcccaagggttggggactgctggagaccagaattgccagctcgggatttgtggggtccatggctgctgttcctctcagcatggcatccccagcttcccaggaccacagcctgatctgcctggtttgttttggatctaagctgaaataattatgagttttgaggatctgggtggagacccaggcaagtttattacctgtgggtggaagtggaaggaagaagattctctgagcagacaggtccacaagagagctctggagactcagagatctatgttccaatcctgtcttggccactgtgtggcctgggcaagccgtcctttctctgagcctcagtggcctcgtctgtaagaagggactaatgataaggaatttgagggctgttgaggagctgatgagtgtgtcatgttcagcaccagtgtccccccatgggcaggctcacagcttggggatgggaagtcagtccctggaaggagcctcccagaaccagaatcccaactgtgcccctccctagggcacaagccttccacaggaccaagcctgaaccctgtagcctgggacttaaggtatttgataactggggcctgccagcctttccagccacctctcccgcctgactctttaccttgcagcagctgcctggagtctctcatttcttgcccctgacctgttgcatattctacactccctctctgataagccctcctactctcaccttcctcaactggagaactacccagacttgggacccagctcagatgtcctctcctctggaaagccttccttgatccctacagctgggttggagcctcttctaggcccctacaggcctggggctgacagccctggtcccacctgaaccgtcatgatctatgtctgtctcctcctttcctcttcccaggtctaggggctcctggagggcagaaactgggtcttattatttctgtgttgccagcaccctgcacagggctgagctgaactgagagagcagcagtggcgcccatcccctgtctctggcaccagcttctccagtaaaggcccggctgcaggggagctccatgtcactacaaagaagggcaaaccagaatctggttatcaaagtgggtggcacagtttgccagaacagtgtgatctgggacactgtaggacctagagtgcccaggctaaagacctagagattttatcctgaaggcaatagggagccatggaaatttatgagcagaggtgtttcatggtcagagcggcatttcagaaagcgctctctggctgcaggatggagaatggatcaagtattgccaagtgcagggaggtcagggcatttgtgatgtcaacactagaactgtcccaggagttgtttgaaccctaattgagcccttgccccttggccaaacacttttccctgagccttcagatgctcctgctgaggaatttggggacctgcaattgatctcatcccagctctgttcccagctggttgaatgaccagttcctgccctgccaggctctaaaaggaggccagaacaagtaagatcctgcatgggagagtatgtgtgtggggaggctctggcacaaaaggcttgtcgctctttctcctcttctccctgccttgggctgtcttggagtctggtcagaggggttggggatcccagtgggcaaccctcagaaatgactaccaagcttgggctgtggagtgaggctgtgactcctctgtttctgtctccctcctgccctggatgcatggggctctaaggctgtggatcccccaaggaccagctaagaaggtgtgagggtatcaccagggcctcatgagtgaccccatgagagctttgacttaatggctatagtctttagagaggccattgtccctctctaggtgtcagttctgccatttgtaaattgagaatggtgatccttgcttctttgagagcagagttgctacgaggattaagatagtgaccagggaagagctttataagccttaaactgcagtgctcagaggaggaatgtgacacttgtagacttaaatccattttgaagactataagagaacatgggtgcaatagcaagggattgtgcttgttattgaaatttgattactgaatgccttcctcccccaccccctctgcagagatggcttcactagtaacgatttacaacaatccattttgtcttcctatagccctgtgagggaggaattgtatctccattttgcagatcaggaaatagaggcatggattgtatcctgcccagggtcaccaagctgaggtgaaacctggggctccagtccacctgccagcttagccctccccatctgagacagagccctgttagggttaggcctggtcctctggcttccaggctgaggggagtttgaattctgccctgggaacctgtgtttggggctttcttgtggccagattacccaactgctgataaggtaacgcctgcccagacctgcccacgggaccagagatgccttgttgatctggtgaggggagtgggggttgcccctcatgccttccacccaaaccgcctctccccaaactgctttctgtaggcctgcttgctataccctctgggccacacctcctcttggttgtccttgggtcctgaggcctggccttcccttattactgggccctgataggaggaggctggctgtgtgggccactctgacctctgtactcatccagcggccagttgcaggactaggctaggccatacctgctttctctctctgtccccatcagccaccacaggttgggctcagagcagctgccagtgggtctttgggaaatgagtggccaggcgggagtaggcatggagtagaaggggaggctttgctccacggagtgccatagttggttctggagcagaggagttcctccaccccatcaccccatctcctaggcctgagtctttcctggtccaagatgagtagcgggagtttctggtaggagggtgagcagcctgggccccgtggaacaactccttgaccctctgccctggtaccttgtcactgtcattgtagctcctgaatgagaggcctgggtgctggagcgagggaaagggacctccctcagacttctggggctttatgtggcctctccctccccaggtctgaggagagcctctgggtgtcgacctggcttcctggtgagtgcccagccacccagccctggcttgtaggagggggactcttgccatggctgggctgttgcaggaaatccagggccaagggacctgctcctctcatggcaccaccgtatgtgtcgtctcctccttggtctccctccctccagactccctgtcccatctaccttccatgtggcaccatctttgtaaaggttgactctgaccatgtccttcccctcttaagccttccatggctcctcagtgtccttagaatagaggccaagcttttcagcctggcatttgagccttttcaagtgaattcctcaggctcccacacattccatgccacctcaccctccacagtagccgtataagacctcccagcctttttccagcaggtcacactttcatccaccaagtctttgctcatgcctctcctgccttcagagccctcctccctctttgcccacctgacaaactcctaatcatctaccagtttccagctcagatgacccctcctctgcagaagcactccctgaccacctcccccaggccaggtaggagttgctgtgtgctccataacccctgggcttgccttggttatggtttattcacccaagtggatttggtccatgtctgtgtctttttcctcagcctgactgggtactcctcaagggcccagcagagtgcaatctgagtctgagttcacaaggtccatctgaggccaggtgcaccagagcattggcaagtgtttgctgggactttgtggttcctgggaatgtgatttaagatttcattactctgaatccagacccctgtggctctgagaatctcaaaaccaaaggctatcaggagcaacgagtaatagaattgaagaaacacagccttcacacccggaaccagagcctcttggaattagactgcgagaaccagggaactcagaatcctggaggtacctggaggggccatctcagaatcagaggctcatgtggttcctggttgatgctttcatccccctttccaccttggattctccatccaccttctttcctcccaagctggacccttcctgctcctcctcaaatcttatcacagttccccttccagggaccttgcctgactgctctgaccatgacctctgtccctctgctggggacacctgggagggcctccctaccaagcagtgtcatgggctcctgaatttcagtgtctccctgttgtgacaggcagacacagcctccacattaggacagttcatgatttgctagcgccaaggtgcacccacctgcccccttgtcttattcctcatgagctgtcccatgcagcagtgattctccccatctgaccactgaagaacccgaggctctgagaaggggggctgacttcaccaagactgcacagcacaggtggctccaagttagagcctgaactcacggttcttgcctcttgaagctggaggcatttggctgtgataggttggggtggtgtccaggacgttgtggttctgagcctgtttaatttagtagcatgtctctgtagccctgttctgggctatgctgggttccaggtgagatgggtggtttggggtcctgctctatgttgggggtgaggtggtcaaacccacactgacaataattagaacactagaccttgagtaaggcccttcctctttagaggtcttggctttctgatctgtaagcctggttgatctgagacttacccactctgatgctgctctgagctcagccttggtgagtggcctccacagccaggatcctaggggggtcccaaagagggagagaacatctgggagggggtagagagcccaagggcctcctgaagggggtgcctaacaccacaacagcaccggctgatagcatctgaggttaccccttagccatttcctcagaccggccctggtgctcccggtgcagaagcatgtcaggcaaggcagggggcctgctggctttcagccccttgaaggacattggggaggagccagcgtgacttctaagctcctcagcctgtgcactctagccttgccctctccactcccctcaagccaccaggatgatgagcagttcctcaaacgtgtcatgtcatctcttgttcatcctcactctgctcctcttctctctccaaccacctgactcctcgtcttccaaaatgcaggtcaggcgctctctcctccaggaagccttccctcatcacccctccaatcctgttaggggcctccttggcttcctccaggcctgatcaccctgtgttatcatcgcctgtttctgagtgtgcctcccctgacgttgacagtgaattccttgagatctgacctacctcagagtccccaggtgccctgcccagcagtgggcatagatgtggcaacctttgtgaagggtgagcgagtgaaagagtatggtggctatctggcttctgctggggaatccctggactgccttccccctgaggatggccttcagtgtgggagacctgatctgtggtttttctggttgtgaccttcctgtatccccttcccataattcctgcgaagcttcctgcccttcttgtcttcctgagataaccccaccctccatgccttctttacctgctgaaatattctctcttactatttcataaaataagcctaaatcatctaactagctcaacaaccttctgaggcaggtactgttctgatattgagaggaaattgagatctgggttttggagttaagagacttgtcttaccactggaaagaggagaactcggatttcccacctgcctagtgcctctcttgccccctcaatgaggttctggcactaggtcctctgttttccctcacagcacccaactcctggcagagataggcagcaggggtctccacagtggtgacagcacattctcccctaccaggctagacagggtctgccaccagccagggaggcacattccagagccactctagtggaggggctggaatgtcatccaaccaccctggaaattctgcagtggcctgggagctgcccagctcctcctcctgactttggcctcactagcctagaaccacaaagagaaaggcccagactggggtaggggcagagccaggtcagggggttacaggtctgcatgctaggcttggctctgcccttggctcactggtgaccttgggtgagaccttgagctacccctttctggccttagtttttctacctgtgagatgggtgcaataaccacccatctgaaaagagtaaatcctgagccctgccaattggcattcctctggcagagaactgagcagacaggcagagagctgtggggccaaaaagggatggtcaggcagcttcctgggagagggccggggccttgcagggcaggaggtagtggtcaggggcacagcctctgaaatcagacagcccagagtggctatgccgtttgctaattcaggattcaacgagaggaggtatatgaagccacctaacacagaacttggcacagggacagcactaaactcttgttgtgatataggtgttagatgataagggaggccgtctctgagcaatgatatgaccatgggactgcttttgttgtgcctgagacaggaagatgagggcagggacagagaggatgggctttctggagggatggtgggtaccagatcagccagggcctgagtgccaggctgaggagctgggacagttgcctgagggcactagggagccacaaacatggctcaacaatgtatggtaggattcgtgtttcaggaaactacatgactgcagtgtgaaaggtggacagacggggcaggggtggaggcacggaggccagtgaggaggctgctgctgtggactgtggaagcacaggcctcgggctgcagtgtggggaccgcgtagtgcatgtccgaggaatttcactggttgaactaacaggacttggtgagtggtgggcttccagcagggtggggaagagggaggttgtccaggctgtatcagaggtttgaaacctggaaggatggtgggggcccttctcagaaatgagaaccacttgtggaaagtgatattctccattttagcctgttgagtcaaggcattttctaaggaggaggagacagggtgtgcacctgggtgcagcagggtgaaaaggctgaccatccctcaccttgtcatagtctctagagtagatcagtggggagctaccagcccaccggccttgtcaatctgagaccaccaggcaaggtgcactcagtaagcagtggcccagaggcatttcccgtgtgcacccacgccccccgtacccaagctattcctgcagtgcccccatctcctctcccacatccccccagccttgtactgcacttccagcttgggaacctgggctcagctgtcgcaggcccactcctccatcctaggcaaatgaagatggaaaaagaaaaactcaggaggtgcatgttctatttctcctgtgaggtacctgaggtgctggtggagggtgggacctgcccacacagaaggtcccctccaccaggcaactgtcccctccctgaaaccctgtgcttggtgtgcacaaggggctccaaggtgagacaaaaaccatggccagaattcgggagggctgggctctagtcttggctctgtccctgacttactgtgaggcttgggcctcagtttcctcctctgtgaaacagggtttgacacaggagatttcttttttttctatatatatatactttaagttctgggttacatgttcagaacgtacagttttgttacacaggtatacacatgccctggtggtttgctgcacccatcaacccatcacctacattaggtatttctcctaatgttatccctcccctagccccacaaccccaacaggccctggtgtatgatgttcccctccctgtgtccatgtgttctcattgttcaactcccacttataagtgagaacatgcggtgtttagttttcttatcttgtgatagtttgctgagaatgatggtttccagcttcatccatgtccctgcaaagggcaggaactcatccttttttatgactgcaagtattccacgttgtatatgtggcacaggagatttctaaatgccattttaggccctgatggtctagactgtgtgtgtgtgtgtgtgtgcatccgtttgcgtccactgcatgtacaccttagtgtgactctgcatgcctctgtgtatccgtgtgtcttggtgtgtctgtgccagtgtgtgttcaggtgtggcatatgtgtgtttataacacctaacgaggaatgcttagaggtaggagtggggaggagggggtctctagatagaaacctagcttgggcaaaattgtattggcagaagggcaaaagtgtgttggcagaaggacaatagaatgcacactgggcaaagagggtattgacttttcctgctatggggccaaagcacagaaccaggaccgagggaagggacactggaggcttggaggcttggctcagctgtacaggacattggggagaccttcctccaggcagggccacccctctgtgaaaggcggcctggggaagggggttgtggataacccattcctggaatgcatgagctggggtttgggtgtacagaaggcactcagaccaggacaaacaccaggccacctctctgcctccttctggttaaggttaccacaaaggaggtggccctgggggggattgacctgggtaggtttccatgaccctgagaccgcactttctctacctccctctgtctgcaggagccccttgtggcagcagcactacctgcccagaaaaatgctggaggctgggcgtggccccaggcctggggacctgtttttcctgtttcccgcagagttccctgcagcccggtccaggtccaggcgtgtgcattcatgagtgaggaacccgtgcaggcgctgagcatcctgacctggagagcaggggctggtcaggtacgtggggtggggggggggggagcagggtacgctggccgggaggtgagggcgggtgtgctgtcttgcctgtgtctgccctgaactggcttagatcaagcggatctgaaggcaggtgccctgccctgctcccccatcccaggctgtgatgaattcaggctttgaagccagatagctctgggtgtcaagcctaatttttccaatgcccggcagtgtgaccttgtacaaatagcttaacctctatggcaatatctaccaagggatggaggtgggggatgaagatgctgtgtgaaagctgctcagcccaggtctggcccttacaaagcagggtgggtagagaatcctgatcagacctattgaggtcctgagccaggcctcagacagccaatccatctccagagcgcccatgtccaatcccctcccactggcacttccctgacctgtccagagaaaggcagagtctcctgggctcctgtggcagttgaaggagagacagtctagagacataagcaggttccaggtggaccagaacccctagaggggctgggttgtcccctggttacttagggtcagcagctaagaaacctttaagcatttttgtccttgagaggccctcagaggagcaagtaatttgtaagtaacttgatcaaggttacaccacgggggatgggctgcaattcctattcaggtccatcccacagtggaagtggctgcaggagggaggtagtgaactccctgtttatgggagtgtgcagaggctgcagagggcttgtgcctgtgtgtgcctcctctgggcccccatagcctcttgtgcttgcttcattcattcattcattcattcattctctcattcctgtaatacctcctgtggtcaggcctcctgctggatgatagggacagagaaaagcatcagatggacccagccctcaaggagcacctgaaatgtgttggggtagaggatggaaggacaaattaccaactggctgagaaacgtcctgaggggtgatggaagggagaacttcagagattagaagatcctttgggacctacaatggggtgcagtgtgggtgggttcggggaaggctttccagtgagaaagaacagcatgaacacaggcaggggagcctggaagggtcttacaaggctcacatctcccctccagactgggagctccttggggcagggccagccagaccagggcgcagcggggctggtgagcgttggatagtcaggtggagccgtctctagtcccaggggcatcagggtcaggagaggcagaagggagacttaagggagggggctggggacttggctgtccctctaaggcaggggctgtccctctaaggcagggctaggaaagatatactcacaggttggtgagccagcctgtagaatgagagggcgggaggggtgagtctggcccagggccacggcgatggagtccccagctggcctgggagggtgggggccagggtgtcttaaaacaggcggaaggggcagctctcttaattcaagggagacagggaagtctccacccctcatctcagtgtcagagattccactgttagggattagcaggaaactcttcatgcagggtgatgagatgtttatgttgactgtgaagggaagtcaggcctcggcacgggggcagaaacagagcagtggcgtgaaggggagactgggtgtgtgtgtctgcatcatggaggaagccccctccctgtccaagtggggcagaggacctcccggggatattttggggctgcagttctcaaggctgtgggatttgactagtgtctgagacttgggagggaaggaaatgcttgatgtcacctggcgttttgtggcagagctagactcgaacctcggcttactgatacccaggggaggctctgtcctgggaaggaatgtggcctctccgtagctccttagtctcgcaagggggcctctccttgctcctcctgcagcttctgtgagccagcgactctcagctggccttccaaagctccagacctgagggacccagcctgtgcccatccccatacttgccatggctgacactgcattcctcctccccaccgttcctccatcagggaacagtctccagagcctccctcccaaacatctctcccctcacagggcccaaggccttcccctgcttggctctcagtgtcactcccctggctcaccacaatcacctccacagcctccagtcccacctccactgtggccaaaggtttctggaaaaggccaccgctagctgaaccttggcactcataacaccaccgtgggcctactgtgtgccaggctctactccagacattttatgcaaatgactcgaccctcacagcagtcccatggtggagattctagtaattgtcccattttacagctgaggaaacagaagcagtctggctccagcgcccaggttcttaatcactgggttctctgcactgagggataaagagccgtgagtttaacaggtggagacgagggctatgaatgaactccaggtagaagaagcagcagcaactaaggctgggaggggagagtcttgggcacattcaagaaactgcaggtcacaggggttggggcgggtgaggttggcagaggctcagttatgaaaacctcaggcaccagacttgagggctgggctttctcctgaaacagggtaggagcggcaggaggatttcaagtagggggatgctttctttgagaaaggccactctggatttttgtgggtgggtgggtgggggtggcgctggaggagggaagccagtgcagtggttccagcaacaagaggtagagcctggaacgaagttggcagcaggaactgtcctgaccctgggtaagacgggtctcagccacttgacctgccagagccccagcatctacctgtctcttcttaacttggcaccacataagcatctcccggcctcctcgccctggttttgccctggctcctggggagccatctgtgtccatggcagggggaacaagggtgcaggcccccttccttctgagtaaacatttgctgacaataggagaaagagaagatctgggagtcttggtgaaagaagggaaactggccaggcgccatggcccacacctgtaatcccagcactttaggaggccgaggtgggtggattgcttgaggtcaggaattcgagaccaatgtgggcgacatggcaaaaccccatctctactaaaaaatacaaaaaaaaaaaaaaaaagctaggtgaggtggcacacacccgtaatcccagctacttgggaggctgagacatgagaattgcttgaacccaggagacagaggttgcaggaagctgagatcacgccactgcattccagtctgggtgatggagtgagaatctgtctcaaaaagaaaaaaaaaaaagaaagaaaaaaagaagggaaattgaaggatctctacaccccccagcacccctaatctcagcctcttgggccttgaactgcctccgggaagccagggctggaaaagcagctcagggtctatgggagtagaggttgcaggccctgcagagtcccccagtcccttagaactccaggatctaaaataaagggaattattccaggcatgatggctcacacctgtaatcccagcactttgagagactaaggcgggcagatcacttgaggtcaggagttcgagaccagcctggccaacatggtgaaaccccatctctactaaaaatataaaaattagccaggtgtggtagcatgtgcctgtaatcccaactactcaggaggctgagacaggagaatcgcttgaacctgggaggcagaggttgcagtgagccgagatcaggccattgtactccagccttggcaacagaggtggactccgtctaaaaattaaaaattaaaaataaacaaataaaataaaataaagggaattatatggccccagattctcaggatgaggaggactcactcttcatctgccctttccaccctcccagacacacccccacacaggcacaagcccttctgcagcctctgctagagagccacttgcatactcccataaacagggagttcactaccaccctcctacagccacttccaggggctggacctggacagatattgcagcccatccccagtggcatgaccttgaccaaataacttacatgatctgtatcttagcctcttgattggagaactggggatggtgacttggcccccagaacacatcatatggataaagtgtagtaacttttttttttctgagacagagtcttgctgtgtcacccaggctggagtacagtggcatgattttagctcactgcaacctccacctcctgggcccaggtgatcctcccacctcagacttccgagtagctgggactaccaccacaccaggctaattttgtgtgtgtgtatttttagtagagacagggtttctccatgttggccaggttggtcttgaactcctggcctcaagtgatccacccgcctcagcctcccaaagtggtgggattacaggtgtgagccaccgcgcccggcctaagtgaataacttttagaaagcatgcttagtagtagggtttgaaaaatgttagctcctcctgccccttcacactgctagaaagtgcttttttgtgtttttctcaaacttgcccacccaggacttctgctatgatttccaacctgcctcctgggacgttaggcacgtctttgtcttccaggccgggatgtctgtcctctacctcccagctgcgagagagctcttaattggtcacctgggtaggggtaaggaggagagggaggggacaagctgctccctgggcactcactgtctgttggatggtcagtccccatgggtgtgttatatgctcagtggggacaaggttgggggggacaccatgatactgatgatatgcagagagaaactggataggcatggaagaagctgcatttaccacacaaaagaagatcccttggccccctatccctatctccaacccagatttccctggactcttcacgggggttacttcagggggattccctggtagcctcacaggctcaggggcaggactgctgttgatagatatagaaagtgccagaatagaggaagatgtaaaaagtgaaggaataactgaagaaggagacccttggaaatacttcctcaaataccagaacactaggcatgggcccagagcctcccagagagtgggaaaatgagctggagagaactctgtaatgcctgcagggggctgttggatgcccactggccagaaatgcctctgcaggcagtaggcattgggtgtgaagcagggccagccagcctcaaaggccccttcccatgaactcaaaattacctgctctggcacccccaggtcctcagattctagagctcagaatcctagatctaaaactctgatcctgaggttctagagaggggtaagaaaacttcaagtagctgggactacgggtgtgtgccagcatgcctggctaatttttaaaagaattttgtagagatggggtctcactttgttgcctaggctgggcttaaacacctggtttctgccttggcctcctgagtggctaggattataggcatgagccaccgtagccagcttgagctaactttttttaaaggtcagatagtgaatattttagacttcacaggccatatggtctttatcacaactactcaactctttgtaaacagatgggcaccgttgtgttccaacaaagctgaatttacaaaagcagactggatctggcctttggactatagtttgtctacccctgttctcaagtttgacaattgtgtgatcctgatatttattcattgatctcatgcattctcaaggttccagagcttggaggttccaggtccagatccaagtcagatggcaatgaaagccctggtcaggtggctgtgtcaggtcccctaggggcgctccggccacaaccctgatggccccacccctcccttccctgcagggcgatggcagcagacctgggcccctggaatgacaccatcaatggcacctgggatggggatgagctgggctacaggtgccgcttcaacgaggacttcaagtacgtgctgctgcctgtgtcctacggcgtggtgtgcgtgcttgggctgtgtctgaacgccgtggcgctctacatcttcttgtgccgcctcaagacctggaatgcgtccaccacatatatgttccacctggctgtgtctgatgcactgtatgcggcctccctgccgctgctggtctattactacgcccgcggcgaccactggcccttcagcacggtgctctgcaagctggtgcgcttcctcttctacaccaacctttactgcagcatcctcttcctcacctgcatcagcgtgcaccggtgtctgggcgtcttacgacctctgcgctccctgcgctggggccgggcccgctacgctcgccgggtggccggggccgtgtgggtgttggtgctggcctgccaggcccccgtgctctactttgtcaccaccagcgcgcgcgggggccgcgtaacctgccacgacacctcggcacccgagctcttcagccgcttcgtggcctacagctcagtcatgctgggcctgctcttcgcggtgccctttgccgtcatccttgtctgttacgtgctcatggctcggcgactgctaaagccagcctacgggacctcgggcggcctgcctagggccaagcgcaagtccgtgcgcaccatcgccgtggtgctggctgtcttcgccctctgcttcctgccattccacgtcacccgcaccctctactactccttccgttcgctggacctcagctgccacaccctcaacgccatcaacatggcctacaaggttacccggccgctggccagtgctaacagttgccttgaccccgtgctctacttcctggctgggcagaggctcgtacgctttgcccgagatgccaagccacccactggccccagccctgccaccccggctcgctgcaggctgggcctgcgcagatccgacagaactgacatgcagaggatagaagatgtgttgggcagcagtgaggactctaggcggacagagtccacgccggctggtagcgagaacactaaggacattcggctgtaggagcagaacacttcagcctgtgcaggtttatattgggaagctgtagaggaccaggacttgtgcagacgccacagtctccccagatatggaccatcagtgactcatgctggatgaccccatgctccgtcatttgacaggggctcaggatattcactctgtggtccagagtcaactgttcccataacccctagtcatcgtttgtgtgtataagttgggggaattaagtttcaagaaaggcaagagctcaaggtcaatgacacccctggcctgactcccatgcaagtagctggctgtactgccaaggtacctaggttggagtccagcctaatcaagtcaaatggagaaacaggcccagagaggaaggtggcttaccaagatcacataccagagtctggagctgagctacctggggtgggggccaagtcacaggttggccagaaaaccctggtaagtaatgagggctgagtttgcacagtggtctggaatggactgggtgccacggtggacttagctctgaggagtacccccagcccaagagatgaacatctggggactaatatcatagacccatctggaggctcccatgggctaggagccagtgtgaggctgtaacttatactaaaggttgtgttgcctgctgagctgtgccctattgtgtggtcgggggatgaggatatggcagggaagctttcaccagccacacaagggtcctttctccaatccgttcccttctgccacctgccttctcactagctgtctcaggagtagtctcatatcagggatcctctctccaggccccaggtcatcccccactgtaaagccagttggcttctgtgcctgactctgtgctgagcacagagaaaagtcaggtgcagtcccagtccttgagatttcccagtttaggtgatggccagtcatgtgctggtaaatgttaagccatttaactggagctccgatttaactgggaaccccttctttgtagaactgcccatttccatggtgcaaaaactcttatggccaaattcaaactataaacatgatgtcaacttccttgtaaaattcctgaaaatttaacaattggttcttgcaagcaggtacaagtcactctagcacaccactggataatgccgagtggctggggctgtgagccagggggtcagggaagggttcctggagtgggagactcctgagctgtagcttctgagaaaagcagctcaccggaagaacatccacacacaggatgcatcccaggcaaagacatggggcaagagggcagggtgtgcatgagccataagcaggctggacagctgactccaggctcaaggcagggttggggctgggtcacaaggaggccaagttagggctccctccttgccctgaccctgaggcttcctttgcactgggggtaaatatgaaagagattcactcctcctcctgtccatcgtctgccttctgggaaaatcccagaatggcagggtggtgctcaggctgggtcaggacttagtatgggggagatgggtctcacctatgataggttctgagtctagccaggaccactctgggctgacgtgtggcgctcagctggacagggccccgccctagcctttggaaagggacagggcaaagctgacaggcctcactcttgatctcaaggacagggactccctcctctccctctgggagagccctcgccctgtggcccactctgcctgccccctctgacctctccacccttcccactctgccttgtgaaaggcaggacatccccaaagcttgctgtatttggagcctgactccacagcgccctcatgtgacagagacccatcacagaccatgacccaaatgattactctgtactgtgccaggtgggtgacctgcccagaatagtgtgagctattcacctctcaccttctaggttctatacttctgttaatgtagccgatgtccttctgagttttttttttctttttgagacgaagtcttgttctgtcacccaggctggaagtgcagtgctgcggtcttggctcactgcaactctctgcctcccgggttcaagcaattctcctgcctcagtttcccaagtagctgggattacaggtatgcgccaccacacctggctaatttttgtatttttaatagagacagggtttcgccatgttggccaggctggtctcaaactcctgacctcaagtgatccacctgcctcagcctcccaaagtgctgggattacaggtatgagccaccgcacccggcccctcttgagctttcttaatgattgcctgttacaaaccacccttgagcctttcccacaggcccgagccactccacaaggacacaggaggggctcgttcaccatctaatcctgtggcaggcacaggtgggggtggatactggagaccctgggtgaaccaggggcacctctggaacccagttggactgcctggccccttggtatgcacgtcccaccttgctgctcagtgcccaggccacttgccttgtgggtgaagttcctgccctgatgcctcatgctattttcagcccaagtaagaccataattttccactcctggccccagaccattgtccagcagtgacgtgaggggatctgcctgccctcaaaatatctcctattaccctccagtattccctgcccccttcacacctccctaacctgacatcacttcctgggctgttgactcatgaaggccactgtgaaagggcacgtgagttgcccatccactgagcagaccccagggattatccagcccagctgcagactcaaggccagagatgggcagggctgagcccaaggtcattcagcaggtcagcgtggcgcctggatgtaagcaagtgccttggtgacgatcctgctgtcactcacactgcccagctcttcctgcccagggtgactgggatggagccatagacctgaggccagggacaggacagggatgggaggaaagggagggtagagagttgagtgtcagggagtaaatgtctgctgatgtgcctgcagcagctgttctcaatgaactgcatgacatcagggcagggtccctggcacacaggggtctctgccctgggtggcaggtgtcccagggtccaggagggatggaggaaccccagggtacattcccactttcaccccctgaggttagaagaggccctaagcaacatgttatccacacatggttgctccaggtcaagtcaccaaagctacctctctgtcacccttgtcatggcagatttgggctgctctgtttagaatcaggcacatgagggagggaagtcgtgtattgacccatgtcccacgcaccctctcatctatgttatatggtggatgcttcacagaagccctgggaagtagatgctatgatcctatttagcagatgaggaaacaggagaagggcgtgagaagtgaggacttgttccaggttatccaggctgtcagggtgagtcagagtgagtccaggttcacctgatggccagaatcatgccctttatagtgccccacgacactcacagccctgcagggcagaagggtctataagtggcccctcgcatgattcaagatgacagaggcagtgtagcaaggatgtgagaacacagatgctccacccagaccacctcagtgtcaatattgtccccactttcctggctggggtctcttgggcaagttacctaatcttgcagcacctcagttttcccatttctaaagtgtgctgctaccttccatgcagggcgttgaggggcttccctacgttattacgcacaaagtcctcctcacagtgcctggtgtgtggtcagcatttatatgcctggcaccaggccgggggctatggaggcaaatcagctgggccctgccctcacagagttgacatcacttagtacgtaaccacattgggatacatgttttgaaggagaggacagtgtgtctggccagtgagcaacagtgggccatacgtctccagggaacccccgtggggtgtgggaggagggaagcaggtctgtcctgggggaatgtgtgggaccacctctgccctgcttggcagtaggtggatttcaggaccatgggcctgtgctgtttacagaaccttgtccaggtgcccagctgtgggagggcagcatggagaggaggaagagggggcccctagtagcaagcttcagaaacttgccacttcaggctagagagctcgcaccctcccacggcagcagggtagcgatttctccctgactggggtgtccaccatggtgctctgcagccacctctcacttcattaagagtccacagatctaggagcagaggactggtctggagctgggcaagggcaggcagcaaatggggagtttttgctgtgtgacctgaggtcacttgcctgccttctctggactgcactgtagggcctggagacctgttcccctgttccaatttccccacctcagtgaaggcacaaccaacagctgctccccgggcatttccaagaccctccaggcccccagttctgaggactagggtggaggcagtgtttctccccagcatcaagtgaccagagaagtgaagtgaccccactgccgccacacagagccacacagtgcgatgtctggagctcctgcctcctgcaaggtggagggtggggcttggccaggagtgaccagactacagagtgaggggtgtgcttgtgggggtgaagggttggggtgagaactgagcccgagtcgaactcatcctcctctgccctgatgcactgtgcaacttgggggagtcactgtccctctctgggcctcgctttccccatcttcgataggacttggctctgcctggccactcctcctccaatgggggaattcctgggcttgcctctgtcttggctccagctcaggtgtcagtctcagccctgtcccagccaggaacaatgggccaggcagggccagtcaccccctgtccctgggggctccacccacggccctggactattttcagcccttgcagatggagtcagaagaggattttccactcccagtacaatgactgccctggaccattgtccagcagtgacgcgggggacctgcctgccccaaaatatctcctgcccctagtttccaagcctctttgccctgctcctcacctcctggccctgctccttacctccccaccctgatgtcatttcctggggctcttaactcctgaaggccattgtgaaacatcacgtgagactcctgggagacacaaccagttggaatgagttttccctcctggcagggaccccagggattgtttggctgcttagtgggactggtggcccagagagggctgtgccttacccagtcacacagcagtcagtgtgaagcttaggtgtaagcccagggctctttggctgctcccactgcctcagccaacttcattagctccagtctgtggctcctggactggagctacagtggtgagagctcaccactgagcttcctgggatgggcacctgggatagcagcccaagtggtgtgggtggagaggtgcagctcatgctctgaccttggagtgagcccagtgcaggggcctgaccttaaaccctttctccccactgagtcccatttttaccaaatgtggctgttaggaactgaatgtttgtgtcccccgccccacaaatccatatgtcaaaatcccaactgccaaggtgatggtattagaaggtggggcctttgggaagtaaccaggtcctaagggtgcagccctcatgaatgggtttagtgcccttacagaatggaccccagagagctcctcaccctctttccaccatgtgaggatataatgagaagttggcagtctgcaacctggaagaggtccctcaccagatcccaaccatgctggcaccccgatcttagacttccagtcttcagaatggtgagaaataaatgtctcttgtttctaatccacccagtcggtggcattttgttatagcagcccacgctgactgtgactgaactcagggtgacagagcagcagctctggggcaaaggggagggtgggggccacagggcagctgatgcaggagcagggctctggcacagttcagccatcaccaattctgggactgcaaattcagtttcttcatctggaaaattgaactggtaataccaatacctcttttcccggtttactagacagagacaatgcagtgaggcacaaacatgcaactgtttgattttcctcccacccatgctccctgctcagtgacgtgtgattttcctttcccatccataaactgcgcatttggcaaactccaaacttttgagtcacttttgggtaacaaagtcaggtttaagatttccatcgcctgcttaattgaatgctcacctgtcctcttcccccatgctgtgaggaccttcatcactcctcttctgggtccctctctcctctaggtgttggggcagggtggggaggaaagggaccaatgtgtctttcctggtgatgctacagccctctcttgctgaccttgcttcctgggccatcagtgccccctgcacagaactctccaaacatcagtccacacctttgtaaaaacagtctctccgctaagctatcccaaaatgacctgattagagtgtgcaacgtctttcctgctgggactctgactgataccctggtctccctgagtgattttcctgcacaccctgctggggatgtggaagcctgtccccctcccaccccacaccccacacttggctgagatctcacagtggcaaagatgtctttgaatccatggtgcccagggttcagcgtgtagagtgaggtggggtgtgtagagagctggggcaaggaaccctgagaagatgtcttaccccagttgtttccaggtttctttagaaagcgggctattttaccccatgtgtcctcagatttatgtcctggaaccaaattccaaatcagcagccacatgaaaagtcccctcctctctggcgtggaattaaactgttagacctgcctttgtgaccaaagcaattgtaaaacgtgggggaggaaattaaaagcctgccaccttagtccacacagtgtgtgctgtctctgtgtgtgtgcacgtgtgtttatgtgtgtgttgaatgatcacatgttccagggaggatggtgaggggcgaggggcagtcctggcaggtaccaagtggacactcagagacagaagggctgcaggtgggcagccaggccagaggggggcaacaaggggctgccaggagtcagactaaaccccggaagtggaagtggaatggcaggaagagatgggaatggagagagggtccagctgccagctctgtggcaccccctctccttccctccctcccactctaactccctttccctccccactccccatcaccctccccttttgctccctgtccccagaatccttgggagcaaagggaggcggacagggacagtccactctgtgctctgccctggctgtttagtctacgaagggccccaggttggttggtgctgctctgcttccccctggtggccaaagctggcagcagtggcaggaaacgggggctgggatccagaccttcgcctatggggtgataagaaaatgatccggctgcagccaggctgttgagtgtgagggtccggggggagagctgacaattgaaacagagaacacaatttgcatacagtgacttgccaacatgccctgacttgccaacaaggtgacggtgcctggcccaaaccatgatgtccgtctcctgcaccccagccaggggtagagatcattccctgctgagcaatcccttttcctgtggaagaccactcttcacagggtcctgcgcctccccagctcagactcagggacacagcacatctgcctagggcagccgtggaaggacatggaagggtgtaaccatgctctttccaaagaatgggcacccctaactctctcttctaccccactccggtaaccccatcctcaccagagacccctgccctccgcacgcccctagaagtccttgtcttctcacaggacagccttcaaaactgcactccatgccccggagaagtgtgactagcacagccggttctcccaggaactccatctgggaagaagttggggttcatccaccacacctgagatgcctgtaatttggatcccaccagcatgtccgtaggtaagatgtgtctgactcctgtggaagtcatgtggaaagggaggcctgagttcggggtccttgtgtggatccagaagcagaggtaagatgggaagcctcagccagcctcctaagccgtcctctcagatctctgcacacctctcacccacaagcttttactccacataaacccagatgccctcattcacagcacagaaagcacacaaatcctggagtcagagggacttgcgtttgaatcccagctctgccactcatcaatcaggcgaccttgggtacctgttttctcatcataaacaaagggggtaactggccgggcatggcagctcacacctgtaatcccagcactttgggagatcgaggcgggtggatcacttgagctcaggagtttgagaccagcctggccaacatggtgaaaccccatctctactaaaatacaaaaattagctgggaatggtggcacgtgcctgtaatcccagctacctgggaggctgaggcaggagaattccttgaacccgggaggcaggaggcggaggttgcagtgagccgagattgtgccactgtactgcagcctgggcaacagagcgagactccatctcaaattaaaaaaaaaaaagtggggggggatggtaaccatactcacatcatagtttatttatgctgtttctccttgctagaatgaaagttcccaaaaggcagggatctgttttggtcactgctttatcctccgtgcccatcagtgcccggcacattcctttcctttgcaaaggaaataaattaattattttacaagtttcacaatggccctttgaggcaggaaccttattatcacccactcattcattcatttattcaacaaatatttagtaagtacctactatgtgccaggtactgctctgtgtaatgtccgtaaatcatcagtgaattaaaaaaacaaagacagccaggtgtggtggctcacgcctgtaattctagcactttgggaggccgaggcaggcagattgcctgagctcaggagtttgagaccagcctgggcaacatggtgaaacctcgtctatactaaaatacaaaagaaattagctgggtgtggtggcaggcgcctgtagtcccagccactcgggaggctaaggcagaagaattgctcaaactcaggaggcagaggttgcactgagccgagatcatgccactgcactccagcctgggagacacagcgagactctgtctcttaaaaaaaaaaaaaaaaaaaaaaaagacaaagacgatgcccttgagctcacattctagtagggggagagagataataagcagtgaacataatagaatgtaaattatatggtgtgttaaaaggtgacaagctctgtaggaggcaaaaaacaacaggaagagggattgtgaggacatgaaggttgcaattttaaatagggtggttgggtgaaaaggaggcatttgggcaaatacttgaaggaggtgtgggagttagccaaatggaaaagagctcccagaaagagggaccagtaagtgcaaagccctagggcctgcagctggggtggagtgggcctggaggggaggaggggaggccagaggtcgggggagatctggtaggacattgaatgagaagggaagccatgcaaggtctgaggaggagacagaatctgacttacattttagaaggattggtctgtctgctgtgctgagaatagaccacagtggggcaaggtcagaagtaatgactacagggaggagctgttgcagaaatccaggtgagagctcaggctgaggactgggaccaggtggtagcaatggaggtggggagaagtggaccaatgccagatgtattctgaaggaagagtgaatgggatcctttatggattggatggaaggaggtgataaaagaagagggggtgcagaggatgcctacaatgttttgtagacagtgaccctgagatctagagaagatgtagtgtgaggccacacagctagtcagtgggtgggggtggaggagaggaggatgggaccagggtggcgggaaggtcctcaggtctaggacagcatctgggagaggatagggggaaggactctggcatagctggtcacaaaccagccccagggcaactgagcattgatttgatcaatggctttttcctcttcccttgaattcccctatgatggccttttaattgggtccatttgttccaaggccgtgggctgagctgagcagacgccaaatgatatgcctattattaaatagattaggaaatggccctacatcttgggcggccagaaaaaccagagtgactgaacagtgtccctgaggagtaacacgtgtattgtggaatactggatgtattgcagaatcccttccaggcaccttgcctttcctatgctgtccctgcgtctacagaatccttctgacttccttgctcacctgaaatgtgtctcctcctccaagattcacttcaaatcccctcctcggtgaaggagctgaaggagcgcgctaatcgccacccctccctcagcctgcctgagctactgccacagagaactcacacatctgcctggcaagagatccaacctgaattggagggtctgccctaggggacactgtccaagtcagggttgtccagggaacaggattacccaaagaacatttaaataacaatcccacttcagtaaaaaaaaaaaaaaagatgtctccatttcctgagctggagtcaaaaagggtggctgggaggcagcagagaagaggagtgagtgtaaattccgtgtgatggaaatgagtggcaatttaaattcgactggagaaaaagaaaactttcatgtcagtatcaaactcagaccatttttaaaaatcggtttcttccattttagacattatatactggtttccttttgtgaaatgaggctttagttctcttccttctctcattctcccattgcaatttttgattaaatattcagtgctt

SEQ ID NO: 26 - DNA, 2443 bp, Homo Sapiens
gagccccttgtggcagcagcactacctgcccagaaaaatgctggaggctgggcgtggccccaggcctggggacctgtttttcctgtttcccgcagagttccctgcagcccggtccaggtccaggcgtgtgcattcatgagtgaggaacccgtgcaggcgctgagcatcctgacctggagagcaggggctggtcagggcgatggcagcagacctgggcccctggaatgacaccatcaatggcacctgggatggggatgagctgggctacaggtgccgcttcaacgaggacttcaagtacgtgctgctgcctgtgtcctacggcgtggtgtgcgtgcttgggctgtgtctgaacgccgtggcgctctacatcttcttgtgccgcctcaagacctggaatgcgtccaccacatatatgttccacctggctgtgtctgatgcactgtatgcggcctccctgccgctgctggtctattactacgcccgcggcgaccactggcccttcagcacggtgctctgcaagctggtgcgcttcctcttctacaccaacctttactgcagcatcctcttcctcacctgcatcagcgtgcaccggtgtctgggcgtcttacgacctctgcgctccctgcgctggggccgggcccgctacgctcgccgggtggccggggccgtgtgggtgttggtgctggcctgccaggcccccgtgctctactttgtcaccaccagcgcgcgcgggggccgcgtaacctgccacgacacctcggcacccgagctcttcagccgcttcgtggcctacagctcagtcatgctgggcctgctcttcgcggtgccctttgccgtcatccttgtctgttacgtgctcatggctcggcgactgctaaagccagcctacgggacctcgggcggcctgcctagggccaagcgcaagtccgtgcgcaccatcgccgtggtgctggctgtcttcgccctctgcttcctgccattccacgtcacccgcaccctctactactccttccgttcgctggacctcagctgccacaccctcaacgccatcaacatggcctacaaggttacccggccgctggccagtgctaacagttgccttgaccccgtgctctacttcctggctgggcagaggctcgtacgctttgcccgagatgccaagccacccactggccccagccctgccaccccggctcgctgcaggctgggcctgcgcagatccgacagaactgacatgcagaggatagaagatgtgttgggcagcagtgaggactctaggcggacagagtccacgccggctggtagcgagaacactaaggacattcggctgtaggagcagaacacttcagcctgtgcaggtttatattgggaagctgtagaggaccaggacttgtgcagacgccacagtctccccagatatggaccatcagtgactcatgctggatgaccccatgctccgtcatttgacaggggctcaggatattcactctgtggtccagagtcaactgttcccataacccctagtcatcgtttgtgtgtataagttgggggaattaagtttcaagaaaggcaagagctcaaggtcaatgacacccctggcctgactcccatgcaagtagctggctgtactgccaaggtacctaggttggagtccagcctaatcaagtcaaatggagaaacaggcccagagaggaaggtggcttaccaagatcacataccagagtctggagctgagctacctggggtgggggccaagtcacaggttggccagaaaaccctggtaagtaatgagggctgagtttgcacagtggtctggaatggactgggtgccacggtggacttagctctgaggagtacccccagcccaagagatgaacatctggggactaatatcatagacccatctggaggctcccatgggctaggagccagtgtgaggctgtaacttatactaaaggttgtgttgcctgctgagctgtgccctattgtgtggtcgggggatgaggatatggcagggaagctttcaccagccacacaagggtcctttctccaatccgttcccttctgccacctgccttctcactagctgtctcaggagtagtctcatatcagggatcctctctccaggccccaggtcatcccccactgtaaagccagttggcttctgtgcctgactctgtgctgagcacagagaaaagtcaggtgcagtcccagtccttgagatttcccagtttaggtgatggccagtcatgtgctggtaaatgttaagccatttaactggagctccgatttaactgggaaccccttctttgtagaactgcccatttccatggtgcaaaaactcttatggccaaattcaaactataaacatgatgtcaacttccttgtaaaattcctgaaaatttaacaattggttcttgcaagcaggtacaagtcactctag

SEQ ID NO: 27 - protein, 377 aa, Homo Sapiens
MAADLGPWNDTINGTWDGDELGYRCRFNEDFKYVLLPVSYGVVCVLGLCLNAVALYIFLCRLKTWNASTTYMFHLAVSDALYAASLPLLVYYYARGDHWPFSTVLCKLVRFLFYTNLYCSILFLTCISVHRCLGVLRPLRSLRWGRARYARRVAGAVWVLVLACQAPVLYFVTTSARGGRVTCHDTSAPELFSRFVAYSSVMLGLLFAVPFAVILVCYVLMARRLLKPAYGTSGGLPRAKRKSVRTIAVVLAVFALCFLPFHVTRTLYYSFRSLDLSCHTLNAINMAYKVTRPLASANSCLDPVLYFLAGQRLVRFARDAKPPTGPSPATPARCRLGLRRSDRTDMQRIEDVLGSSEDSRRTESTPAGSENTKDIRL

SEQ ID NO: 28 - DNA, 2553 bp, Homo Sapiens
ggcaccccgagaggagaagcgcagcgcagtggcgagaggtggggtggggcgtctggagggaacaaggcgctgggagaggcccggggaagcggcgggccagactggcgcaggagccccttgtggcagcagcactacctgcccagaaaaatgctggaggctgggcgtggccccaggcctggggacctgtttttcctgtttcccgcagagttccctgcagcccggtccaggtccaggcgtgtgcattcatgagtgaggaacccgtgcaggcgctgagcatcctgacctggagagcaggggctggtcagggcgatggcagcagacctgggcccctggaatgacaccatcaatggcacctgggatggggatgagctgggctacaggtgccgcttcaacgaggacttcaagtacgtgctgctgcctgtgtcctacggcgtggtgtgcgtgcttgggctgtgtctgaacgccgtggcgctctacatcttcttgtgccgcctcaagacctggaatgcgtccaccacatatatgttccacctggctgtgtctgatgcactgtatgcggcctccctgccgctgctggtctattactacgcccgcggcgaccactggcccttcagcacggtgctctgcaagctggtgcgcttcctcttctacaccaacctttactgcagcatcctcttcctcacctgcatcagcgtgcaccggtgtctgggcgtcttacgacctctgcgctccctgcgctggggccgggcccgctacgctcgccgggtggccggggccgtgtgggtgttggtgctggcctgccaggcccccgtgctctactttgtcaccaccagcgcgcgcgggggccgcgtaacctgccacgacacctcggcacccgagctcttcagccgcttcgtggcctacagctcagtcatgctgggcctgctcttcgcggtgccctttgccgtcatccttgtctgttacgtgctcatggctcggcgactgctaaagccagcctacgggacctcgggcggcctgcctagggccaagcgcaagtccgtgcgcaccatcgccgtggtgctggctgtcttcgccctctgcttcctgccattccacgtcacccgcaccctctactactccttccgttcgctggacctcagctgccacaccctcaacgccatcaacatggcctacaaggttacccggccgctggccagtgctaacagttgccttgaccccgtgctctacttcctggctgggcagaggctcgtacgctttgcccgagatgccaagccacccactggccccagccctgccaccccggctcgctgcaggctgggcctgcgcagatccgacagaactgacatgcagaggatagaagatgtgttgggcagcagtgaggactctaggcggacagagtccacgccggctggtagcgagaacactaaggacattcggctgtaggagcagaacacttcagcctgtgcaggtttatattgggaagctgtagaggaccaggacttgtgcagacgccacagtctccccagatatggaccatcagtgactcatgctggatgaccccatgctccgtcatttgacaggggctcaggatattcactctgtggtccagagtcaactgttcccataacccctagtcatcgtttgtgtgtataagttgggggaattaagtttcaagaaaggcaagagctcaaggtcaatgacacccctggcctgactcccatgcaagtagctggctgtactgccaaggtacctaggttggagtccagcctaatcaagtcaaatggagaaacaggcccagagaggaaggtggcttaccaagatcacataccagagtctggagctgagctacctggggtgggggccaagtcacaggttggccagaaaaccctggtaagtaatgagggctgagtttgcacagtggtctggaatggactgggtgccacggtggacttagctctgaggagtacccccagcccaagagatgaacatctggggactaatatcatagacccatctggaggctcccatgggctaggagccagtgtgaggctgtaacttatactaaaggttgtgttgcctgctgagctgtgccctattgtgtggtcgggggatgaggatatggcagggaagctttcaccagccacacaagggtcctttctccaatccgttcccttctgccacctgccttctcactagctgtctcaggagtagtctcatatcagggatcctctctccaggccccaggtcatcccccactgtaaagccagttggcttctgtgcctgactctgtgctgagcacagagaaaagtcaggtgcagtcccagtccttgagatttcccagtttaggtgatggccagtcatgtgctggtaaatgttaagccatttaactggagctccgatttaactgggaaccccttctttgtagaactgcccatttccatggtgcaaaaactcttatggccaaattcaaactataaacatgatgtcaacttccttgtaaaattcctgaaaatttaacaattggttcttgcaagcaggtacaagtcactctag

SEQ ID NO: 29 - protein, 377 aa, Homo Sapiens; identical to SEQ ID NO: 27

SEQ ID NO: 30 - DNA, 2643 bp, Homo Sapiens
caaggcgctgggagaggcccggggaagcggcgggccagactggcgcaggtgcggactgggcgcggggcaggggagggcgctgtggagcggctgtcgccccggggcacagttgcgagccggcgtgtagcgcataactggacggcttgaacgcgcctgtgggtccgtggttgaactttgtctccacgggagcgtcggtctcggagccccttgtggcagcagcactacctgcccagaaaaatgctggaggctgggcgtggccccaggcctggggacctgtttttcctgtttcccgcagagttccctgcagcccggtccaggtccaggcgtgtgcattcatgagtgaggaacccgtgcaggcgctgagcatcctgacctggagagcaggggctggtcagggcgatggcagcagacctgggcccctggaatgacaccatcaatggcacctgggatggggatgagctgggctacaggtgccgcttcaacgaggacttcaagtacgtgctgctgcctgtgtcctacggcgtggtgtgcgtgcttgggctgtgtctgaacgccgtggcgctctacatcttcttgtgccgcctcaagacctggaatgcgtccaccacatatatgttccacctggctgtgtctgatgcactgtatgcggcctccctgccgctgctggtctattactacgcccgcggcgaccactggcccttcagcacggtgctctgcaagctggtgcgcttcctcttctacaccaacctttactgcagcatcctcttcctcacctgcatcagcgtgcaccggtgtctgggcgtcttacgacctctgcgctccctgcgctggggccgggcccgctacgctcgccgggtggccggggccgtgtgggtgttggtgctggcctgccaggcccccgtgctctactttgtcaccaccagcgcgcgcgggggccgcgtaacctgccacgacacctcggcacccgagctcttcagccgcttcgtggcctacagctcagtcatgctgggcctgctcttcgcggtgccctttgccgtcatccttgtctgttacgtgctcatggctcggcgactgctaaagccagcctacgggacctcgggcggcctgcctagggccaagcgcaagtccgtgcgcaccatcgccgtggtgctggctgtcttcgccctctgcttcctgccattccacgtcacccgcaccctctactactccttccgttcgctggacctcagctgccacaccctcaacgccatcaacatggcctacaaggttacccggccgctggccagtgctaacagttgccttgaccccgtgctctacttcctggctgggcagaggctcgtacgctttgcccgagatgccaagccacccactggccccagccctgccaccccggctcgctgcaggctgggcctgcgcagatccgacagaactgacatgcagaggatagaagatgtgttgggcagcagtgaggactctaggcggacagagtccacgccggctggtagcgagaacactaaggacattcggctgtaggagcagaacacttcagcctgtgcaggtttatattgggaagctgtagaggaccaggacttgtgcagacgccacagtctccccagatatggaccatcagtgactcatgctggatgaccccatgctccgtcatttgacaggggctcaggatattcactctgtggtccagagtcaactgttcccataacccctagtcatcgtttgtgtgtataagttgggggaattaagtttcaagaaaggcaagagctcaaggtcaatgacacccctggcctgactcccatgcaagtagctggctgtactgccaaggtacctaggttggagtccagcctaatcaagtcaaatggagaaacaggcccagagaggaaggtggcttaccaagatcacataccagagtctggagctgagctacctggggtgggggccaagtcacaggttggccagaaaaccctggtaagtaatgagggctgagtttgcacagtggtctggaatggactgggtgccacggtggacttagctctgaggagtacccccagcccaagagatgaacatctggggactaatatcatagacccatctggaggctcccatgggctaggagccagtgtgaggctgtaacttatactaaaggttgtgttgcctgctgagctgtgccctattgtgtggtcgggggatgaggatatggcagggaagctttcaccagccacacaagggtcctttctccaatccgttcccttctgccacctgccttctcactagctgtctcaggagtagtctcatatcagggatcctctctccaggccccaggtcatcccccactgtaaagccagttggcttctgtgcctgactctgtgctgagcacagagaaaagtcaggtgcagtcccagtccttgagatttcccagtttaggtgatggccagtcatgtgctggtaaatgttaagccatttaactggagctccgatttaactgggaaccccttctttgtagaactgcccatttccatggtgcaaaaactcttatggccaaattcaaactataaacatgatgtcaacttccttgtaaaattcctgaaaatttaacaattggttcttgcaagcaggtacaagtcactctag

SEQ ID NO: 31 - protein, 377 aa, Homo Sapiens; identical to SEQ ID NO: 27

SEQ ID NO: 32 - DNA, 2497 bp, Homo Sapiens
cgggagcggcggcgacggcaccccgagaggagaagcgcagcgcagtggcgagaggagccccttgtggcagcagcactacctgcccagaaaaatgctggaggctgggcgtggccccaggcctggggacctgtttttcctgtttcccgcagagttccctgcagcccggtccaggtccaggcgtgtgcattcatgagtgaggaacccgtgcaggcgctgagcatcctgacctggagagcaggggctggtcagggcgatggcagcagacctgggcccctggaatgacaccatcaatggcacctgggatggggatgagctgggctacaggtgccgcttcaacgaggacttcaagtacgtgctgctgcctgtgtcctacggcgtggtgtgcgtgcttgggctgtgtctgaacgccgtggcgctctacatcttcttgtgccgcctcaagacctggaatgcgtccaccacatatatgttccacctggctgtgtctgatgcactgtatgcggcctccctgccgctgctggtctattactacgcccgcggcgaccactggcccttcagcacggtgctctgcaagctggtgcgcttcctcttctacaccaacctttactgcagcatcctcttcctcacctgcatcagcgtgcaccggtgtctgggcgtcttacgacctctgcgctccctgcgctggggccgggcccgctacgctcgccgggtggccggggccgtgtgggtgttggtgctggcctgccaggcccccgtgctctactttgtcaccaccagcgcgcgcgggggccgcgtaacctgccacgacacctcggcacccgagctcttcagccgcttcgtggcctacagctcagtcatgctgggcctgctcttcgcggtgccctttgccgtcatccttgtctgttacgtgctcatggctcggcgactgctaaagccagcctacgggacctcgggcggcctgcctagggccaagcgcaagtccgtgcgcaccatcgccgtggtgctggctgtcttcgccctctgcttcctgccattccacgtcacccgcaccctctactactccttccgttcgctggacctcagctgccacaccctcaacgccatcaacatggcctacaaggttacccggccgctggccagtgctaacagttgccttgaccccgtgctctacttcctggctgggcagaggctcgtacgctttgcccgagatgccaagccacccactggccccagccctgccaccccggctcgctgcaggctgggcctgcgcagatccgacagaactgacatgcagaggatagaagatgtgttgggcagcagtgaggactctaggcggacagagtccacgccggctggtagcgagaacactaaggacattcggctgtaggagcagaacacttcagcctgtgcaggtttatattgggaagctgtagaggaccaggacttgtgcagacgccacagtctccccagatatggaccatcagtgactcatgctggatgaccccatgctccgtcatttgacaggggctcaggatattcactctgtggtccagagtcaactgttcccataacccctagtcatcgtttgtgtgtataagttgggggaattaagtttcaagaaaggcaagagctcaaggtcaatgacacccctggcctgactcccatgcaagtagctggctgtactgccaaggtacctaggttggagtccagcctaatcaagtcaaatggagaaacaggcccagagaggaaggtggcttaccaagatcacataccagagtctggagctgagctacctggggtgggggccaagtcacaggttggccagaaaaccctggtaagtaatgagggctgagtttgcacagtggtctggaatggactgggtgccacggtggacttagctctgaggagtacccccagcccaagagatgaacatctggggactaatatcatagacccatctggaggctcccatgggctaggagccagtgtgaggctgtaacttatactaaaggttgtgttgcctgctgagctgtgccctattgtgtggtcgggggatgaggatatggcagggaagctttcaccagccacacaagggtcctttctccaatccgttcccttctgccacctgccttctcactagctgtctcaggagtagtctcatatcagggatcctctctccaggccccaggtcatcccccactgtaaagccagttggcttctgtgcctgactctgtgctgagcacagagaaaagtcaggtgcagtcccagtccttgagatttcccagtttaggtgatggccagtcatgtgctggtaaatgttaagccatttaactggagctccgatttaactgggaaccccttctttgtagaactgcccatttccatggtgcaaaaactcttatggccaaattcaaactataaacatgatgtcaacttccttgtaaaattcctgaaaatttaacaattggttcttgcaagcaggtacaagtcactctag

SEQ ID NO: 33 - protein, 377 aa, Homo Sapiens; identical to SEQ ID NO: 27

SEQ ID NO: 34 - DNA, 2363 bp, Mus Musculus
gagaagtcaaacttgggataccgggagagggagagatgaaaacaacttctcagtttctctgcggctgacagaagctcctgagagaggctttcagaacttgattccagctggcccgtgaaagctgtgtctggacgggagagcctcagaggaataaacagtgccttctctggcttctccgggtcaagaccgttctgttcagaaggaagtggtgtttctctgaccccactgttcccacagccccctggatggtagatcatggggctgcacccttccccacccttgggaactcagtcaaacggttatctttatctcgccagcttgtcctcgtgcttgaccagcgcagtttcacttttgcaaacatctgtttatatcccttgagagaaaaatatcaagcaacctgcctcaaacgacgctgttttggccggtgagcaaggtaagaaactgttttaaacatctgggaagtaggcgggcaccaacttctgaagcttaagccagtcgctggttgtttttaactctttgttttcttagatcctatctcccacgtagagtctcctttcaaccaaagaacttaagtggctttaacgtccctgactctttctgtaccaggcagtttctgtcacattagcagcgcggtccctgggtgcttaatgaggagatttgagtacggcagcccccgctgggggtggggggtgggggcatagttactttcagtctttggctgtaggatggagggaaatcatgacctctggtttccccacaggacagcctccgatggataactacacagtggccccggacgatgaatatgatgtcctaatcttagacgactacctggacaacagtgggccggaccaagttccggcccccgagttcctctccccccagcaggtgctgcagttctgctgcgcggtgtttgcggtgggtctcttggacaacgtgctggcggtgtttatcttggtgaaatacaaaggactcaagaatctggggaacatctacttcctaaacctggcactttcaaacctgtgtttcctgcttcccctgccgttctgggcccatactgcagcacacggggaaagccctggcaacgggacctgtaaagttcttgtcggactccactcctcgggcttatacagcgaggtgttttccaacatcctcctccttgtgcaaggatacagggtgttttcccaagggcgactggcctccatcttcacgacagtgtcttgtggtattgttgcgtgcatcctggcatgggccatggctactgcgctctctttgcccgagtctgtgttttatgagcctcggatggaaagacagaaacacaagtgtgcctttggcaaacctcacttcttgccaatcgaagcgccgctctggaagtacgttctgacgtcaaaaatgatcatcttggtacttgcttttcctctgctggtttttataatctgctgcaggcaactgaggagaaggcagagcttcagggagagacagtacgacctccacaagccggctcttgtcataacgggcgtgttccttttgatgtgggcgccttacaacactgtgcttttcctgtctgctttccaggaacacttgtccctgcaggatgagaagagcagctaccacctggacgcaagtgttcaggtcacacagctggtagcgaccacccactgctgcgtcaacccgctgctctatttgcttcttgaccggaaggcctttatgagataccttcgcagcctgttcccacggtgcaatgatatcccctatcaaagtagtggaggctatcagcaagcgcctccaagggaaggtcatggcaggcccattgaactgtacagcaatttgcatcaaaggcaggatataatataatataaacactcaaccttgtctcttcacattgttttatgccatttttatatgtttgtataaaaatagaatataagaggaaagggggctggttaatgaacatttactactaagcgttgaatttgtctctggcacacggttaagttatttataaaggtgaattccactcttcctctttagcgtttgtccgcagtgtgggcgtgggcggtgtgcattccataaactgaagctcggtagttgtccaaagttacataactataaagtggcaaaactgatgtgtaaactcagagatcactggccccagagtctgtgagttatccaagcgtgccagcctttcagtaactgtcagctagcagtggtggcatgtctgtcatcccagcactctaggaggcggaggcaggaggcatctcacaaatgcaagtataacctgacttcccccaacctcaattcttttttttttgttattgttgttcatcaaaatacatgcaataaatatatatatttttaaagca

SEQ ID NO: 35 - DNA, 2036 bp, Mus Musculus
gagaagtcaaacttgggataccgggagagggagagatgaaaacaacttctcagtttctctgcggctgacagaagctcctgagagaggctttcagaacttgattccagctggcccgtgaaagctgtgtctggacgggagagcctcagaggaataaacagtgccttctctggcttctccgggtcaagaccgttctgttcagaaggaagtggtgtttctctgaccccactgttcccacagccccctggatggtagatcatggggctgcacccttccccacccttgggaactcagtcaaacggttatctttatctcgccagcttgtcctcgtgcttgaccagcgcagtttcacttttgcaaacatctgtttatatcccttgagagaaaaatatcaagcaacctgcctcaaacgacgctgttttggccggtgagcaaggacagcctccgatggataactacacagtggccccggacgatgaatatgatgtcctaatcttagacgactacctggacaacagtgggccggaccaagttccggcccccgagttcctctccccccagcaggtgctgcagttctgctgcgcggtgtttgcggtgggtctcttggacaacgtgctggcggtgtttatcttggtgaaatacaaaggactcaagaatctggggaacatctacttcctaaacctggcactttcaaacctgtgtttcctgcttcccctgccgttctgggcccatactgcagcacacggggaaagccctggcaacgggacctgtaaagttcttgtcggactccactcctcgggcttatacagcgaggtgttttccaacatcctcctccttgtgcaaggatacagggtgttttcccaagggcgactggcctccatcttcacgacagtgtcttgtggtattgttgcgtgcatcctggcatgggccatggctactgcgctctctttgcccgagtctgtgttttatgagcctcggatggaaagacagaaacacaagtgtgcctttggcaaacctcacttcttgccaatcgaagcgccgctctggaagtacgttctgacgtcaaaaatgatcatcttggtacttgcttttcctctgctggtttttataatctgctgcaggcaactgaggagaaggcagagcttcagggagagacagtacgacctccacaagccggctcttgtcataacgggcgtgttccttttgatgtgggcgccttacaacactgtgcttttcctgtctgctttccaggaacacttgtccctgcaggatgagaagagcagctaccacctggacgcaagtgttcaggtcacacagctggtagcgaccacccactgctgcgtcaacccgctgctctatttgcttcttgaccggaaggcctttatgagataccttcgcagcctgttcccacggtgcaatgatatcccctatcaaagtagtggaggctatcagcaagcgcctccaagggaaggtcatggcaggcccattgaactgtacagcaatttgcatcaaaggcaggatataatataatataaacactcaaccttgtctcttcacattgttttatgccatttttatatgtttgtataaaaatagaatataagaggaaagggggctggttaatgaacatttactactaagcgttgaatttgtctctggcacacggttaagttatttataaaggtgaattccactcttcctctttagcgtttgtccgcagtgtgggcgtgggcggtgtgcattccataaactgaagctcggtagttgtccaaagttacataactataaagtggcaaaactgatgtgtaaactcagagatcactggccccagagtctgtgagttatccaagcgtgccagcctttcagtaactgtcagctagcagtggtggcatgtctgtcatcccagcactctaggaggcggaggcaggaggcatctcacaaatgcaagtataacctgacttcccccaacctcaattcttttttttttgttattgttgttcatcaaaatacatgcaataaatatatatatttttaaagca

SEQ ID NO: 36 - protein, 360 aa, Mus Musculus
MDNYTVAPDDEYDVLILDDYLDNSGPDQVPAPEFLSPQQVLQFCCAVFAVGLLDNVLAVFILVKYKGLKNLGNIYFLNLALSNLCFLLPLPFWAHTAAHGESPGNGTCKVLVGLHSSGLYSEVFSNILLLVQGYRVFSQGRLASIFTTVSCGIVACILAWAMATALSLPESVFYEPRMERQKHKCAFGKPHFLPIEAPLWKYVLTSKMIILVLAFPLLVFIICCRQLRRRQSFRERQYDLHKPALVITGVFLLMWAPYNTVLFLSAFQEHLSLQDEKSSYHLDASVQVTQLVATTHCCVNPLLYLLLDRKAFMRYLRSLFPRCNDIPYQSSGGYQQAPPREGHGRPIELYSNLHQRQDII

SEQ ID NO: 37 - DNA, 2341 bp, Homo Sapiens
aaaggtcacagggaaatcaaaggcggggtacagggccagagggaggaggaaacaacttcccggttgctttcagacgcttcagagatcctctggaggcctgggggagcttttgagtactttatttcagttggtccctgagctcggtgagtggggcgggtagagccaccaggggaatcaacagtggtttctcgtgcccctcagggtcaggagcagtctgatcaaaaggagggcatccactgtccggggccattcccacagctcccggatgctgggtctggaggctgcgcccttcccctgcaggagctcagcccagtggtaagtcatctgtgtgtcatctatgtatttaaccccttatggccatgttgatgctgagcatggtttcacttttgcaaacatttatttatacccttcgagagaaaaacgtctcagctgtcacaggaagctgcttcggggggtgagcaaactttttaaaatgcagaaattatgatctacacccgtttcttaaaagtaagccatcgtacttggttctctttaattatatattttcttacatattgtgttcatgtaggcaagtcctgtttctgctaaaagaaggtaagttctaccaaggcggtgtcatgccagctttatttcccgtggcacctggcacactgctaagcacttacatgcttaacaactagattgggaatggtgctgctctggggaagtgggcacacgttaaagaaatgtttatttcagtcttctgaaatagggaattactctggctaaaatgtagctccagaaagggaaagtggggctgtatgaatccaggtccagtttgttgtttcctccaggataaggcagctgtcggaggggaaaatcatctcccatttctccacagggcagtctgaagatggccaattacacgctggcaccagaggatgaatatgatgtcctcatagaaggtgaactggagagcgatgaggcagagcaatgtgacaagtatgacgcccaggcactctcagcccagctggtgccatcactctgctctgctgtgtttgtgatcggtgtcctggacaatctcctggttgtgcttatcctggtaaaatataaaggactcaaacgcgtggaaaatatctatcttctaaacttggcagtttctaacttgtgtttcttgcttaccctgcccttctgggctcatgctgggggcgatcccatgtgtaaaattctcattggactgtacttcgtgggcctgtacagtgagacatttttcaattgccttctgactgtgcaaaggtacctagtgtttttgcacaagggaaactttttctcagccaggaggagggtgccctgtggcatcattacaagtgtcctggcatgggtaacagccattctggccactttgcctgaattcgtggtttataaacctcagatggaagaccagaaatacaagtgtgcatttagcagaactcccttcctgccagctgatgagacattctggaagcattttctgactttaaaaatgaacatttcggttcttgtcctccccctatttatttttacatttctctatgtgcaaatgagaaaaacactaaggttcagggagcagaggtatagccttttcaagcttgtttttgccataatggtagtcttccttctgatgtgggcgccctacaatattgcatttttcctgtccactttcaaagaacacttctccctgagtgactgcaagagcagctacaatctggacaaaagtgttcacatcactaaactcatcgccaccacccactgctgcatcaaccctctcctgtatgcgtttcttgatgggacatttagcaaatacctctgccgctgtttccatctgcgtagtaacaccccacttcaacccagggggcagtctgcacaaggcacatcgagggaagaacctgaccattccaccgaagtgtaaactagcatccaccaaatgcaagaagaataaacatggattttcatctttctgcattatttcatgtaaattttctacacatttgtatacaaaatcggatacaggaagaaaagggagaggtgagctaacatttgctaagcactgaatttgtctcaggcaccgtgcaaggctctttacaaacgtgagctccttcgcctcctaccacttgtccatagtgtggataggactagtctcatttctctgagaagaaaactaaggcgcggaaatttgtctaagatcacataactaggaagtggcagaactgattctccagccctggtagcatttgctcagagcctacgcttggtccagaacatcaaactccaaaccctggggacaaacgacatgaaataaatgtattttaaaacatctatttaa

SEQ ID NO: 38 - DNA, 1646 bp, Homo Sapiens
tgctgctctggggaagtgggcacacgttaaagaaatgtttatttcagtcttctgaaatagggaattactctggctaaaatgtagctccagaaagggaaagtggggctgtatgaatccaggtccagtttgttgtttcctccaggataaggcagctgtcggaggggaaaatcatctcccatttctccacagggcagtctgaagatggccaattacacgctggcaccagaggatgaatatgatgtcctcatagaaggtgaactggagagcgatgaggcagagcaatgtgacaagtatgacgcccaggcactctcagcccagctggtgccatcactctgctctgctgtgtttgtgatcggtgtcctggacaatctcctggttgtgcttatcctggtaaaatataaaggactcaaacgcgtggaaaatatctatcttctaaacttggcagtttctaacttgtgtttcttgcttaccctgcccttctgggctcatgctgggggcgatcccatgtgtaaaattctcattggactgtacttcgtgggcctgtacagtgagacatttttcaattgccttctgactgtgcaaaggtacctagtgtttttgcacaagggaaactttttctcagccaggaggagggtgccctgtggcatcattacaagtgtcctggcatgggtaacagccattctggccactttgcctgaattcgtggtttataaacctcagatggaagaccagaaatacaagtgtgcatttagcagaactcccttcctgccagctgatgagacattctggaagcattttctgactttaaaaatgaacatttcggttcttgtcctccccctatttatttttacatttctctatgtgcaaatgagaaaaacactaaggttcagggagcagaggtatagccttttcaagcttgtttttgccataatggtagtcttccttctgatgtgggcgccctacaatattgcatttttcctgtccactttcaaagaacacttctccctgagtgactgcaagagcagctacaatctggacaaaagtgttcacatcactaaactcatcgccaccacccactgctgcatcaaccctctcctgtatgcgtttcttgatgggacatttagcaaatacctctgccgctgtttccatctgcgtagtaacaccccacttcaacccagggggcagtctgcacaaggcacatcgagggaagaacctgaccattccaccgaagtgtaaactagcatccaccaaatgcaagaagaataaacatggattttcatctttctgcattatttcatgtaaattttctacacatttgtatacaaaatcggatacaggaagaaaagggagaggtgagctaacatttgctaagcactgaatttgtctcaggcaccgtgcaaggctctttacaaacgtgagctccttcgcctcctaccacttgtccatagtgtggataggactagtctcatttctctgagaagaaaactaaggcgcggaaatttgtctaagatcacataactaggaagtggcagaactgattctccagccctggtagcatttgctcagagcctacgcttggtccagaacatcaaactccaaaccctggggacaaacgacatgaaataaatgtattttaaaacatctat

SEQ ID NO: 39 - protein, 344 aa, Homo Sapiens
MANYTLAPEDEYDVLIEGELESDEAEQCDKYDAQALSAQLVPSLCSAVFVIGVLDNLLVVLILVKYKGLKRVENIYLLNLAVSNLCFLLTLPFWAHAGGDPMCKILIGLYFVGLYSETFFNCLLTVQRYLVFLHKGNFFSARRRVPCGIITSVLAWVTAILATLPEFVVYKPQMEDQKYKCAFSRTPFLPADETFWKHFLTLKMNISVLVLPLFIFTFLYVQMRKTLRFREQRYSLFKLVFAIMVVFLLMWAPYNIAFFLSTFKEHFSLSDCKSSYNLDKSVHITKLIATTHCCINPLLYAFLDGTFSKYLCRCFHLRSNTPLQPRGQSAQGTSREEPDHSTEV

SEQ ID NO: 40 - DNA, 1776 bp, Homo Sapiens
aaaggtcacagggaaatcaaaggcggggtacagggccagagggaggaggaaacaacttcccggttgctttcagacgcttcagagatcctctggaggcctgggggagcttttgagtactttatttcagttggtccctgagctcggtgagtggggcgggtagagccaccaggggaatcaacagtggtttctcgtgcccctcagggtcaggagcagtctgatcaaaaggagggcatccactgtccggggccattcccacagctcccggatgctgggtctggaggctgcgcccttcccctgcaggagctcagcccagtgggcagtctgaagatggccaattacacgctggcaccagaggatgaatatgatgtcctcatagaaggtgaactggagagcgatgaggcagagcaatgtgacaagtatgacgcccaggcactctcagcccagctggtgccatcactctgctctgctgtgtttgtgatcggtgtcctggacaatctcctggttgtgcttatcctggtaaaatataaaggactcaaacgcgtggaaaatatctatcttctaaacttggcagtttctaacttgtgtttcttgcttaccctgcccttctgggctcatgctgggggcgatcccatgtgtaaaattctcattggactgtacttcgtgggcctgtacagtgagacatttttcaattgccttctgactgtgcaaaggtacctagtgtttttgcacaagggaaactttttctcagccaggaggagggtgccctgtggcatcattacaagtgtcctggcatgggtaacagccattctggccactttgcctgaattcgtggtttataaacctcagatggaagaccagaaatacaagtgtgcatttagcagaactcccttcctgccagctgatgagacattctggaagcattttctgactttaaaaatgaacatttcggttcttgtcctccccctatttatttttacatttctctatgtgcaaatgagaaaaacactaaggttcagggagcagaggtatagccttttcaagcttgtttttgccataatggtagtcttccttctgatgtgggcgccctacaatattgcatttttcctgtccactttcaaagaacacttctccctgagtgactgcaagagcagctacaatctggacaaaagtgttcacatcactaaactcatcgccaccacccactgctgcatcaaccctctcctgtatgcgtttcttgatgggacatttagcaaatacctctgccgctgtttccatctgcgtagtaacaccccacttcaacccagggggcagtctgcacaaggcacatcgagggaagaacctgaccattccaccgaagtgtaaactagcatccaccaaatgcaagaagaataaacatggattttcatctttctgcattatttcatgtaaattttctacacatttgtatacaaaatcggatacaggaagaaaagggagaggtgagctaacatttgctaagcactgaatttgtctcaggcaccgtgcaaggctctttacaaacgtgagctccttcgcctcctaccacttgtccatagtgtggataggactagtctcatttctctgagaagaaaactaaggcgcggaaatttgtctaagatcacataactaggaagtggcagaactgattctccagccctggtagcatttgctcagagcctacgcttggtccagaacatcaaactccaaaccctggggacaaacgacatgaaataaatgtattttaaaacatctatttaa

SEQ ID NO: 41 - protein, 344 aa, Homo Sapiens; identical to SEQ ID NO: 39

SEQ ID NO: 42 - DNA, 7733 bp, Mus Musculus
taacaaaacggaagaactgtaacaagttggtatctctctgaaaacttgcaaaacctgagaagctagcctttttaaaacaggaagctatgatgtttactacctgactggtgtatatgatcaagtgttatctctgtttcattagcagtgaaacttaagttactactggactcataaaggacttagcaaaattcaccaggtaccgtttcttctttttattctcttttggacaaggacatatttaaattcaagagatgtttcttagacgatatttccagataggctttcagaactctaggaaaggaaaaaatggatatattagtctatgtaggtgaaagaaatacctcccagagccctcttgattccaagagagaggtggtgtatagtatttaaagataacataaggtagacttagaaaagattttgcaatgtatttccattttcttcttgctttccttattcctatccttctattttcccatctatactatgatacaacatgaactttataactactcaagctacattatctgttaccatcctgtacttcttataattcataaattatgaagaatagcatcattccaaaagtgttacattagtagttagcgtttattgatactgacttgtaagatcatcatgaaaatgtaatctcttgtgtgtatgtatattagaatgaaaatatatttatgtattcatgtgtatactaagtaattacatatttaaatgcataattaaagtttttggaaatcaactctaaaactattagatggattggttgatgattgccgtggtgtctctgtctggattaggttggctggctgcctttggtagatctatctctgttagagggtagagacaaaaaaaaaatccatttagtgttttgaaagactctagtttggctggggttagaagtaaaatggttttggtgagtgatttgagagagggtggtagtcttcagttactagtaggttggactctagcccaaacctgttttcaacctgtgggttacaaccctttgtaggtggcatatcagctatcttgtatactagatatttatattacaattaaaaacagtaggaaaactacagttatgagatagcaaggaaataattttatgtttaggggtcatcacaacatgaggagcagtattaaagggttacagcattaggaaggctggaaaacactgggctagaggatcctctcactccattcaaaagatggtaatattacactgaagctagtcactgagtcatttctcctggaataagaaatgagagtactctatgactcaacaggaaagaagcaaatatgctcataataaattaagtgaagagcacagtcaatgcatagaagagagaatatggtgactaataattacaatttaaaaatccctcaaaaattcctcaaaagaatagtaaataacaacagtaagacaactctatatccacctaactggcccggtaattttttttttgttttaattcttatgcatgttgatggatgcttctaaagctggcaccatcacttacagtgctaagaatttattgttattatatatttcctggaagcaaattgacaaaatgcatcaagctttttggaaatgttattagtttgaaaaagtgtcttggggtatatagtttaaggaaataagtttaaaagacagagatgtttgttgctgtattatttataaagggtgtttaatgtaaataacagaaggcgatttcatgtgtgttgtcaattatattgtacagagcaccaagtagaggcacatagtgtgtttcttggtatgcttactggagtaacttgggcttagcatgctgaacatactggtcatgctgattacattactttgccagaacagatatttttccctatgaaaatagattcttcacaaccatcttgttcaactaaataacatcagcattattcaaagctatctgctacatttgaaatacctgctattaaaagacaatggtcaactctgatcttcaggaaagaaggtttgtaaaagttcttggcacgtgcatgaagccaagtctctcaagatgaacggactacactttgaaatttagaacactcgactgaatagggtccatgccactgaagcaatatttagccatctatctaactcaaatgacaattggaaatttcaaaacaaatctacaaagttatatagatgaaaaagagttgcatcttacagcagggattatttaaatttcttaagcaatcaaaaactttgagaaaattaacataagacaacaaagaaatgaataaaatttttgtccttttaaagaacaaagaagaagaaattcagaatagatattttaattatatagggtttgttgagatgtataaattttatatctgtatacttttagtgtgatatatatttgcaaatattttataataaagtttataaaataaaccagtaatgaaaccctttttaaataatttttttttgaggacagacatagttttaaaggacagaaaagaaaaaaagaccaaaatctacttttgcatttgtatgactttgatattaaggcatgaagtttcctaaaatcaatccaactttaagaaacttgagtctctatctctgtcccctcttgttcctttctcatgttctcattccctcctcacccccatttaggtctatattacttttgtgctctttacttctcattttgaaataatcttgaaataacctacaagacaagatgattagttttctctacaaaagtgcattctcagactgtaccatttttcttaccaaaatgtactttattttcctgacacatgtgcaaacctgtttccattattatttcttgggattttagttaaaagatgaagtagacttaataaccttggctaagaatgcagttcagtggtagagtctttgcttatcacattctagaccctaagtttcattcccaacactgaacaaaaatgtgttacctttacatttatttccagaaaaatgaggaagctcaccattgcatatacttctttctattctaacttttaatataacacagggcatgtttgtagatggactcaaacatctatctatatgggagcaaaatttatctctaactgttcacacttttcaaatgatcacaggactgaataatttgtgtagctttccataattggccattcttgaggataaaaaatattaaaatcattaagtacatagtattctttcacagggaaaatttacatcttgtttttaagaaataagagaaaaggcagagttaatctttacttaaagaaagattgttttgctggattggatgttttacgctatgaggccatgcctggtatattgacattttagtcagtgataacagcatacacaactgtggtctcacaagatggcgagggacatgaaaatgtctatgttgtagtgatgccacaacctttgtaatgccatagcacagtgtactaccagtgtacacagagattctgtgtaaagaaacctactgtattgccagttctctagaaggctagcacagggccgaggatgtagctctgtgtcatggtatttccctaacactgaatgtcttgcattcagcctccagaaccacataagtaaacaaacaaattgcaaatttactttttaaaagtatagcacatacaaacatgaactacatacactatttgatgtagctgactaggtaagaagtttgtgtagtttctgtactatgttttaattgttattttaaagtaggcatttaagaatatgcttaggttgtatactggcattgtgaaatacattttatatcttgtttcagctgaaagtcagacttttaaaagaacagagttaaaattaaagattgattagatctatggaggaaataattagatcaacagtcagatgacagatgataaactcattgaaacctttaaaatctttgagcttcctagaaacatactttatggggctagagatatggcttagcataataatgattcttgatcttacagaacacctggatttggttcttagtacccatgtggcaagtcacaactacctgtaactctagttccaggggacttgatatcctcttttgacctccttgggttcttgtacacatgaaggcacacacacacacacacacacacacacacacacacacacactaataacatataaatcaatgtaaataaataaatgtgtattttcatctgcatgcatatatgtgtattatgcttatactacattatgcttatactttgtgttgtttccatgacagcagtaggtaatgtcatgcacataaactcaaactggcaaataagctcaaataccttttaatttaaatgacttaaataaataaataaatttaacaaataaatttgtatgtaagataaagtaaagatatcttaaaattattagtatgtattttgtgaaggctgtaatacaccagcctggattgaacttacctgttagatgtttaacttatgatgtgtattatttcccatatatcaagtatatcaactttcacatttctcctttggcaaggaaatacactaaaataatgactatatttgtatactctgcaaagtctgcatgttttgtagatttcatacattattgtatgtattgtatttgtatgtattgtaggcatatatgtactataatcatacaaagtctaaaatagttgttaaaggtaaacaaactagataaatttaaaatgtgaagtttttaagtatactttttaagaatttaaaatacaaagtcattaaacatttaagttattttaagtaaattaaaatacaagatcattcctaaatatgaattataaattctaccaaaagaacatatatttcagtctattaataaatatgactgatgttaaattagagctttatggcacacaatttaaaattagtttctcactgaatttttattacaatttggaattactaaatgtttaacattttccttaatataagcacttccacattcaaaaatatgaaatcatgtgattttaattgaaaagcaatttttaaaaggttatgaatatgtccttttattaaaaataattttgcttattttggagatttcttaaagcattatttcaaaacttaaatttagggaaagaaaacaattcagagtgaaatcagtaaatgaggaagaaaatagaaaaaataatacacataagagtatattctgaatgaaagcaattacttgcaaagtaaaaaaatttacataaaataattttgtaagataatattttgctttaaaacaagataattagaaagaatatgacaaaactatgggtttaaacaactcaagcagccttcaaaagactgtaaactgttagccctgagatttctcaatgtgtttcttcaaaacttgactagttcagatactattccttctcaattaaatgaacttatctttgaggcttccaacacagatacaactggatagggaaaaatgaggaaacaaagtgctttcatggcagtttccttttgactctcccaggtaacccccaaagaaggaagatgcctttcctagtgagtatccttgtctcccaatgtgatactcataggcaatcagtaaatctggggccaaataattgtgcccctagcaagcaagaggaacactgaaagacaagtatgtccaaaccgtcctcagaggagtgccacctagtcatttctttaaacttggcccttcctcttagccaggagaaagttagtgggcctttccctgagtaagcagagtatgaatttattgcccttcatgagatttctgccttgtctgcttttcttctttctttgctggagtcattagtctgtagaaaaacagacactggtcctccagctcctggtctaataaagtatgttgtattagaaaatccacttctcctaccctccagctcatcatcttatttatgaaagagaagctcttgggatatcaatgcttaccttagcactaccaagagccagagaaaagaaaagtctccaaagaaatgctgcttaaaattatactgatttcaaagttaaataataatagtaataataatgatgataataataataataaatagcagctaaatcaccaatagctaaatttaaaatgtttctatttaaattactgagaagcagattgtatatagatagaaattaaaactctactaaactttaacttacttattagagaattttagataaattactgtctaaataagcatcagtttccccattaagtatcttggacatgttcatcaaagggcctaagagaggtggttatcattactagtacacaaatgtgttaaaatatgcattagtaataagaattacatattatgcatggatcatataattatcattcttttcactcttcagttcaaaatttggaattccccccttcaaatactttcagaaattaatattcctatgctttaccaccacccatagcatttgtttccttttctattatgaatcatgatgactttgagagctacagagctctcaaagctttttttttctggcccctacttatagcatttcagatatatcttgaaatttgtactaaacaaattctaatttgagtctcttaataataatcaagtgatatattttacatggttaattgtttctttgtttatttgttttttaattttttttctatcacagagacaagtagaatggcattcaacacagatgaaatcaagactgtggttgaaagctttgagaccacaccctatgaatatgagtgggcaccaccctgtgaaaaagtcagaatcaaagagctggggtcatggctcctgcctccactgtactccctggtgttcatcatcggcctcctgggcaacatgatggttgtgttgatcctcataaagtacaggaagctacaaattatgactaatatctacctgttcaacttggcaatttctgacctgctctttctcttcactgtcccattctggattcactatgttctgtggaatgagtggggttttggccactacatgtgcaaaatgctgtctgggttttattacctggccttgtacagcgagatctttttcatcatcctgctgacaattgacagatacctggctatcgtccatgctgtgtttgcccttcgagcccgaactgtgacttttgctactatcaccagtatcattacctggggccttgcaggactggcagcattgcctgaatttatcttccatgagtctcaagacagctttggagagttttcctgcagtcctcgctatccagagggtgaagaagacagctggaaacgtttccatgctctaagaatgaatatctttggtctagctcttcctctcctcattatggttatctgctactcaggaatcattaaaactctgctgagatgtcccaataaaaaaaaacacaaggccatccgtcttatttttgttgttatgatagtcttttttattttttggaccccgtacaacctggttctccttttttctgcttttcacagcacatttttagagaccagctgtcagcagagtaaacatctggacctggccatgcaggtgactgaggtgattgcctacacccactgctgtattaatccagtaatctacgcctttgttggtgagaggttccggaaacaccttcggctctttttccacagaaatgtggcagtttacctgggaaaatatattccgtttcttcctggtgagaaaatggaaagaacaagctctgtctccccatcaactggggagcaagaaatctctgtggtgttttag

SEQ ID NO: 43 - DNA, 1287 bp, Mus Musculus
taacaaaacggaagaactgtaacaagttggtatctctctgaaaacttgcaaaacctgagaagctagcctttttaaaacaggaagctatgatgtttactacctgactggtgtatatgatcaagtgttatctctgtttcattagcagtgaaacttaagttactactggactcataaaggacttagcaaaattcaccagagacaagtagaatggcattcaacacagatgaaatcaagactgtggttgaaagctttgagaccacaccctatgaatatgagtgggcaccaccctgtgaaaaagtcagaatcaaagagctggggtcatggctcctgcctccactgtactccctggtgttcatcatcggcctcctgggcaacatgatggttgtgttgatcctcataaagtacaggaagctacaaattatgactaatatctacctgttcaacttggcaatttctgacctgctctttctcttcactgtcccattctggattcactatgttctgtggaatgagtggggttttggccactacatgtgcaaaatgctgtctgggttttattacctggccttgtacagcgagatctttttcatcatcctgctgacaattgacagatacctggctatcgtccatgctgtgtttgcccttcgagcccgaactgtgacttttgctactatcaccagtatcattacctggggccttgcaggactggcagcattgcctgaatttatcttccatgagtctcaagacagctttggagagttttcctgcagtcctcgctatccagagggtgaagaagacagctggaaacgtttccatgctctaagaatgaatatctttggtctagctcttcctctcctcattatggttatctgctactcaggaatcattaaaactctgctgagatgtcccaataaaaaaaaacacaaggccatccgtcttatttttgttgttatgatagtcttttttattttttggaccccgtacaacctggttctccttttttctgcttttcacagcacatttttagagaccagctgtcagcagagtaaacatctggacctggccatgcaggtgactgaggtgattgcctacacccactgctgtattaatccagtaatctacgcctttgttggtgagaggttccggaaacaccttcggctctttttccacagaaatgtggcagtttacctgggaaaatatattccgtttcttcctggtgagaaaatggaaagaacaagctctgtctccccatcaactggggagcaagaaatctctgtggtgttttag

SEQ ID NO: 44 - protein, 359 aa, Mus Musculus
MAFNTDEIKTVVESFETTPYEYEWAPPCEKVRIKELGSWLLPPLYSLVFIIGLLGNMMVVLILIKYRKLQIMTNIYLFNLAISDLLFLFTVPFWIHYVLWNEWGFGHYMCKMLSGFYYLALYSEIFFIILLTIDRYLAIVHAVFALRARTVTFATITSIITWGLAGLAALPEFIFHESQDSFGEFSCSPRYPEGEEDSWKRFHALRMNIFGLALPLLIMVICYSGIIKTLLRCPNKKKHKAIRLIFVVMIVFFIFWTPYNLVLLFSAFHSTFLETSCQQSKHLDLAMQVTEVIAYTHCCINPVIYAFVGERFRKHLRLFFHRNVAVYLGKYIPFLPGEKMERTSSVSPSTGEQEISVVF

SEQ ID NO: 45 - DNA, 24227 bp, Homo Sapiens
cttgtgcttatccgggcaagaacttatcgaaatacaatagaagtttttacttagaagagattttcaggtaggtgtcgcttttccaggaaaagggaggtggaacaaggaggggtccaggcaggtggaagtagtaacttccagcagtgctcttggatctaggagggaggagaggaaggtacacagcaatttagaggtagtatggggccagagtgggagaaaatatggccacatatctccattttcttcttgctttttctaattttccctttctgtctcccatccacacaatgataagtttgcgtgtagcactcacccaaacttggccctttatacctctttagtcaacatctgtgcccatgttaccctcctatactttcacaaattctcaactatgtgcatatgactactccaaagagcttacacttaatagcttgtgtttatttatattgacttgtaagaaatagcaaaaatataattttacatatatatgtgtatatatatatatatacacatatatatatatatatatatacgcacacacacatacatttttatatatacaaagtcctccctcagtatctgtgagggatttgttccaggacccttgcagataccaaaattcatagatgctcaagttccttatataaaatgatgtagtatttgctgataacctacaaatatcctccagtaccctttaaatacaagtacctagattacttgtaatacctaatacaacgcatacagagcgcttcattcatgtggagtcaacatagcacttgctgcgtggcaaattcaaggcttggtttttgcaactttgtggagctttttcccagatatttttgatccgtgattggttgaatacacaaatgtggaacccatggatacagagggctgattatatacatatgtgtgtgtgcattaagtatgtatgtgtggaaatatatatatttatttgaagttttcattgaaaatccacactaaatcaagctactagatgagtcagttgattgatttggtgtctttttttctgggtgaatgagattgtctgtgttagagggtagagctagaaagccttaccgattcttctggaaacgcctggattgacagaggatgagtgttaactttgacaagtacttcaagtgagagtggtgggaataaggggtcttccacatggatgtggtataagttgaagtatatttttgaagtgcagctctttccagaaaatggtgatgattacactgaaccacgcaggatgagttagctcttctgggagaagaaatatgagccctttgtatgacttaataagaaaaaagcagatctgtacagcagaataaattgggtaaagggcacaaagagataaatcacaggaagggaaatatgaatgactaatacttgtagttaaaaaaaatcagtaatgaaataaatgttaattacaacaataatggcaacccttttgcccatctaattggccaagtaattttttctttcttttagatcttctccatattgatggatgcttgctgaaatgggcaccatcacctactagtgccaagagtatatatattgttacacactttctggaagcaatttgacaaaatgcatcaagagacttcgaaatataattcaatgtagaaattgtgatttgtgtaatataccttaaggaaataattttaaaatgcacacaaatatgtttattgcagtattatttatagcagagcaaattgtgaataacttaatcacacaacaaaaaggcaatggttaaataagcatgattatctatacaatatgttggagtcattacaaattacatttttaagtaatttttagccacaaggaactaggtgaaaggtaaagaagttaaggtatcagaatacaaaatgatatacaagtgtactatctttcatgcgcgtccgtgtgaagagaccaccaaacaggctttgtgtgagcaataaagctttttaatcacctgggtgcaggcaggctgagtccgaaaagagtcagcgaagggagataagggtggggccgttttataggatttgggtagataaaggaaaattacagtcaaaggggacttgttctctggcgggcaggagtgggggtcacaaggtgctcagtgggggagctttttgagccaggatgagccaggaaaagggactttcacaaggtaatgtcatcacttaaggcaaggaccagccattttcacttcttttgtggtggaatgtcatcagttaaggcggggcagggcattttcacttcttttgtgattcttcagttacttcaggccatctgggcatatatgtgcaagtcacaggggatgtgatggcttggcttgggctcagaggcctgacactgtcaattataacatacatggtacctggaaaggcagtggctctctctccatagcacagttggaggtggaagcactgggtcccagaaagctgaaattctggtcatggtgactatcccacaaccatgttatttggaatgtatatgcatactttccttgtgaaaacatattcttcatgaccaactccttcaataatccaaaatcatttggctggtgggcgaaaccctgtcacttaagatgaactgaccgcactcagacacaattctgaaagacacaagcatgaggtgtaacttttgcattagtaactattattaatgattggaagctctggaaatccatgtgctgccctaaaataccaattctgggaaatgtttgtggctggaaagaagactgcattcattcatgatttgaactttgagaggctcttcttgtgtatttccagggaagaagctcactggctccctcattccgttcctgcactgttctcagaaagttcttccccatgtgtggatgtatctagtatcctccaaggtcatcaaatttctgctctatgagagtctacttcctcttctacaggaagaactatcgtatcatagacttttctatcttacgtgggcctaaaacattgcctaatccaaccctttaattaaaaaaaaaaactttgatccagaccaaaggcatacaaaaacaaaacaaaacaaaacaaaacctaaaatgaatccaaatatgattattttccttttttttaacttttattttaggtttgggggtacatgtgaagctttgttacgtaggtaaactcgtgccatgggggtttgttgtacagattatttcatcacccaggtattaagcctagtagccaatacttgtttttctgctcctctccctcctcccactctcaagtagacccctgtgtctgttgttctcttctttgtgttcatgagttctcatcatttagctcccacttataagtcagaacatgtcgtatttggttttttccctgcattagtttgctaaggataatagcttctagctccatccatgttcctgcaaaagacactatctgtttttttatggctgcatagtattccatgtgtatatgtaccacattttctttatccaatctgtcattgatgggcatttagtttgatttcatgcaaaggctattatttttcatacaaaacattccaagttctgccaactatggctgatgttttgggactgttatcatcctacttccttctatagtctaggttgatactaaccctcttaaaatttggtgcctggaacagaacataatatttcagatgtgtagtctggacagtgcaaagcagagtaaaaattattctactccatcctttcatacacttaagaagagtttattaagcatctttcatttgtcaggcatcatgctggacactaggcctgtactgtccactatggtggctacttgcttttatgcgtgtccgtgtgaagagaccaccaaacaggctttgtgtgagcaacatggctgtttatttcacctgggtgcaggcgggctgagtccgaaaagagagtcagcgaagggagataagggtggggccgttttataggatttgggtaggtagaggaaaattacagtcaaagggggtttgttctctggcgggcaggagtgggggtcgcaaggtgctcagtgggggtgatttttgagccaggatgagctaggaaaaggactttcacaaggtaatgtcatcacttaaggcaaggaccggccattttcactgcttttgtggtggaatgtcatcagttaaggtggggcagggcatattcacttcttttgtgattcttcagttacttcaggccatctgggcgtatatgtgcaagtcacaggggatgggatagcttggcttgggctcagaggcctgacattcctgccttcttatattaataagaaaaataaaacaaaatagtgttgaagtgttggggtggcgaaaatttttggagggtggtatggagagagaatgggcgatgtttcccagggctgcttcaagcgggattaggggcggcgtgggaacctagagtgggagagattaagctgaagggaggtcttgtggtaaggggtgatattgtggggatgttagaagaaacatttgtcgtatagaatgattggtgatggcctggatatggttttgtatgaattgaaaaactaaatggaataagagaaggagaaaaacaggtataaaaggtctaagaatcgggaggacctaggacatctgattagagagtgcctaaggagattcagcatagtcctgccagcaaagattatttatttacttcaagagttaagagcggcggtttggggatagcacgaggagatatcagctgtgatggcttgaaaaaacagtgtaaactggcagtgtaaacaagagcagggcatgtatgagtagttgagaacagagaacaggagtatgactagatagaaaatagtagggatgacaagtttttttggggcacagtctaaggtggtccggtgtctggaatgagactgggggcctaatgaaaaggagcatctatacaggaacttaaatgggctgtaccttatagcattccgaggacaggtctgacttctgagaagggaaagtggtgaaagtattgtccagttctttttaagttggtggctgagcttggtgaggtgtgtttttaaaagacctttagtccgttctacttttcttgaagacagaggactataagggatataaaggtttcactgaatactaagagcctgaaaaactgcttggctgatttgactaataaaggctggtctgttatcagactgtatagaggtgggaaggctaaactgaggaattatgtctgacagaagggaagaaatgactgcggtgcccttctcagaccctgtaggaaaggcctctacctatctagtgaaagtgtctacttagactaagaggtattttagtttttgtgactcagggcatgttgagtaaagctaatttgccagtcctgggcaggggcaaatcctcgagcttgatgtgtagggaagggagggggcctgaataatccttgaggagtagtagaatagcacatagaatagcagatggaacactgagaagtgatttccttgaggatagatttctacaatggaaaggaaatgagaggttctaagaggcaggctagtggcttgtactatagcatagcctgcctttgctggtgtgtggtgattaggcctggtggaactgccatcaataaatcaagcatgatcagggtgaggaacaggaaagaaggagatatggggaaatggggtgaatgtcaggtggatcagagagatacagtcatgagggtcaggtgtggtttctggaataatgtgggaggctggactgaagtccgggccaggaatgatggtaattgtgggagacttaacaaagagtgagtacagctgaaggagccaaggagcagaaagtatatgcatcaggtatgaggaagaaaatagattttggaagttatgagaaatgtagagagtgagttgagcatagtttgtgatttttagggcctctaaaagtattaaagcagtggcagctgctgcatgcagacatgagggctaggctaaaacagtaagatcaagttgtttggacagaaaggctacagggtgcagtcctggctcttgtgtaagaattctgactgcactaaccatgcctaggaaggaaaggagttgttgttttgtaagggattgaggtttgggagattaatcggacaggatcagcagggagagcacgtgtgtttttatgagaattatgccgagataggtaacagatgacgatgaaatttgggcttgactgaagtaatgggggctgtctgtgaaaccttgtggcagtacagcccaggtaatttgctgagcctaatgggtgtcagggtcagtctaagtgaaagcaaagagaggctgggatgaagggtgcaaaggaatagtaaagaaagcatgtttgagatccagaacagaataatgggtagtagagggaggtattgaggataggagggtatatgggtttggccccacggggtggataggcaaaacaatttggttgataaggtgcagattctgaactaacttgtaaggcttgtctggttttaggacaggtaaaatgggggaatggtaaggagagtttataggctttaaaaggccatgccttagcaggcgagtgataacaggctttaatccttttaaagcgtgctgtgggatgggatcttggcattgagcagggtaagggtgattaggttttaacgagatggtaaggggagcatgattggtcgccaaggagggagtagaggtatcttatacttgtgggttaaggtgggggaatacaagaagaggacgcaaaggaggctttggattgggaagaagggcagcaatgagatgcggctatagtccaggaatagtcagggaagcagataatttggttaaaatatctcggcctaataagggaactgggcaggtggggataactaaaaaagagtgcataaaagagtattgtctaagttggcaccagagttggggagttttaagaggtttagaagcctgggcatcaatacccacaacagttatggaggcaagggaaacaggctcttgaaaagaaggtaatgtggagtgggtagcctctgtattgattaagaaggggatggacttaccctccactgtgagagttacctaaagctcggcatctgtgatggtctatggggcttccgaggcgatcaggctgtgtcagtcttcagccgctaagccaagaaggagtcagtcagagagccttgggccagagttccaggggctctgggagtggctgccaggtgagttgaacagtctgatttccagtggggtcccacacagatgggggaatcctgggctgcaggcattccttggcctggtggtcagatttctggcacttgtagcaagctcctcggggaggaggttctggaggaacgcctggccactgcggttcaggtgtttggaagttcttgtgtgctggggatgtggctggggtttgtctcacagtggaggcagggaattgcaactttttttttttatcattgtacaccttgaaggtgaggttaattaagtcctgttgtggggtgtgagggccagattctaatttttggagttttatttaatgtcgggagcagattgggtaataaaatgtatattgagaataagatggccttttgaccttttagggtctagggctgtaaagcgtctcagggttgctgccgaatgagccatgaactgggctgggtttttatatttgatgaaaaagagcctaaacgcttctgatttgggataaagaaaaaggagcattaaccttgactatgcctttggctccaggcacctttttaagagtaaattgctgggcaggtggggaagggctagtgatggaacgaaactgtaagccggaccaggtgtgaggaggtgaggcgataaaaagattacagggtggaggagtggaggctgaggaagaattgggacctagcttggcctggcaaggaggggagaggtcagatgggtctgtagaaaaggaagattagaaagactcagcgatgcttggggttgggactgaggggacaggcgggagggaaacaaggaagatttgggacaagttgcactgggcacagagactaggaagggactgatgtgtaaaagaatgcctggacatcaggcacctcagaccatttgcctattttaagacaagaattatttagatcttgtaggatggagaaatcgaaagtgccattttctggccatttagagccattgtcaagtttgtattggagccaagcagtgttgcagaagaaaataaggcgtttaggttttaggtcaggtgtaagttgaggttttaagttcttgaggacacaggctaaaggagaagaaggaggaatggagggtggaattttgcctatagtgaaggaggcaaacccagagaaaagagagagtagagacatggagggaaggggttcaggggttcttaccctccagaaaagcgggaaggggggtcggggcatggaaataagggattggggcacagagataagaggtctgggtgcggaaataagggattggggcacagagataagaggtcagggtgaggaaataagggattggggtgcagagataagaggttggggtgcagaaataagggattgggggttcttgccccctagaaaagtgggacttgccactaagagtgaaggagaaggggttgaggggtacttgcccctcccccagaaaagcagagaaggggtagagacatggagagaaggggttgaggtacttgcccctttcccagaaaagcgggacttgctgctaagggtgaaggaccaaggcaggcgtccctgcgtggtctgacacccttgaaacgtgggtgaataatcagagaggcgtccctgcaatgattaaacaccaagggaaggctgccttcccagtctgtgaccggcgccggagttttgggtccatggataaaacgtgtctcctttgtctctaccagaaaatgaaaggaattgaaattaagagaagggagagattgaagtgtggcgccaagattgaaaggagaaagaggttgagggatagtgagggaggttggagaagagagtaaaaagaggccgcttactggatttgaagttggtgagatgtttcttgggctggtcggtctgaggacctgaggtcgtaggtggatctttctcacggagcaaagaacaggaggacaggggattgatctcccaagggaggtcccacaatccgagtcacggcaccaaatttcatgtgcatccttgtgaagagaccaccaaacaggctttgtgtgagcaacatggctgtttatttcacctgagtgcaggcgggctgagtccgaaaagagagtcagcaaagggagataagggtggggctgttttataggatttgggtaggtaaaggaaaattgcagtcaaagggggtttgttctctggcaggcaggagtgggggtcacaaggtgctcagtgggggtgatttaaaatcacctagccaggatgagctaggaaaaggactttcacaaggtaatgtcatcacttaaggcaaggaccagccatttacacttcttttgtggtggagtgtcatcagttaaggtggggcagggcatattcacttcttttgtgattcttcagttacttcaggacatctgggcatatatgtgcaagtcacaggggatgcaatggcttggcttgggctcagaggcctgacactttctacatgtggttatttaaattaaataaaatgaaaagttcagtttctcaattgcagtagccacatttcaagtgctcaatagccatgaggctagtttctgtcttttttttttttttttttttttttgagacagggtcttactctgtctcccagactggagtggagtggcacgatctcagctcacagcaaactccacatcccaggctcaagagattctcctgcctcagcctcccgagtagctggaattacaggggtgcaccactactgcccagctaatttttttttttttaaagtagagacaaggtttcaccatgttgaccaagctggtcttgaactcctgacctcaaatgatccacccaccttggcctctcaagatgctgggattgtaggcatgagccacagcacccagccaagtgtctctcttatcagacagcacagatacagaacatttccactaatacagaaaaattctattggaccactgcacagataactaacttttctggatactccaggttttttgagaaaagaaatgaaggaagggaaggaagtgggaggggatcagcttaattgcatagatgggaagcaagttgaatatctagatgggtaattggatggaaacaagaagggatagctggtggagaggtggatggagagtcaggtggtagatttcatttgttctggatgatacagcaatatagcctaccattaaattggctcttgtgtttgccattcatggtgatagcttctaaagaacttgcaactaaggatattctttattctacccctaagtttccccttttctttccactacatttaaaataggttggagggttacatgactcagggatttaaaaaaaaaaagttcaaatttaggagggacttcatgtcacatagtccaggagttgtcaaccttggctgcacaagggaatcaccagaagagcattaagaaccactgagagccagaccccatctccagagactctgatttaattgttcagggttataagctggggattttcaagagctccccagtgactcccacatgcagccaggactgagaaatgctgctctagccaatcttcctccctctgggggaatcccttctaccccgtccctgataggaagtcactcagcctctgagtgaattcctccagtcacagctcactcaagacctcacatggcacccatttcattgctgggataattctactcaaggtgttcttgagtggtggttgaatttgcatctttgaactacctcttgctggttctgggaggctttgcagggagtcacacataattctgattctcatctgcccagccagtatcatactctctcccctccccaaagtggattttctccaggatggatacgcttggcttcttcaactcatctttattgggtaaagcttcctcttgactgcatttcaattggtcaatgtttgcattaaatgagccctggacatatttggaccactttcggatgctgtgaaatgatccttcccactatctgcatataacacttttattaatttagattaaattaagattaaatttaactaagtttacatgcaggaagtttctttattaaccccatcacatgttaaccttaagggaaactagaattaccggattcttttggagtatttttgttctacttttattttaggttcaggggtaaatgtgcaggtttgttatactggtaaattttgtgttgatgcccagtgtgggtaatctaaattctgttaatagaaaactgtttaaattccacacagtggaataccatctcgctattagaaagaatgaggccgttctacaagtattgatatagaaagatttccaagatgtaaggtttaaaaaggctcagaaaacttgatgtttcttactctgatttatgtaccaaagaatgagacagttctacaagtattgacatagaaagatttccaagacataaagtttaaaaagtcacagaaaacttgatatttcctactctgatttatgtaccaaaaagccacttataattatgtatataaattcagccaccactcaagaacaccctgaatagaattatccagcaatgaaatgggtgccatgtgaggtcctgatttatgtaccaaaaagccacttacaattatgtgtataagtacataaacaaatatcaagagggctcgacaacaaactcccctctgaggaggagaggaaattgagaaaggggagaataaaagaaactttacatttgtcaaaaataaaatcagatcaaaatttaaagttgcagaagtttattgtgcacacaaaagaacagtttgggagtgaggagacatagatctgaaagtgtagggattcccacttagagcacttacagcatagtttataaagcataaaggggaagtatttttcccccctgggttcaaagttcttttttaaaaaaaaatcaataggttttaggggaacaggtggtgtttgttatatgaataatttctttagtggtgatttctgagattttggtgcacccatcacctgagcagtgtgtacactgtactcaatgtgtagtcttttatccctcactcccctcccatcctttcccctgagtccccaaagtccattttatctttcttatgcctttgcatcctcacatcttagctctcacttatgagtgacaatgtacaatgtttggttttccattcctgagttacttaacttagaataatgatctctaattccatctaggttgctgcaaatgccattatttcattcattttcatggctgagtagtataccatggtgttgctataaatgtgtgtgcaagtatctttctcatatagtgacttattttcctctgggtagatacccaggagtaggattgatggatcaaatgatagatcgacttttaattcttcaaggaatcaccacattgttttccataggggttgtactagtttacatacccatcaacagcataaagtgttctcttcaccacatccacgccaacatctatttttttttttattattatagccattcttgcaagagtaggcagtatcacattgtggttttgatttgcatttccctgataattagtggtgttgagcattttttcatatgttcgttggctatttgtatatcttcttttgagaattgtctattcatgtccttagcctactttttgatgggattatttgtttttttcttgatgatttgtttgagttccttgtagattctggatattagacctttatcagatgtgtagattgcaacgattttctcccaatctgttggtggtctgtttactctgctgattatttcttttgctgtgcagaagctttttagtttaattaagtcccatctatttatctttgtttttgttgtatttgcttttgggttcttggtcatgacctctttgcctaagccaatgtctagaagagttcttttgaggttatcttctaaaatttttatggttttgggtcttagatttaagtctttgatccatcttgggttgatttttgtctatggtgagagatgaggatccagtttcattcttctacacatggctagccaattatcccagtaccatttgttgaatagggtgtcctttccccactttatgtttttgtttgctttgttgaaaatcagtttgccttaagtatttgggtttatttctgggttctctattctgttccattggtctatatgcctgttcttataccagtaccatgctgtttgggtgactatggccttatattaatagtgtagtttgaagctgggtaacgtgatgcctccaggtttgttctttttgctgtgttgctttggcaatgtgggctcttttttggttccatgtgaattttgggattttttttcaagttctgtgaagaataatggtggtattgagatggaaattacatgaatttgtaggttgttttttgcagtatggtcattttcacaatattgattctacccatccatgagcatgggttgtgtttccattttttgtgtcatctatgatttctttcagcagtgttttgtagttttccttgcagagatctttcagtattttgaactttttttgtgatttgctgttatacattaacatggtgttgcaacaagaacatttaaagctgatttgtctatagcagattggtttaatttcactgaatcatgctgacaatgacataaactttatattttgtgtttcatttattattacatctggcttttcagggaaatcaggatgacttcagtcttggctatgtggctatgggtggttggccttgaggagtttgggctgtaatcctgaaaaacacaatcctgaatgccataatcccaaatgttgaaatccagaaagactaaaattttaaatccaaaaccacaatcccaaaatattaaaatcctgaaaatataactctgaaaacaataatttaaaagacatttatttatattcctataggtggatttattttgaaaaacttataaaaacacaacagaacacttcacaatagggaataatatatatatttttgcaagcataaacactcaggtatactaacaacagtcacaagggtataacagttatgagcagatgaattttattcataaataaatagtgtcaaaattttattcataaataaattgcgtaaaaaatcacaatgtataaatgcatatcactatagttaataattgtgtgcacccagctttataaactgtagtcatctgaaatactgtgatggacatcctaattctttggatgagatcaatcgagaatcatgatgggtcaccaccatatttgccagttgcccaaagagccaagacctcgagaaattgtatctttcacaaacacagaggcacaaaaaggacatctgtttatttatcaaggaggtcttcacatttgtgcacacacacacacacacaatgcttacacacaaagttgtagtagtaatgtaccttcaggagtcaaatttgcaaaaaaaaattgcataaaacataataaaactctctaaatgtctttacacagtttataactccactactgaaaatgatgcaaagattaaatacatagcatagtgaattggcactaggggtgaaggaacagaagtgatacacaattgagtaacttggcaagggaaatttcttgtattttttccgtgtgttttcacttctaagctcttcaaaacacttgctgcacttgtatttggagagtcgttgttgtctacacattgcctaagtatatgctgtccatttaaaagtccgtttattgcttggctgttgcaattaaaggattggtgcttttgtagcaccaataataatcaactttaacattgttatctttcaccattaaagtaacctcatacacttagcttgtcccaggctttttttttttttttttttttctgggaaaaaagttcaccagtctcttccattgagagtaaaggaagagtaatggaatattgtgatgctcattagacacttaagatgaaattttgagtaggaatttgggtcagggcttaagacatcaatttgagagtccttaacatgtattagtatttaaaaccataatggcatatcattccagtaagaaggatgatactcagcttcctcaataccaaatctatattagtctgggttctccagagacagaaccaataggatatgtatgtagatatatgagatgggatttattaggataattggctcacaattaaggcggctaagaagtcccacaacagaccatctacaagctggagaccctggaatacaggtagtgtggctcagtgtaactctgaaggcctcagaaacagagaagccaatgttgtaactctcagtcctaggctgaaagccactgagttgggggaggtgggtagttgtatagttcaaaggctggtgagcctggatttctgatgtctaaagcaacagaagaaaagtctgttccagctctcaaagacagaccaatttgcgttctgtaattgttctcttcaggcccccagctgattggatggtgcctgtcaaccctgaaagcagatctttcccacctaatccactcagactcacacagtaatctctggaaacactttcacagacacactcaatacaatgcttcaacaagtttctagttattcctttactcagtcatgttgacatctaaaattaagtccacagatccaccctttgtcaagttgacatgcatacacatctccttaaaccatacttaatttccagataaagataatagcaagtaatagttcttcttaacacgatgcaactaacattatgcaactacggtgtgtacaaccagaaatgcactaatccttccccagaattcagctttcaggatttcaacattaggaattttagtcttttaggattgtgattttgatcttttgggatttcaacattatagcatttgggattgtgtttttcaagaatatgatcagcactgggccttgggacatatctaaactgtggccttcatttttatttttctttaacaattccccacttttggtcatcctctcgcttgaactgagaatgtgactggctattacccttggttactacatgttgctttcctttctgtagacatttataggtcacaaactagaatctcagtaagttattttgatgactcttattcatatagttttggttttcaatcctcacggagatcaactgttgagttagtggctgctgacaagcatttaagatccttgtgagactacattgcataagggatattatcaatatgactaataggaggataataccaagagtctgaaaaataccccaaaaccaaccaaaccaacctacttaagagccaagatttagccaatcaattgtgcttccctgatctggtagaatagtaggatctgatctcttagatctctaagatttagggctacaattcctgattcaatgacatagaaacagcattttaaaaaatatggctgtttcactctaatagattttcttggcttgcagtttgaatgtctctggtaatgtcattggagctccagggaactttctgagtggctgtgcagcaacatgcacaaaagatgttcatatacaagctgttgtggtgatttctctgaagtttattttaggtaattcaacttcagcttgcaggactgtaaggctagaaacaaccctagttcaaaactgtcagaaacctgtatgtgtcagagtctttctatgaatttcatgtcattttgtaccataaggtatttgcaaaagctttcaggaaagcaccagagtaaaacaataactgctgtggatgaacaatggtttaaaatgcccctgagaatttactataatgcagttgaagaagaaatttggttatttctgtgatatacaacattttggctgataaaatatatacaacatatggctgatatacaacacatggctggtaaaattataccaggacatatctgatatttaggaaattcatataatttctgaaacacatattaataagatatatctatacaaatataacataaagaagatttaacattatttcttatttggcagttcttcccatgcaatgtaatatgttaaataaacttaattagtctaacatctctctttttataatataaggagagaataaattcctttgaggtttttccagaggctctctgcaaaattccaaagttagcttaaggtaaaaaaagactgtatgtagaattgatttaggaaggttgtcaaaaatgtctaaagatttaaagcacttgattaaataggatcatagttcactgtgaaacaatacttaggtatccatttagccaaagtgacaagtaaaagatttcaaaggcaaatacagaaagttacatagttgtattagtccattttcatgctgctgatgaagacatacctgtgactgggcaatttacaaaagaaagagttttattggacttccagtttcatatggctggggaggcctcacaatcatgagggaaggtgaaaggcacatctcatatggtggcagacaagagaagaagagcttgtgcagggaaactccccttttaaaaaccatcagatcccgtgagactcattcactatcaggagaacagtgcaggaaaaacccacccccataattcaatcacctcccaccgtgtgtctcccacgacacatggggattgtgggtgttacaattcgagatgagatttgggtggggacacagccaaaccatgtcattctaccccggcccctcccaaatctcatgtcctcacatttcaaagaccaatcataccttcccaacagtcacccaaagtcttaactcatttcatcattaactcaaaagtccacagtccaacatctcatctgagacaaggcaagtcccttctgcctatgaacttgtaaaatcaaaagcaagttacttacttcctagatacaatgagggtacaggcattgggtaaatacagccattctaaatgggagaaattggccaaaacaaaggggctacaggccccatgcaaattcaaaatccagcagggcagtcaaaccttaaagctccagaatgatctcctttgactccatgtcttgcatccaggttatgcagatgtaagaggtgagttccaatggtcttgggcaatagttaagaaaacaaaaatgaaaaatcttagttcctgtaacacaaataactctattttcttaagtaatcaaagatcttgataaacacaacatgaggcagaggaaattattttgatgagaaataaaatctgctcttttaggcagatcacttaaaaggcagagaaaacactttcattactcttatcaagagtagactaataatccaagaaaactttgtggtttttaacagaaagaagaccaaattctagttttgcatcagtgtactttgatattgaaagcccattttaaaatccttgtaataaattcattcaattttatccagtttaaccacataagattctctctctcattctttctctccctcctactttctatgttcatttaacttttgttctttattatcctctttcttcatgttgaaataacctttaaataaccttcaaaacagatcaaaatcacattcccaggtataaaaccttgatattgtaaagttatcaattcttcctaaatttatttacaaatgtaacacaattccacccaaacttatgtttttataagtaattgagtagatgatcctaaagtttaataaaacaaatggctctaataggtaagacatttggaaatgtataatgaaagggagttgcataataagatcatctatataaatcatctaataaatctacaataaaaagtgtctctagcacagaaataagatatcaatagaatataaggtacaaaatcagattcaggaacattaaagaatatacgacaaaggtgatatttcaagcccaaaggggagaggatggttattcaacacatagtgttttaaaatttgtcagataagaatggagaggaggaggctcctctcctctgaccccagggaatgtgagaagagacacagtggttatgaaaggaagcagtcacacctgtggatccctaccttccccatcagagctagggggcatggagcgctctctgctaagatggggacccccaaggaatgtctccctgtggggcacttccttaccagatgggatggccagtgcggttaagttggtggtcaggcagaaaaaaaagatctagtttgtactcttgagagttcctcggtttgttcatggcatgggcagggagtcaaggagcagcagccttgcctcagtgcctaccagtgcaggaaaaggtgcatagcctgggccagggccagggccctggtggaggcgtagtggtaacagagagggctctccattccagcccaaggaagactaagaatgaatacctcatgagtatattagctacaaaccaccacagcaggttccagaaaaaggctcagcgttggaaccaggtcacccccactcagcagacaccagtcatataaatcaaggaccaacaggagacaggaacacccccttcccactctgccccatgtctcaagttgtagtggcccttcctccagatctctgccaccatcttagaaaggaacactgaaagaagaaactgaaattataagctgacagcataaagaggatgagtaaaacctaaaatcattgttcaaatgaatgaatcaagagaagtttaaaccactttggactaaaatgtgtgaatcctttttcctgctatccagcagatgagaagctggtaacagagaccaaaatagtttggagactaaagaatcattgcacatttcactgctgagttgtattgtgagtaattttagttgacctcacttttgtaaatcttgcacacgggcatccatatctgcacagagatatgttaacagtggtaaatgctgcatgaggagattgggtgatttttactttcgtttttgtgctcttctttcttattgttcttacttatttacgattaccctatcgttttccaaaatgtaaaaggccattttgaaagcctaattcaaacctcttcactattttgtatctaagtattcaccttgattgagactgggtagacaggtgaaaaccatatcaggtttttaattttttaatttttaattatttatttatttatttattttttgagatggagtctggctgtcgcccaggctggagtgcagcggcgtgatcacagttcactgcagcctcaaccttctaggctcaagggattctcccacctcagccccccaagtagttgggaccacacgtatgcgccaccatgcctggctaatttcttatttttttgtagagataggatctcactatattgtccaggctggtcttgaattcctgggctcaggtgagcctcccacctgggcctcccaaagtactgggattacaggcatgagccaaggtcccctgcccatatgagattttctgtctctgatcccatgcagctagtaatcaaggacttggctgctgactctggaggacctgcatgctttcttgagctgtgaacttcagtgctaaaagctcataggcagccctgaaacccaaaccaaaaggttctatggtttatcatcctgatcatgttgattttatagaaataacacatgaattaaagacactaccctcaaactgagcaaaacttaagtaatttttttaaagtttgacctgtttttaaatcactcttggagaaaaaggaaaataaatacaaataattaacggtgaatacaggctactatacctttgttctccagaattagcagttctgttcttttcttgctttagatgctgaagtgcagaaggacactctgtgattgtacgtgtgtaactgacaaaatgtgtattttttttctcagctgctatggattggattatgctattatgaataagaatgctgatgggagcacacacaaaccatttgttcctcagtccattttcctcctcaaaagcctggaatgtgccattgatcagtgggagatgtacctggacagacccatgaaaagagatcaacaagttccacccaagggaccctatttttcctaatttcatttgaaatggcttctaattgtccttctttcattcctgcttcctaccagttttacagctttttctggtttcaaatgtgaactcacatacactctcatttttcctcatcacaaccccaagtgacccaatggtcctcactttcgatataagtaaaggaggctctgcattaagggcttgtccaaggcacgcagctgagaggcgctaggactggctccatttccatctctattctcactgactttgactacccagaaccccaacatgtggggcctcagtattcgatcaattattctattaagaagcaaaaacaattccccgcattggccccagttattaagcatttctcagatttaccttgagaaatgcccatcggcctgtatattcacatcttcacccttgtcccttcctcctagaaaggagaaagtcagttggatgccctctgaggaactagtgcatggcttaactgtccttccatgactcctgccttatctgttttctattttcctccttttccaccgaagtctataatctcaagaaaagcaggcactggccttagggctcctggcctaagaaatatcaagtccagtgagaaatcccattgactgacccctcctgcttacccctttgtgatggagaagctcccaggggtttgctttttgcatgttaccaggcctaactcagcatcaccaggggcaagaaaaggaaagtaacctaaactaatgctgcttataattgtaattattgtaatagttaattactgtgattgtacatgtgtaacagacaaaatgtgtatttttttcacagctgctgtggattggattatgccatttggaataagaatgctgttaagagcacacaagccaggttcctcaagtccgtagcaaatttttcaaaagttaaatttaaaaatcactacatttgaatctagtgacaggagaaatggacatggatagagactaaagatctagcccaaattttatatttacttgttagaggattttgaacaaattactaaatttcttcaaggttcaatttccccattaactataatgaatggctcatcattatggggccctggagaagcataattacttgtaattgtaataatcattgttattattattatacatattttgcttttaaatggataaggatttttaaggtatatgtaaactgtaaaacataaaatgcaaaatgccgtaagagacagtagtaataataatgattattatattgttatcattatctagcctgttttttcctgttttgtatttcttcctttaaatgctttcagaaatctgtatccccattcttcaccaccaccccacaacatttctgcttcttttcccatgccgggtcatgctaactttgaaagcttcagctctttccttcctcaatccttttcctggcacctctgatatgccttttgaaattcatgttaaagaatccctaggctgctatcacatgtggcatctttgttgagtacatgaataaatcaactggtgtgttttacgaaggatgattatgcttcattgtgggattgtatttttcttcttctatcacagggagaagtgaaatgacaacctcactagatacagttgagacctttggtaccacatcctactatgatgacgtgggcctgctctgtgaaaaagctgataccagagcactgatggcccagtttgtgcccccgctgtactccctggtgttcactgtgggcctcttgggcaatgtggtggtggtgatgatcctcataaaatacaggaggctccgaattatgaccaacatctacctgctcaacctggccatttcggacctgctcttcctcgtcacccttccattctggatccactatgtcagggggcataactgggtttttggccatggcatgtgtaagctcctctcagggttttatcacacaggcttgtacagcgagatctttttcataatcctgctgacaatcgacaggtacctggccattgtccatgctgtgtttgcccttcgagcccggactgtcacttttggtgtcatcaccagcatcgtcacctggggcctggcagtgctagcagctcttcctgaatttatcttctatgagactgaagagttgtttgaagagactctttgcagtgctctttacccagaggatacagtatatagctggaggcatttccacactctgagaatgaccatcttctgtctcgttctccctctgctcgttatggccatctgctacacaggaatcatcaaaacgctgctgaggtgccccagtaaaaaaaagtacaaggccatccggctcatttttgtcatcatggcggtgtttttcattttctggacaccctacaatgtggctatccttctctcttcctatcaatccatcttatttggaaatgactgtgagcggagcaagcatctggacctggtcatgctggtgacagaggtgatcgcctactcccactgctgcatgaacccggtgatctacgcctttgttggagagaggttccggaagtacctgcgccacttcttccacaggcacttgctcatgcacctgggcagatacatcccattccttcctagtgagaagctggaaagaaccagctctgtctctccatccacagcagagccggaactctctattgtgttttaggtcagatgcagaaaattgcctaaagaggaaggaccaaggagatgaagcaaacacattaagccttccacactcacctctaaaacagtccttcaaacttccagtgcaacactgaagctcttgaagacactgaaatatacacacagcagtagcagtagatgcatgtaccctaaggtcattaccacaggccaggggctgggcagcgtactcatcatcaaccctaaaaagcagagctttgcttctctctctaaaatgagttacctacattttaatgcacctgaatgttagatagttactatatgccgctacaaaaaggtaaaactttttatattttatacattaacttcagccagctattgatataaataaaacattttcacacaatacaataagttaactattttattttctaatgtgcctagttctttccctgcttaatgaaaagcttgttttttcagtgtgaataaataatcg

SEQ ID NO: 46 - DNA, 1617 bp, Homo Sapiens
cttgtgcttatccgggcaagaacttatcgaaatacaatagaagtttttacttagaagagattttcagggagaagtgaaatgacaacctcactagatacagttgagacctttggtaccacatcctactatgatgacgtgggcctgctctgtgaaaaagctgataccagagcactgatggcccagtttgtgcccccgctgtactccctggtgttcactgtgggcctcttgggcaatgtggtggtggtgatgatcctcataaaatacaggaggctccgaattatgaccaacatctacctgctcaacctggccatttcggacctgctcttcctcgtcacccttccattctggatccactatgtcagggggcataactgggtttttggccatggcatgtgtaagctcctctcagggttttatcacacaggcttgtacagcgagatctttttcataatcctgctgacaatcgacaggtacctggccattgtccatgctgtgtttgcccttcgagcccggactgtcacttttggtgtcatcaccagcatcgtcacctggggcctggcagtgctagcagctcttcctgaatttatcttctatgagactgaagagttgtttgaagagactctttgcagtgctctttacccagaggatacagtatatagctggaggcatttccacactctgagaatgaccatcttctgtctcgttctccctctgctcgttatggccatctgctacacaggaatcatcaaaacgctgctgaggtgccccagtaaaaaaaagtacaaggccatccggctcatttttgtcatcatggcggtgtttttcattttctggacaccctacaatgtggctatccttctctcttcctatcaatccatcttatttggaaatgactgtgagcggagcaagcatctggacctggtcatgctggtgacagaggtgatcgcctactcccactgctgcatgaacccggtgatctacgcctttgttggagagaggttccggaagtacctgcgccacttcttccacaggcacttgctcatgcacctgggcagatacatcccattccttcctagtgagaagctggaaagaaccagctctgtctctccatccacagcagagccggaactctctattgtgttttaggtcagatgcagaaaattgcctaaagaggaaggaccaaggagatgaagcaaacacattaagccttccacactcacctctaaaacagtccttcaaacttccagtgcaacactgaagctcttgaagacactgaaatatacacacagcagtagcagtagatgcatgtaccctaaggtcattaccacaggccaggggctgggcagcgtactcatcatcaaccctaaaaagcagagctttgcttctctctctaaaatgagttacctacattttaatgcacctgaatgttagatagttactatatgccgctacaaaaaggtaaaactttttatattttatacattaacttcagccagctattgatataaataaaacattttcacacaatacaataagttaactattttattttctaatgtgcctagttctttccctgcttaatgaaaagcttgttttttcagtgtgaataaataatcg

SEQ ID NO: 47 - protein, 355 aa, Homo Sapiens
MTTSLDTVETFGTTSYYDDVGLLCEKADTRALMAQFVPPLYSLVFTVGLLGNVVVVMILIKYRRLRIMTNIYLLNLAISDLLFLVTLPFWIHYVRGHNWVFGHGMCKLLSGFYHTGLYSEIFFIILLTIDRYLAIVHAVFALRARTVTFGVITSIVTWGLAVLAALPEFIFYETEELFEETLCSALYPEDTVYSWRHFHTLRMTIFCLVLPLLVMAICYTGIIKTLLRCPSKKKYKAIRLIFVIMAVFFIFWTPYNVAILLSSYQSILFGNDCERSKHLDLVMLVTEVIAYSHCCMNPVIYAFVGERFRKYLRHFFHRHLLMHLGRYIPFLPSEKLERTSSVSPSTAEPELSIVF

SEQ ID NO: 48 - DNA, 1476 bp, Homo Sapiens
tttttcttcttctatcacagggagaagtgaaatgacaacctcactagatacagttgagacctttggtaccacatcctactatgatgacgtgggcctgctctgtgaaaaagctgataccagagcactgatggcccagtttgtgcccccgctgtactccctggtgttcactgtgggcctcttgggcaatgtggtggtggtgatgatcctcataaaatacaggaggctccgaattatgaccaacatctacctgctcaacctggccatttcggacctgctcttcctcgtcacccttccattctggatccactatgtcagggggcataactgggtttttggccatggcatgtgtaagctcctctcagggttttatcacacaggcttgtacagcgagatctttttcataatcctgctgacaatcgacaggtacctggccattgtccatgctgtgtttgcccttcgagcccggactgtcacttttggtgtcatcaccagcatcgtcacctggggcctggcagtgctagcagctcttcctgaatttatcttctatgagactgaagagttgtttgaagagactctttgcagtgctctttacccagaggatacagtatatagctggaggcatttccacactctgagaatgaccatcttctgtctcgttctccctctgctcgttatggccatctgctacacaggaatcatcaaaacgctgctgaggtgccccagtaaaaaaaagtacaaggccatccggctcatttttgtcatcatggcggtgtttttcattttctggacaccctacaatgtggctatccttctctcttcctatcaatccatcttatttggaaatgactgtgagcggagcaagcatctggacctggtcatgctggtgacagaggtgatcgcctactcccactgctgcatgaacccggtgatctacgcctttgttggagagaggttccggaagtacctgcgccacttcttccacaggcacttgctcatgcacctgggcagatacatcccattccttcctagtgagaagctggaaagaaccagctctgtctctccatccacagcagagccggaactctctattgtgttttaggtcagatgcagaaaattgcctaaagaggaaggaccaaggagatgaagcaaacacattaagccttccacactcacctctaaaacagtccttcaaacttccagtgcaacactgaagctcttgaagacactgaaatatacacacagcagtagcagtagatgcatgtaccctaaggtcattaccacaggccaggggctgggcagcgtactcatcatcaaccctaaaaagcagagctttgcttctctctctaaaatgagttacctacattttaatgcacctgaatgttagatagttactatatgccgctacaaaaaggtaaaactttttatattttatacattaacttcagccagctattgatataaataaaacattttcac

SEQ ID NO: 49 - protein, 355 aa, Homo Sapiens; identical to SEQ ID NO: 47

SEQ ID NO: 50 - DNA, 136258 bp, Mus Musculus
  misc_feature (1)...(136258): n = A,T,C or G
atggacacctcctgcgtccacatgctcctgtccttgctggcgctgctgcagttggtggccgccggcagctcaccgggaccagatgcgataccgcggggctgcccatcacactgtcactgtgagctggatggcaggatgctgctcagggtggactgctcggacctggggctctcggagctgccctccaacctcagcgtcttcacctcctacctgtaagtgaccccccccccccgcctcgctgcgggcaccgagctcaaaagggatggggtataggtgggaaacctcggctggggctccccacaggcacacgcctgctccggagggggcaggcgagtttgccaagggcattctgaccagacctgttgtgcctccagagaaaggcacgtgtctctctctctgacagagcagagcctagctttctgtaccctgggagaaggagcttaaagcgcactggggcagagagccggtgcgcaggctgctttgcagtgccgcgcctggcaggacgcaggaccagtccctccgaatgtgcgcatttgtgtgctgagtgggggtttgtgctcagggacctgggacccaagggcaggctgtcctattgctcacaggcgcgacctctgcgtctgggctgaaaaactttccctgcaagagaaacacaacttcttcaacccccccccccggnnnnnnnnnnnnnnnnnnnngggggtgctgctctgcacacaccgccccccccacacactggagtgtggtgaaatctcttttctttttttcttcctttttttttttaaacaaagtgattaaaatgtggcaaccacaaacccccgattagagctgccagaacgttatctttacctttggctggccgaaccgccctttgaagtgccgccggccacattgtaatctttaaccatctcctcccccgccgcagctaagggaagtgggctgaaggcagccgggcgggtaaacaggggcgccgctgacatccaaagggggacctggagctttctatcggcccctgggaattgtcctagcttttctgctcctgctatggcgtccaaatccccgaccgtggaaccaaagctgcggttccttaataatgtggtctctgagaagcccaggcgggagggtgacaggtggtgggttagatgaggtgactcagaagcgactcatctctgtgggaccgagataagtactcctcccgactctccttcaaatctgaagctcggttccttggggcccagagaccagggtcaggccaccttgaggtaacccgatctcctaactatgaggtgaaataaatttgtggtctttattttttttaaaatcaagacatttcgccgagcccattccaaaccctgtgttcccagtttcggctttctctgatgttaccttggcaggagttgactgaaatggttgtgagttcggttttccccccctctggttaggagttttgcgggaagaaacaccaggcttacacaatgttcccctgctaggcagtgagtggttgttttgttttgtttttcttctggagacaatgagcaacagaaaatatcgttcgacctgttttgatattgtgacttaagaaagagaccagcctcctaggtttccgtgttgggcacctccgtgttccgtgaaactattcaggtcactcttatttgactggatagaacataatttttccccaccgggtttcccttcagttgaaatcattacatgcggtgataatttttttagggatggaattctgctctgggaaacaagcgttctctccgaatttacatttccttcggaacagctgtcttaccacagactttaatacgcttcccttccccccagcctccctagtttaaccgctaacttcagtaattcgagggataatgtgttctccagtttgtttctgagatcagcttggtgatttctcttttagggactacgcctatcccccacccccacccccaacgctgcggaaatttgactatagacaagtgcagtgagcagcccccctcacacacattgcaaacatatcatataacatattacaaaatatgcaaacacgttgacgaagtgtccggcttactttttttttcctcccacgtgaaggaatgaacatttgttgggcttatgttaccaaaagcctaaaattctttttttttaaacgcgatttcccatatacatcagatgtatctaattgcatcctgccttctctgtctcagaagttactgccacctactgccactgctttctgtccctcactatagacaatctctgaaagttagaattcaattaggaaggatgctacttgatgacactctgcaccccgtgtctaaggaaaggggctctctgtgccttccgtaacattaaactcagagtgtctacactggtaggctcctctcagggctcacgtttctggagaggtgaggactggatataggaaactgtcctgtgaagaacctgcctgtccttcttaacgtgatttcctgatcctcctcctcctcctcctcctcctcnnnnnnnnnnnnnnnnnnnncctcctcctcctcctcctcctcctcctcctcctcctcctcctcctcggcacaaaattccaggagcagtggcggtatgtccttcaccctgggttgaagatttgtgtttgacacctcgaggggcttctccgcagacttaggagtaagtgacgccctcttttggttccccctagtattacctgaacatttctgcgtcggatgtcaattcctaaccgagcgcttctccaccttcctaaggctgagaccctttaatatggtttctcgtgctgtagcgacccccaaccacaaaattatttttgttgctacttcataactgcaattttgccactgttatgaatcgtagtgtacattctttcggagacagaggtttgccggtggggctgcggcccacctgttgcgaaccactgtacatggggattttttatttactcacattcaagtaaataaccatgtgatttcttgttttaagaactacgttttttgaaactttttaatggagcattaaaattatgatctcaccaccctggcgcaaagcagtaattgagtgtgtcgtgatccataggtgaatggcctagaaagctgtcttagactgtttgcagtagggtatcaccattcatttagtctaaatggtatctcccaagacctctaaagtaaaaggataaatgttttgttgtgctgtgttttacaaacagattgtataccaagttccagctgtaaacacttgccagatagactagccacaatctgataactgactaataatcatcataggtaaaggtttcctatccctcttcataaaaggcgtggacattgtgcatcattttataacctctattcccagagaacgtaaatccaaaggcagcctctacagtcacgttaagcctgcattcttccccagtaacctatagctggaccactgaacatcattgaaaactggaaatttctcctttagatcttcctctcctccttcttctctacctccctcgtccactcccattgcttaggttgtaaggctcactctgcagaaaataaggcacacacagaagttcaaacagaaagtagacaaccactgtgtgagcggtcagaggcaaagtgggtcgggcagctaatcttaggctgagttcttttagtccatccaatgtggcagttttcaaacagggtcatagaagtagacttctgcacgctagtttatgttttcatcgtctagttagtgtggaacccaggcaggctaatatagttacttgcttttccatatagtccactacatagtaatatatggaaaaaaatttggaaaatagtccactacttattttccttttaaatgagaactaaacttttcctttagatgtatatcccatcccttagcaaacatgggctgtagggacaaagagaatcacaagaacctttatatttatgggatttggttgcttctccatatggtattttgaaacaaaatttagttctatacctaattagtaaaacccggtgttacttataactaaccagaaaaatctcagctgtaccatgtatggcttcagacttttatatgttttaaacacgtaagatgcaacttcaaagttaaaaattttttaaaagttttagaatcttcttcaaaaattgaacatttctgattctcttcaaacagagacagacattttaagcaaaagaaaatgtttgccctttagaaatagttccaaaaggcttaataggtgtgtcctacaatttagaccaattgcaaaatgtctaccgtttgtcttggcaggtgcattatttatattttgtttaagggagaagacccataacttttctgcattgtaacgaagtctgtcttctccagtattgggggttaagagtccagtagagattatgttatggaagcaatattgatgctaattggctaaattagttgaaatactttttaaatggtgagttaagtttcagacaatttaataacataaatttggagcaaatatgttacaggttatattgtgcccaatacgtatgtaacagggttgttgaagcttcagtggctgtgtacatagagcagcatggtcttcgggttcttctcttctgtttacattttcttctaactgaggggaactaaagatgttgacgtagtgaatgctatgagagatgaatgaagaaataagacctcagtggaagctgtcacacttggaaaaggctaaggaagttcagaaacacaaaatttgtggataacttctcataatgcagttcttaatttgagctagtcggctgctttttaatttccaaactgcctaaggcataaaaatagcattgagcaagcaatcccataaaaccatcaaagttaaatatgctacataatattggtagttttcaagctgatatctaatttgtattttcattagcaaaatgttctattttattactaaataattgttaacaattattattaatattttgttaatagtgaatgttcatattctatcaaattgaaatacttaattttaattttaataatacatgtgactatccttccagtcagcctagcccacacaccataggacataaatgaaaagctatagtaaactctacttgagcaattttattgagttttattttgttcatgtacttgcacaaatgtgaaataacgccaaatgtcacatttctatgtaaacatcttctcttccctccagttgatatttctgataaactgaggtctttacaaggaggcaattctttccaatattcaaatttcagtattcaaatttctcatacccgcagcaatacctcccccaccccacccctgtgtagagtcctgcttcgtagcagggagatgactcaggccatactgatgaatttcagacagcggcacaaaacaggctgcttatctctactgttgctgtttggtaaattcagtggagttgcgctgcgtgcatctgcctgtgagttcggtgctcccatcccaagtgtgtcagcttcaattcactattttctttaacgttgtttgctctaacgggatgccccacttcacctgggaaactcagtagctgaggaaaaaggagtccacagttatgatgtacaatttgttagtacattttcccatagttcaatattaatgttgttatccataagctatgtagtaggaagtgagacctttcttgaaacatattttctcctgtctctcctgtttaatttttctgttacgttggttgagccttatttgaaagtagatgaaagaataagagttgtctgatttatggaatggaataacgttccagtgagcacactgaatgactctcaacactgttaatactagtggaggggttgtttaaaacatggttcctctgcaggagcacttcctcatgctctgtctattctgtcctcaaaactgtgtacctggagtggaggacactaaaatggactctgagagtacacaaaggaatcaacccatagtggcgaggatataccccttaagctaacgggaacactccagaacgcaatttcctgacttcttctcgtcagcatagactccttttctggctgtaagctcttgtagggaaggaaatcttctacttcatatccaaggctcacatcaatgcttggcttttaatcgatgctcaacaaatatttgcaatgttgaacttaacataattggcttcattcgctgctggcatccccatagcaaaaacaggacaaggggaaaaaaagagagcagaataaaaaagtatgtgcaatgattgcccagtcccatttgaaatataattaaattagagacagcttacatgatgtaacacagtatttatttttaacacacaagagaattaacgtagccaatttactttattgctttaataaaaataattgaaatttaccctgacctcctgagtgctagacatgtcgatgaatccctgacttaactataccataaccaccttatgatgtacgtactattcatgacatgaaggtctataagtttattcaaggatatggaaattatcatcaaggccagtttcccaatcaatacaagaatcagttcttaatgtctagttatgacccttgatgactgtgcacacttttctttccagaaaaataattaatgaagctctcatatcagaagtgtcccttcaaggccttcctgagcaaggtgcggtttctcgttttttccctaagacgggcattctggtgtatagtttagggcctctgttataaattgagcaggtgggtgtgtgtttccttgttgcttcgggagactttcccttgcttcttaggcagagtaagctgcagtagttggagacaggtggaagactgatggataagtgagggagggagcttgtagaaaggattcacgtgtttgtttccttgtttctgtggctgcatctatgtgttgaaaaaaagtcgctatgtccattgaaatgattgatcgggtgagcattacgagccttctttaacaggggagtgtttttatccgaaaaataaataagaggagtgggcgtcacaaaggagccgtggcgggtttccacgatgcttcacaggagagagatatttctccaacacagactacagaagcacaattatgcttacaagtttatgtaatgaagtttagcaggatcggtgtgatgcggtcttgcagaccagcagaatcctggtaaatcaggagaaatctcctccttaagaccaaaagcctttcctgaggctcgtgtttaccttccttggacttgcaagtcatttgctactgcaaacttgacatacattaataatctgtggttacaacatcaacacgggaaaaaaaaaaaacaatgggtgaaaaactcactataaattatattcggtataaaagcttcccccatcaaataaatgcttctgtttggaaattttaggctacatcagggtacagtctctagagtctcttaaaatgcttctcttgtgccttaaatctgtaattaacttaacactgattatttaaaaaggtatagcaatgactaatttccaaatatatcacctcttatttgtgcctattttatccctcttgccttcagaagaaatcttggtccatcagcagacatgaggaaaatgatctcatgtgcacactacacaccccctaacataccaataagaagcacttccctttgtgcgacttgcttggcagaaatgatacatagggaccttgacaggacacggcagtgactggacaacccttttagaggagagacagaggtgctggctgttccgaagcaacctgcaattcaattcagaagctgaaatgcagaacacagttggcctggcaaagcaagcctcgctccagctgagaaggcgtgctctgagctgacctcccggtcagcctgccagccaagattaaccttccctcaagtggatccttgttagcccagcctctcccccctctgttgctcatctttcacaactggaagccaagtgtttcaaactattactcaattttgcagccaaattcctttgtttcctcccccacccccactcctcaaccccccaccccgttccatgcctcccgacacacactcaaactcacccacacttgtggtgggtagcgtcttcctaacgcctaccctgaacagggacgctaagaatttttacattaaaagactgtacatacgtttgtctcctttatttttcccccctttcaaaaccttggttagatagggcagggttgtctatttgctttgatcaaaaagccacaaaagtgtatttctactttcttgtagaaaaccactcatgatctcaagtggaaaaaatataaggaatttgctgaattttaaccttagtccataacaaagatattattttaaagttggttggttaatgtgggctgcgttaggactttcattgtgccgtgtttgggttctctcggtgttattttaatgagtttattggttcagcacacagaacacaaccacatggtgcttgaaatttttaggtaataaattttcttatgaggcatttgcttgaaggaattctgttatataatcaattgatctttaactctgtgggcatacacacacacacacacacacacacacacacacacacacacacaaaactgtcctgtttctatacagaggtagtaaagaatatttgaaatattatgaaagccaaaagggagattttgtagagagaactggattctttaatcaccctttatgaataagacaccatagaaacatctacttcacagggtttgaataacttttagaataaacttgtgccgtctagtaaagtctgagacaagaaatcttcatttttctcttcacatttcctgtcagaagaggcccctgagccaaggcagttggcaacaggcctttctcaacaattgttacactgtcaagtggcccacagaatagagctgtgtaaaagatggcgacaaaggaaataggctatgagagttgacagacccaggattctctgagtgagcagattcaaccagacaactgtccttgggctgtgtacccctttatccgtctccatcccttatttatggatggtgtcagacaaggacaagaagactgtgtcatccttacctgtgatgtcctccaccactggccttccgactatatatgcagagagaaaagtccttaggattaaaatatcaactctgtatgcaccaaaaatgaagctctaggattctaccttggtgaagcttcaggcattactctccctagagtgacgtcacatcttccaccacccttgtgtgagcagctgttattctctgggactctgtgcaacagaatacaggggagtcttcaagctcagatagcaaaaggaaatcccagttaaacccgattctcccaggatgtaagcacatagctcatttggagaactcaaaagttttagcaatacgatttaaccaacggcaatcccccttccacttacagctgctggccttccagcaaaacatccacttccccagggtcttaccactgtgagaagtgctaggtggatactggctggtcccaaatgactattacatcgtaatttgaagccctgtttgcattagttgtagaaatagctcaggacaaaaatattgggaaggaacaactcacactggtaaagatggttgagaagttaagatgacggctcttctggaggtcctgagttctaatcccagcaaccacatggtggctcacaaccatctgtaatgggatctgatgccctcttctggtgtgtctgaagacagctacaatatgtatgtatgtatgtatgtatgtatgtatgtatgtatgtattatatatatatatataatcttaaaataataataaatttaaatttttaaacaaacaatgcagagctcaaagtaacagctaactatactcatgaaaaattctataaaaaactaaaagccagaatggcaggatggctcaggcagcaaagatgcttgccacgaaggctgaccaccctaggactcacatagtggaaggagaaaactgactccgaagacatactgcacagcccctcccgcaatcaacaagtaaacagacaaacaaataaataaataaataaataataaatgttctaatttttagcttttaaattttcaattcttttaacgtttaaatttgaaattaaaaaaaaactaaagttctaaagaaaatatttgatccgcaaattataagaccaagatgtgcgcccgaggtcaaatcatgtggcacagagctaaagcatggtcaattagaatgttgtccccttctccacccaagttgattggatttaaaacgcagggatttgcttgtagaggatttgggtgacgcaaaagccatgtggaccccggggacctagaacaggaaggatattaaaagacagcaacatcatttcccatgtgacaagatctgtgtccagaagaaacaaatcatgtcccccacaatagacagctggcaaagatggacccagaacccaggtcccctcaaaagctcacaccagtttgccctttcttggcctctttgctcgaattgtccaatgaaatctgaaccctcagtcccctgggccagatgctgagtgtcatgttgttcacctcctatgatatgtgtttgtgtctaagcgtgtgcctgaattttaacatcctctgatttcagttgactgtagaagcaactaaaataacccaatgtgatgttttaaaaaaaaaatctatacaacaaaacaaaacaaaaaagccactcggatttagtctaaagagtgcatatatccaaactttgtgaacattgtagttaaatatgtttgttaggattcacagtacacttgtgaccttaacttgaccagatatttcttgtcatctgttagctttccccatcagcactgaccttggatctctgtcaggacttctcatttgatgccccagagcccactgacatgactcaagtctgtcagcagcgagtcactccaccgtgccttgtcagcgaggacctcaaacaaaggctcccgtggcccagccttctttgctcctccctttgccttttgcccaccttgatgcttggctgggtggccgggcataggctgtgatcctcactcttctgggaaatggtgagatgccttatatccagcagaaggtgccccctgttctcttggcctcctcacacctacactggattagaaactgcatttgaaaagcatctctttgctcctgcatgtcagtgcctgggccacatcaaagaggacacaacttgtggacatcacagagaaagggcactgttttctcttgggagctcaggccctgtttcctaaaccattggttctcagccttcctaatgtgacacaccttaatatggttcgttgtgtggtggtgaccccccccaaccataaaattacttttgttgctacttaactataattttgttagttatgaattgtaatgtattttgctggtggtcttaggtaacccctgtaaaagaaaaaggtcgttggacgccaaggggtcgcgacctacaggttgagaaccagtgccataaactctatacaagactttgtccatacttaaggtataaggtgccttttcttcctttgccacaaaataaatgtaaaacaaaggatggacttgctgatacaaggtctgatgaaatcttatgcagagctgggaaacaggttctttggcaggttactttgtgtctcagtcttttttctggacatcacaatatctctcttatggagttgttgtgaagactggcaaaaaaatcgttcgcacaaagcactcggcacagcacctcacaccggagcagtcattatatcagtggttctcaacctgtgggtcgcgacccccacaaatattctgtgtggatttctattataagtcataagagtaacaaaatcacagttatggagtagcaacaaaataactctggtgggagggggcgtcaccacaacatgaggcgctgtattaaagggtcgccaggcactagaaaggctgcgaaccgccgctttagatgccagatgctattttttgttgtttcggacactacagtggtcacactacattgtctcttcttttcactccctaaaatacttaggtcatttgacctgaaacttttgtatacaaatgcaattttcatgaattataatctttaaaaggggagagataatggagtccctggtaggtagagaggggcaaggaaaagaagcaagaaagggcaacttcaaatgagttggatatcgccggcatctgttagaaaagaaaatatcctttcatctcttatcctttgtatcaaacaaataaaaggctctgtgttttgagtgacgttttctatttgcacgtaggtgtacaggtgttgcaaaaagtctccaggatagttgacagctctgtgagtgttttacctcagagagtgagctgagggcagggtattgcagattcacacccgtgtggtaatgactggacgctttgcacaatcctggaccctctgccacagagacaattctgtccatccaagccagcaaaattcatccagcaggtctaaactgaaggcaggaaatcttctatcttcctacacgcaaaaggagatcttagctcccaagtagcagagggtctcgtatgtagggaggttcgttcttataatctcaaaggcgaatctaaaggaccttcagccacgcctctattgcttgctagccagaagcactgacttgagaaggcggttctgtctgcctagcttctgaaaacagcttaaattgtcacccgagcaaaggatagcagaagacagcagacgccaagcaattccaagggacacgctggaaggagagccaccaaacgaaagaatgttccccaggaggaggagtaagaagaaagtgacagccagaggaaatggtgacaaactaaactgtggtaatattcaagagcgagaagagaaacaccagagaatggaccactgagctaggacccaggcaacctccctgttatggaactgcttcactcgtggaacactgggttcttttcttcttggaatagctagacaccagtcaaaatatccatctatctatccatttatccatccctccatctgtctatctatctatccatccatccatctatccatctacctgtttacctacctctccccccaccgtgtatgtgtgtgtgtgtgtgtgtgtgtgtgtgtctgttcctgtctctttgtgtatgtgtgtacagaagagacggagatacaaagaaagactcatttatgcatgcaacaaagaaatagaaattcgcgtttaggaaaaaaaataaatgaagttgctctgtgtacaggatgctaaagcgctcggcatgctccaaggaactagaaaataacaccgtgatgcatccaacgctccaaacaaatgtagagagcagtggatcaaatgccctggtctgatgttctccacgaacgtgctaagaggaacttatatgacattctcaaagctcacaccacataataagccaataaatcagaatcttggggtgcagggtggggtaggaaggaaataccaaaatgatctttaactccaccatcagcttgtcagccaagtttgaagaccactagtctaggctggctgcagtaacccacaactgcaatcttaggtcttggcgaatggggctaaagcaaaaggatcccaagttcaagtccagcctggttctgtaatgagaactgcctcaaaaacaaaacaaaacaaaacagatagaaaagcaaaaatcaaaattaaacaagcctgcacacgtcacccaagttaccctgtgagtttgtttcagcctagaggcggtgggtactaggtttagaaagcaaagttcaatgtctcttttgtttattggtttgtttgtttgtttgttgttgtttggagacagggtttctgtgtagtcctggctgtcccggaatttactctgtggaccagcacagagagagatccaccggcctcctgcctctgctctctgcctctgcctctgcctctgcctctgcctctgcctctgcctctgcctctgcctctgcctctgcctctgcctctgcctctgcctctgcctctgcctctgcctctgcctctgcctctctgcctctgcctctctgcctctgcctctctgcctctgcctctctgcctctctgcctctgcctctctgcctctgcctctctgcctctgcctctctgcctctgcctctctgcctctgcctctctgcctctgcctctctgcctctgcctctgcctctgcctctgcctctgcctctgcctctgcctctgcctctgcctctgcctctgcctctctctctgcctctgcctctctgcctctgcctctctgcctctgcctctgcctctgcctctgcctctgcctctgcctctgcctctgcctctgcctctgcctctgcctctgcctctgcctctgcagtactagaattaaaggcataccacccagcttagtcagtcaatgaatcttttaaagggcattttccttgggaatctcaacatacaaaaacaaatgaaggcgatattgatgttatagaaacaaggggaggagtttattaggaagaaacacccctccagatctagctggcccatcaatcaactgcaggctccctagcagctggatgtccttcagctcaacttttgcgcatgtgcagtaagagacgggagcactgctctggaggactatcatttgaggagtctgtcagcctgacagttgaggggctggaagcagcgcaggagtagtcagattacagaaaacaggaggtttctgtacaggcgcgcccctcctgtttcttcagctaaaccagcagcagggtctcctctcctgcaatctgctatacttaaaatggctttatttgttttacagtttagaggcgatcccttaggtggccttgggagccccttcatttcgtcaacattaaatcaacaagctgaccttctttctcctactctctagtaggattaatggattgggacttgatttgtgcatctaggagctaaacctcttgctgagaaagctagcaggcttgactaattcccagaactgctaactccataaactctctataagcttaagattaaagataatgacttcacagtgctatatgtggctgagtgatagtcaatatacatcaaaaattatataaaagacaaactacttaataaaataacattgtagtctgtatatgaattttatgcttggaaaaagactcagttctgtatatgttaaaagggaccctcctaaaacctgcaagggagttagattagaaacttatatctatataagaatgctggcagttatattttaagcagaaaaaaaaaatttacgattagattaccataaatatgctaatagaagacacaatggtgtgaagctatgacatggtggatttctgaatgtcatttttttttctctcagaagcaaatctgctatttgagaccagatactgtctataaagaatcccctgcatgacttcatactttttaaattccaggcagtcttaaattaaattcagagaactctgaatataaagaaggaagacaaggggagaaattgcactatttccagaccatctgacaagactacgtgaaaagctccccatcaaagggtcttaagtacactttactggtgtgacaaacaacatttttatccctttattagatttattttttcttctggaaactgcagtggccagggcatggtttgtgaaagaaagctggcagggttgtgtgctttgattcttaattaacaccttcagtctcaaaagagaaccaacagaaataccgtaaaatgttacagccgcattgtgattccgctcggttggtttgttaaaagtcggctggacattggcagctgcgataaagagaaaactcaatggatgttttgtgttgtgcccactgaagtggaagaaggcaaccattttagttttcacatgggcagctgcagagggagggcttaaatggagctaagtgtaagacttactgtcaatttctagtaaataaataataaaaattaaattaaccctccagtctttgcagccacacagcagaaaggttctggaagaaaaatttaaggacaagattcttgaaacgtctcagcaactaattttgggaggaatccatcaataaggaatagcatttgtttagaatatcgaaatacgctttttgaaagaggcaaacaggccaaagctttagagactggccacttcactttaaacggtaaagatatatctttcttgtcattggtaatacaactccctcgtcccactttgctgaatcctaaaatttgttcagatgggaactgaataagattccgtaccccaacctcccttattttagagagcatggagttgaattttgccttgggtaggggaataaaggaagcatttagctctggtcagataaatctcactcacattcaaaaatgcaattaaggaaatatgtaaatctagatgtttcatcaaatgctagccaaggggttactagttctttctgagtacaatgcctgagctaaaggacttgagtgtctatataagaaccattgtccaagccacagaccctgttggaatcagagtctggcttggccgtgggaaatacctacatatttgacacaggccctatttctgagagaaacaggatggaagagaaactgtggagattttactgttatgttctagtcagccacgctctgcctaatttgctttgatcaaaaagataaactaatttctctatgggctggataaaaataattagggaggtaccgctttcatgctgcttcaaagggactaaaggggaccagaaattgtaatggtggggtctacatacatcttttcagctcatccgggagcattgttccttcaaaacaggacactgacacgtgagaggatcccagtctcaaaacagcttcatgggctgccgaacaatcggggacccaggaatctgccagactctaggacaggcaaaagtaccaaggggatttatatctggtgcccacgtcaaaggtcctgttcttccttggggacacccttacctttgtgtgaagagatacaattggttgctagtccttaaactgtattggttgttcctgctcgtcggtctgttcttcaggaaagttgctgggatggttggctccatgcctttgaaccctaagcggctgcttcgctgatcacacagatgtagccagctccaggccgtgccgttgtggttgcactaacctaaagtctgagatggagctggtgagcgaagcaggaccatgacttctcagatgctttcaccagctgcctggccgtgtctgtgccagcgtgcaagctcagcacccctgcttccgcctctcccccctcttctctgaaccccaaacacaaggagttattagataagaagaatatgggattctattctgcttcttccagagaaatctactacttagtgttctttttcttgttgatatgaccttcatgttacttccttaaccaaactgttgtactagatatggtatctgttgccctgctgtaaatttaaatgtttttttttttttttttttttttttggctgctaatctccttagataccaaagagtacatttcaggttgtggaataatatcgctaacaaaacaagtagatctttttaaaaggttggaattcactaggttgtaatgctaaattttgtttctctaaaaataaataaatacgtacagaaataaataaaatatatatatatacagaaagcattacttcagaataattccaaaggaagctataagattcaggttcaagacaactatcctacttggggtttttgtttgtttgtttgtttgtttgtttgtttgtttgtaaattatttcaatttggtgaacacttacttgtgtattcctcctttttaaagagaaatctgtagccagcaaatattttaacccctttaacattgttttacttagtactagcaatgcttgaagatgcaaataagactgtatataccttcttgccagcatccctaggtctgcagatgatggcaaccagttacggaccaaaggtcaccacaaggctgtgaagagacctttaatgttggtgacctcatgttccttcttcattcgctctttccttcactcacagaagtgataatctattctttcccatcaggtgccagatggtaggaacagaacagtgtactgtatgaattcaacgtgcagggaaaaccaaaactgagcaacgttcttaaaattgtaaggctatgaaaggattctgacggtgaactgaaggctatagaaagagaactcagccgggttccagtggtcagagaacagttcccttggggaggaatgtttaatccagagccttgagggtgaattggagagaaaggtggaaggcaagaaagtattctgagctgaggtttcctaatggagttctcatccacacctgctgtaactgcaataaccacatggaggtgaagaccattaagtgccccgaactaggaagggcttgaacagagctaaccctcagagacaggatcctccccaagacctgccctatgatcactgcaagctctgttgcacagatatatttaatgactgtgatagcaaagagctctgcagttatgatctgatctcatcaatgtgccttcttccttactgtgtggtagttttactaagcccatctcatttttttttcagtgctcctgaacacaacgataaattcatttctttgtatcaatagtctggaaggaagggtaatcatgctgcctgagcctatatacatttttttctaccttaagtagaaacacaaaacccaggaagatagaaccttacttcccactgtgagtagtggcgagatttttgacagtttctcctgtaattcaaagtaaacctttccagttttcctttgaggaggggaaacctagtcaaacctaagaatacacagatactcagcggctcaattactcagctaagatgtttgtagcaccaactatcagacaagctctagagtaggaacaagcatatagaaaaaccaagcatctagaaaaggcctctgatctttagagtttggttgttaactgagaaagataggaagataaaagtagagcacaatgtttctgaatgtgtttgtgaaatcttggaccatttgttcagtcttgagtgaagaattgcccccacaggctcatgtcgcaaatgtgtgggcctcagctgtcaatgctagttttagagctacagagctttaagaagtggggtcttgttggtgagataggtcactaggaattgggcattcccaatcctggtcccaacctgacctgtatgctgtgaactaggctgcccctcgtatgcctttgacatcgttgacacaatggactgcaaccctgtgagactgtgagctgaaatatagctttcctcccttggtatgttgggtatttcagaacaaagatgcaaaagcaagattaaaaatcggtaccggaaaagagggatcactgatgtggttaaatgtaactatgtgcctcttaggtctttaaaattggtttataaaagaggactgtggtagagtcgggagatgcagactagacaagtcctagggtgttgtaagaaggagtttaccaattagggatttagaagacgagaattctgatagaaatgtacccagtgacgacaggagtcatcggggttcagatgggaacggaactactgagaatttgaagaggtaccccttttgccctctggcaaagaatttgtctccattctacccatgtcctgaaagtttggcagcggggtttttcaagacagcctggtactcaggctgcagaacagagctgtgacacgcttttagccagctttgtagtgagaatcgggagccaagaggagagggtgtgaggcgagacgtgaaaagtactgtgtgtgggtcttcccgccacaggcatagcaagatcagacaacgctgctctgattgttagaatgattagcgccaccgaagtgatgctgccgcgctccacactgggacaataatagcaaaggtgttttgagggtgagacgtggcctgttgaagggtgcagaaatgcaggaaatcatttgaaaggacttttctggcgaaagtccacttaggagagtgaagtgacttccctgattcagacactcagaagccaccacagcggtggcccaaaggggcctggttgcatctcaagatggtggaggagccagcatcatccatatggcgctcctttggcaggtatgcagactgaaagaattacagggtggtggagtcttataccaagttttcagagaaacccctaggatgccaggaagtgtgtcggaaggtgagattccctggtacccataagagagagcaggctatgtgtacaacgttgtgtgtgtgtgtgtggggggggggaattgtttctaaacttgaacttgaaatgcttcatagaaaatgtgtattcatcaattcttgtcactgataaaaaaaaatactgctacagacaacttaaaaggaggagggatgaccctgacccatacttgagacatttccaatcaagtcagctggtgccattgttcctggaccactgttaggcaggacctgatggtgggaggacgtggtgggaaagagtgtctcatctactggcagtcaagaggaaaagaaaagggctaggaacaaggtatgtctttctaatgcatgctccagtgacctacttagcccagttagactccatctcctaccttccaccacctcccagcagcaccaacagtttacggattcatcaaggggtcaattggttgattctagttgaatcctgtcagtttctagatgctatttatctgtcaatcaagtctgtaacacatgatcctgttttatatttaaatcacagcaccctgctacctaaaaatacagaggggcatgtcttccagaaggctggatccacataagtagagacgtagaaaggatgtttctctctggggagagatttttcagatttgctgagtgaagcaaaaatgatttgaaatgaagcattccaaaatacaaatacacagagatatatgcatacacacacagacacatcatacacacacaagcacacatacaacatacacacacaaacacacacatacgtcatccatacacacacagagacacatcatacacacacaagcacacacatacatcatacatatacacaaagagagagatacatcattcacacacagacacactatacacacatacacacacatacatcacaaacatatatacacacacctcccaagaagaaaaacgctacaagtttaaaggctaatttggctaatgttaggaatgcttagtaccagtcataactgctgcttactaaagagaattttgggaggccttattcaacctgttcttcaaatcaccgggcccttcactgatctccaagattctaagactctacacttttatcttcagtagccagtagttaatcatatgttatctgcaaatgagaaaacatatccagtgcccattttagtgcaaacattgacctggattaacgaataaggaaactttacttttgcatgaatgcccaaccatattgaatgcacagatgtcgcatgcccctgaaccagtgggagaaggaagaagaatggaacagagtctcttccacacgtggcttcctgtctcagactcatccaccttcgattcttccagcttgcttccacactaacctcatttcaagccatcctttttttaaaaaaagatttatttatttattttatgcatatgagcacactgtcactatcttcagaaaacaccagaagagggcatcggatcccacttcagatggttgtgagccaccaagtgcttgctgggaattgaactcaggacctttggaagagcagtcagtgctcttaaccattgagccatcttttcagccccatttcaagccatccttatatgcttaccatttcctgctgtaaagtagagttgatttcctgagcagtactctggagtccataggctaccttttctagaccagtggttctcagccttcctaatgctctgaccctctaatacagttcctcctgttgtggtgaccccaatcataaaattatcacgacttcataattataattttgatattattatgaattgtaatgtacatatgtgatgtgcaggatatttggtatccgacccctgaaggggtcgtgacccacaggttaacactggtctagaccccagggcttccaatgacctctgaccctaccctccctcttctctcatgtctcagaagtgacatgccctgtctcttttcaaatcttatcttaaatttgtcattcttttccccttcagtctctgggactcatagcttattccttgtacaaacttctactgagcatgtgccacacaagttgccgtgggagaacacaaacaaagaaatagctaaccgtctgtttgtagaagtttgaaacaaaaaaggttggtgatgtcccaacgggattaaactcggtaacctgccatgatgctttcaaggacgatatctcttatgtccctttagttccttgttgtcacctattcgccataatgtctcagtgccaagcatagcacctgtcatacgcacggatcatattagtgtctataaatggaccggcagagccctccgttcaaaaaacaatgaatgctccgtgctctgctctgcaaggtgctcaaacctttccccccttttcttcttcctctctctgccaacgttcttcagaaggaagctagattcaaagccccggcttcattacctctccctcactcttccatcccctctgagaccagcctgccgttcccttctgtcattcaactgaaatccttaaatttaggccacctgtggtttcccatcaccaaaccctgagcagagtgggttgaaggttctggctccagacagtacacattttcgaaggtgtcaggtctggctgggtatggccacagtccaaaagttcgacttccttatctgtaaaatggggttaataaagtctgtcatttgtgtctggcacacgactggtctgcctcccaattcctctctttgatcccctctctttttcagatgctctgctctgctgccaaatgaggttacatcccttacacggggactagacacagaaaatgtctagacctccacagtcagctcagggcatgcgcaactgcagctcagcagggacagtcagctccgggcatgcgcaactgctgctcagcagacactttggaacctgagagtctgacagccccatgttccttggtccctaattagctgtcatataactagctaggggtactcatgagtcccaccactaatgtcaaatattgtcttttgaacccctaaaattttctccttgctctttcctgtcccactgatttgacctttacccattggctagttgtgtcttcctctggccagtcttgaccatgccgtcgtaccttcttaaagatatgccatgcctaaacctggttcgtgtgtcaaacccagcatctttatccaggcctgcacagcacttcatcaaaacactccaagtaatattagatgtcccatctgctaaccagtctgcaaacaatctcttgccaaagcagctgagcctatagggggtttgtgctttaaagatactaactgtatcttagatgaatttatatatgttaaccttaaatgagcaaaaacaaaaaaaaaaaatctcaactcttagttggttgcagtacatttagtcatttgacaggtgaagggactgtccatccatttaaatatttcactccagtccactggttcataatggcagccaaaagtccaggttcactgaagtatgtttatcgtcctactcctgggtaccacccacagtgaatttgatttggaaaaaagaccttagcacatgttcttggatgatgacacaggtgcccagggttgcagactgtacactcttgttgttgttgttgtttaacaacatataaattgttaggtttttatattacattagctctttggtgacttaacagacgtatttaatgcattctctttactctttccctcctttcttgtctcttctcacacttcctatctactatccacatacctgttcctttcttagattcatgacttttggcttaatttcaccagggccatctgtgtggccattggatcaggattgtccactggagcctggcggactccctagtgggcacacaattgaaggcaatgcctcccctttttgctgaatctatggtcaaaaaatagtttggcagtgagagatggtgaccctgagccctccatctttgcttggctgttggcgagcccctttgtgcaagcctttgaattgtgcaggatgcaaacaggcatctgaggaagcccagagtagattctgatggtcccttttctcatctaggcttcagtgtcagaaacatatgggtcagaggatgccagactgacacaattatgagtctagagtagacaggatgggagtaagctctgagtccatataattaaagtgaattttaacaggctaggggccaggaggacatttctgttgtttgaacaagtacgtccactgtcttgattgattcatttatgcagctttaaattttaaaattctgggaattttatttttaatttttgcttgatttcttttatgtttgaatcatgaatgttgggggtgtagctcaattggtggcatgcttgattaacatgtacaaagccctgagttctaccccagcaccacatacactctgaaaaatactctggaaggagaaagagaacaattggaacttctcttaatcccacaggacctaagcctggaatctatgacatccagtcttgaagaagaggaggaagaagaagaggaggaggaggacgaggggaggggggagattaaaaagaaacctttcctggaaacaggtttagatgtggagatttgagaacaggaaaaaaaatctcctatatagaaagattagtatggaggcagggttgggaaggcgatgccagcgaactgagatgaagtcatatgcatgcagtcccacagggagttctgaggtttgggtggccctcacaagtgtccctccatagtctcagtctcatagtgactgtgagtccctctctctccttcccagagtttgaccttgaacaaggggactacagccaccaggaaagtcagtttctgagtcctagctatggaatgagaaatctagccctgaaaggaggcagctggccagcagagcagagcatctcctacctctggtctacaggagggagaggacaggcatcaggaatcacacctcacagggagccagtgcaactcagaaaaaaaaccctgctctgccacttgccttcagtaagagcctgagctgtctcacagtttaatctgcctcccccactttctatttcagaaggatccttaaccttcatagctagtacttctccatcagcatcacatatacatttgcgcatctttagtttcacaaaggttgggaatgttcagtggcttccttcctctactttaaaaagaacgtgctgtatcccaggattcttcattaggtcacagtatgtagcctcagaacgctactacagcggctcaccccccatctcccattcagccatgtaaacttcctctcttcttccatttatagtctctttgtccaccaggtagggccctgtgacttaacacctggaaaagcacgccttttaattcctctattagaaacttccttcggaacaccctcttcaggtaacacacactgattaactggaaatgggaaagcaaacagtctctggtaatccacagtggtgaggttatcaaatggccacttcctaacaccttttggagaatctaaataaaaataactcggggagcctggtggcagcggggatattttgttgatcttcacctatgaagtcttaagaagcaggagtctgcacctgtcccatactcctttgcattgcgcaatgtctagcacgcggttagaactcaattgaatgagataattttttaaccagcactgcacctgggaaggctggcaggctgccaccaatgagaagactgttgtttttcggtgagttctgtgcctttatgtagaagtagaaagtcatgaattacagcatccagacagactgctatgaggattagccattgaatagaacagttttttttttcctgtttgtgttttttttaatgaggataaaatataccagtataatcctactttacgatctcagccagagaatggaaggagccaggaggactaagcaactatgttacttctgtatcatcgaccctgaaagggcttaacattcctccgttccattttagcaaagagaactccattctttcgttaaatggagttcaaaaacattttgctaaacttgcaatcatttctgactgctggtaaatattggctggcacagaactgacgatgttttgtggagtaaagtcaccccgtgttgacactgttaaacccgataaggaatgagatggagaaatgggtggtaaatgtggcagattaaacttgaaaaaccataaacttgtttagagattaaggaggtaaaggaaaaagacatccaccctctcatctatgagtctttgtgagcactccattttgcagttgggggtctctgcaaaaacaagagaataaattctacatttgatttatacttccctgtctgtcttgagattttgtgagttgaacctaagagagaaatctggcacgttataatgaagtggaaggttgagacgctctcccttggtttccaaggtctggctgtcattctcaggtattccaaatttaaagaaactagagttcggaacataactttggctctttcaagagctatttatttaatgaaacgagtaccattctatccttggaagtaaaatgattgcagctggctttgaagttgatcttaagtgataatgagggttaccaaggtatttatttgaggtagggtctgaatacttggaggatgatgaaggccaaaacgaaaataatgtgtatctatctttgaaaaatggaaatagctcccatttatgatgtgccagacttcacatatgttaacttatttatttctaacttcaaaccagtgaggtttgcttcaagtccataaataacgaaatcagagagttgaggaattttccaggattgcaaacataatgaacagtgaggcagtaactgactagagagctgtctgacgctgaagccggtgcctttcccaagactccatgaagactttccaaatgtcaacttggccttaatagtagctgtgatgaccatttttaactgtcttttggaaatttcttgaagttatgttaaatgtggtaagggcaattgtacatttgagaaagtcttgttcaatattatactggtgagtacattttacaataacttttacatgaagaactgggagaataataaatgttacaggactcagtcctaaagatatggacttgcttgctcttgattgcccatttgtgtgtgtgtgtgtgtgtgtgtgtgtgtgtgttcacgtcacagcaggagcatgtacaaacacccagaagcagctagctgacaacattgactgtcattcctcaggcaccgtaaaccttgtatttagagacagggatctctcagtggtctgaacctcaccatgtaggctagtctagctgaccaatgagctccaggaattctcttttgtccaccttgctgccccagcaatggcaaatataagccaccacctttggctttttacatgggtcctgacagtaaaactcgagtccccaagcttacaaagcaagcatttcaccaactgaaccatccaaaccctccttgccactctgtgatgtaacgtttaaaacctgcatcagagatggctgcttagcatctcatccatctctctgattatcataaccttcctgtagaagtcaaggagatcccgtccatctgtccagtgctgtttattagctgcatgccgttcagggataattagtgacttccagaaatatcttaaaattatatttttatgatatgattaaagctggtatgtcaattgatgacagtttagcaggtcacgtgacaatgccatgaacagttatttcagttgccagaatcctaaatattgtacccagaaactactttttctttcatgagaattatgtatctcatcctctagtaaggtctcctaaatggatgtcttttaacttcctgaggcaccaaagcttcgtgttgtcaatgtaaaaatctgcatccaagatttctcagagcttaacctgaaatcttatgagttctcaaaggatttctgtgaacttgacccggatgcttttaaacatagaacaaagagcattaggtaatattgatatatgattgactaaaccccaggggagagttttaaacggatcattaaatgtttctgatgcttttatcttcatctattttaatttgtttctgatttggttgacagaaactgtgctgtaaataaagaggaaaaacctagtagacaagacaatgcccagacaggtgcacgtccttgagcaaaaccactgaagccctcagaaaactaaagtaagacatgtgtgtaaaacagtgacaattgcccagttgagcagtccaccaaaggcttcattctgaactgattctatctggcagagaagaaaagaaactgtaaaatgtggaagagtaggatctgagtaattgactaaagaatgtctccactctaggctttgtagaaaaaaaaaaaaaagttgtctggcacaccgttacagagttgaaataactgcctgtgaagactatggagaaatggctccaaacccaagtgacggctgacgtctctgtcttgcctgagcctcctaatgaaggcattagctaaactctgaaagttttcagtggtcctactcaaagattaatggaagagccatttgcagagacaatttctaagatttaccgatggttgacaatgcaacataagcgatcagggtcagccttatgctgttgaaagagtcttaaggggaaaaaccctcccactgtaaaagatgctggtagtatccctgcgatggccttgaggtgtgaagtgtgaggtatgtgtgtgtgtggggggggggggggtgaatcctatcttttctcttatttatttatttatttatttatagctctttctttgaggagttccacaaacacaaggctcaaaaccagagccttcttttaaaatacctctctgctgagactatacttacatgatgtgatttgtcagttagggctacataaactcttgccagacaattgtacacaaacaggataattttgttcagttccttgctgttactatgggaattgtcatagccccccaatattgaaactataatgtaacattgtccaaatcctcaggagtcaatgcttttttttttaaggtgcttggatttttttcagcttggatattttagtctggtgttaatttttgtagattagcatataattttagatttctataataccattgcccatatatgtgttattaatcatgtttttgtttgatgagatttttttttgtcagtttcttcattattttggttggtgtagtgctagaaattgaactgaggctcaagcccagggtagctacgttctccaccattgagctacatcccaatcctatgaatcagattttagtgaacacttagtgaaattcccagtttcattcttctgtgcattgagtcattggggcttggggggaggggacggggggggggggnnnnnnnnnnnnnnnnnnnnnnnnnnnnnnnnngggggggggacgtgagcatagtttgctcagcctaaaaagtatcaaattcctggaaataatatcaaactgtatcttcctagagcaaaagtctgaatgcagttttaaaatgtatccagttgttaaaattgttaatgttgttaaaattgctcccatctcatcctttgtcctcaccttgcatctccctatgtaatctggaggtgacttcatgagcagggtgcctgtgcctcccttgatcccaaagaggtgtgagttgagtcagggtgtgttgggcgggcctgtcattccccattgccctgtcactgccatggaccccataggaattacagggttctagaaccctagccttgatggcccatttccctgggctactgacagtgatctgacaggaggcgacagtggtacaaagaagccaagaggaggcaggagacaggagcagcgaaactgagcgaaaccaatgaagtgaaagctgagaggataaacacatgaaggcttagagccgcttctcagcccatgcctgcctgtcagccactcctcccccaaaccttagaagaaatgcccccccccccccagctgccgtggtaaccattaaagacccagtgccacacaggaaggcagggtttttgcaaggcaccacaagtccgggcacatccatccgccttttcctgctcctcctttcttacctggatgattggcaacactccctgtgggtggcctgtcctccagttcaacctccaggctgccacaccaaggctgaattgaagttaaaagcttcactgactctctattgtacccacaatggcagcagtatccgctgagatcttagtactgggtcgtaaaatatgaaacgtcccattgcagtaccgttccaactccctgtaagcccttccggcttcatcgatgagaaagtttccatgagataaatttgaccttcaactcctctctcagacccaccggcatctcttattacagggagaaccagcttcaggcttagcttgacttgccgtatctaactggaaatctgagaagagcttacttaagttgcttggtatccactgtagatatccagttccccctctgcttatgacagataatattggtttttcgttcatcggtaataatagaagtttcccatttcatttaacctctccgggtactttgaattattctctatctatatatcatgacgtgctgttcggattttattgctgtgcgagagacaacttaagagatgaaagattcattttggaccacagatacagagatttcagcacttgggtctgttgattctgggaggtggagtatcatggtgaagaatccatgatagagcagatccaatgtagaaaacaggctcagagggagctggagaacaaggtctttctttccatagcatcctccaatggtatgcttcctccaactaggccacccaacctagttatctaccatcttccagtgatgtcatcgtattataaacccatcaggagattaatctattaatgaaggcagagagcatggtcaaatcattacaatgatcacatttagcagctggagagtagaccttcaacacatgagcctttggggtcattttatttctcaacaattgtgtgtgtgtgtgtgtgtgtgtgtctgtgtacatgcatatgggtaagtacacattgcacatgtatatgcacatatacatgtgcaatgtgtatgtgtgcttacccaccttgcattgagcccagagccttggccctgctaagcaagcattctgtcaaggaactgcattcgtacactaagacatgattttgccatgtagcccaggctagccttctactaccaattctcctgtatccacttcccatgtactctgactgcaggtgtgggccacaaacgaatttttaacataaaataatccaacactactcttctacagcaaaataagaattgaaggtcactaagcaacttcttacatagtttataaatccccatgcaatcttatccccaccccagtctacaaatcaacttaactccatgtgctggggtgcccagcatacactgcccaccccccagtggatggattagatgttctccctgctgccaagctgcctctcatgctggtatccacctaagccatttctcatcatcctctaagatccagcacaagaacaaagatcctcaacaaagccagtctgtcccataagttgaccagtcctacccaggctgcccatacttgaaggaggggcctcaccaccgagtttacacagcaccttggctatatctttcctctagcccttatctcttctgtcacttctaaattacatttctcctgctattctgttaactctacaaggaccagaaatgtgttcagatccctgacacacttgcctggcctgtaatattcagtaaatggtaggttgatggggtttttttgttttattttggggttgttgttgttgttgttgttgttttgtaaataaggaaggcacatagtcagagatgccaaagcaccaaaatgtagcattagtataatacatgattttaaaataatacaatgtcccttaagtgctaaaaagtgagaacagatcaagtatccacaagttgatgaatcggtgtctgcagtgtagcataaccatgcaatagcatgctattctgcaacaaaaaggaattaaactgatccagcattaatgaacagtatataaggctctacttacacagggtgtagagaacagacaaatgtatggatcaggagctagattccttcctaagattagggttggggtgggaaagtattggttaatgatagagtgagctccaggttttattttggggtgaagattttggaatggtaggtttttatgctgatcaaacaactctttacctgtggaaatcccaatgacttttacaccttaaatagatgtactagtcaggtctgaacgtggcctctcagtaaaaccttttctattaaagagtgaaggctctaagcaatattgcttggttttgaattctccataacttactagttagtgatcatgtataaggtaattttattgtgactcagtttacctcttgtagaaaagagatgaggctagtcccaacataaaggaatattagggaaactgactatgactagctagtgaaatagtagcactcaagaaattttagctgccactaatagtaaaagattatgagtgtattctgcactgggaagatatgcccctatctgaatatacttgtaatattgtgtcagcgttcttccaaaactggtggcatgctaaatattctggcacacacatgcagtctcaccactcaggaggcaaagacttgtgtttaaatccaacctgacctacaaagcaaggccctgtctcaaaaaagtaaaggaacgaaaatggtaatctaccttgtagcttatataacattcttggctacaaactatcgcatgcatactgaatataccacgtcatcaagtgcatatgtacatacaatgtatacacagctagcatgatgccatggatcctcagcaccaactcatgggcacattatcttaactctatctcaacacaattatccagaagtagtgttagcaccattttacagaaattaagtcattcaagtttccctgttcaatgcatgtcagaaccgagaccatctgattccccaagtcagttccctcttccgtatactgggctgtctctggacaagcatgcccacacacacacacacacacacatgctcaacaaatacagtgactcctcccccctccacccccagagaactacctgaggctatgaccagctctataattcttcccttattaaaacacatttcccatatcctgggggggggggggctgtcttgtcggagagcctacaataagaaatattcttttgaaatggaaaacaggcagagcctttgtctgaaggacgctattaaacaaacacaactgagaaaggataatcacgggaggtctgtaccacaatgtgtgatccttgtttttcaacacgagcattataacattgtttaaaaactactggctaaaggagagcatagagcatctgacttcaatcatttcagccagtaggggaaaaaaaattactgtgcacatagcacgtgcacaccacagcaggacctgattatgggaagcgtattttatgacaatgcaaaaggcatccatttctgagtagccgagttcacctggagcacctgggtgcaaacttcacaacttccgatgaaagtctctcatgagtatctcagcacacagctgacccggcatatccaaaataatccataaatggatactatcatagtttagcccttaattcccactaaagatcccctctcaaagagattataatctggtttgagggatggaatattttaaacagtgacttttttttaatggtctcttgtcttcccagtatttatcataaatctgacccatgtaaagttctcaataactttaataactttaataactttatgtggttaagtgaacaagtggatgggcgagtgagatcattttgaagtcatgtaacatgtttatgctttccaacactagaaagacatttgttgttaatgttctgagtggggagggaatagactttcaatgaattagcatagcaatctgaattttcagatagagtctggaaaatgaatgttttttttcattaatccctcctctcctttctgattaattaacattagtatgttgttaagatttagttttaaaaagaaatggccagggttgataagatggatcagcaggtaaaggcacctaccaacagcctgcctgtctgaattcgatcccaggaccttcctgagtagaaaagaacaaactcatgcaagttgtcttttgaccttcacataaagctgtgggatgtgtgtgtgtgtgtgtgtgtgtgtgtgtgtgtatgcacacatatgtgcacactcatatgcacaaaatagatgtaatttttttaaaggaaaaatgtggagtgatacctcaaatcatagttaatttcaaaatccgattatgatgcttacctgagtaaataatcttattgttatctatgagataaatgaattataaagcagttgtctgtatacctttagaccctaaggtaatacactctatactcatgtgcaaccactaaaaggtgaaagtcggtttgctgacatgcagtacagtatgcagaccttccttattcagaggcagcttcataaaacaactcagacaggagataaaactctgagtgcccagtgataccacccaaatcccacacactgagatctcttcaggagttctaggctcactttcttatttgatctcctttgcccatcatcctaataaattcaaccatttggcttccgtatctctatgtatacggatatagatgcatgtagaatcgacaccgcaataaagatcaaatacaaattttttttaaaaatcttttacttttctctcatatccagcaacaacccaaccaatagcagcagagaaagaatttcaaataaccaccaaacatcacacaaaactacccaagaatatggaacaaagagccctgcagatatcattggtcattctgaatggtccagagcaggtagtgatgtctatatgatgatgaccatgaatgagaaagagaatttcaaattctttttttttttcagatagtaaatactagcaaaaaatttaaaagtatataaatgtgatttttgtttgtttgtttgtttgtttgtttcgagacagggtttctctgtataaccctggctgttctggaactcactctgtagaccaggctggcctctaactcagaaattcgtctgcctctgcctcccaagtgctgggactaaaggtgtgcaccaccacgctgaaaatatttagacattttgaaaggtaagcatcaatttgggtaggaaatctatacctacagatggacatctgtcttaagcccagtgagtgaattacataattatttgccttggcagttaaggtttatcaatggacagtcagttcattttgaaaaatcttttaaaatattatcattaattaacaataatacaaagaaacatattgatatactctagagtatgccttgcctgtgtgcaacttctcagaaaaaaaaaaaaaaaggaaaacttaatttacttaactctaagttatagaggtttctttcctcccagaggaaaaaatataataagaaatataaacgacatgacaacttatctccagcatcagttctcaacctttctaacactgggaccttttttcatgttgtaatgaccccaaccataaagtcattttcattgctacttcataactgtaattttgctactgttgtgaatcataatgtaaatctctgatatgtagaatggcctgtgtgaagggtggttagccaaccctctcccccaaggggtcgggacccacaggttgagaaccattggtctaccagaactgggctaatttaaaaaaaaaaaaaagatttgtataatgctttttcttggaaagtaaggaaacgtttatctcagcacagaattgcttaaaatcttgaaccttggtcaaaggagactgaattgcctctggagtattcagaggcagaaggcactcttggtgcctcaaagcagagatggacagtcttaggagacagtgttggggatccccttcaaatttgtctgcatcagcattctgagctttgactactcgaccttgcaagaacggctcaagacgtttcttacagctagtatctccataagagtgcatctagaaagattgctcgaccacaaaagtgaaggatgtatgaagaactgtttcctttgaagcccgtgtgtctaattcaaagctagtgtaacaatttgtacaaaaaatggccccaaaatttccaaaatgttcaccatcaagaaagagaaccacctaaaatatatgcacaatctccacaatctccaaaatcaaaacatccttttattgagagagagagagagagagagagagagagagagagagagagaggaaaagctgctaaagtatttacttagtccaaagatgatgtcatctccctacttaatgtcccagaggggctctaagactctccaggagaccttgggcactacaccatgacttggaagaccatcttgagctctgactcttgaagttttgggggcctcaccatgggtcgtgttgcaacaaaagcctttccactcagctacgccaaccgatctgcagtttctggaaggcagcctgctctcgtatgcttcagtgcccttgggcgtgctgttcttctcacagaagtgcctttcccattatggccctccctttatcctagccaagacatctccagactcggctcaagggccggtgcctctcagaacacttaatgttagggaagtggtgattaattgtttgatacaagtggaaaggaggttgttatcaagtttgatggaagaagtgattcatccccaaccagctgagacctgtgagaggttttacgagatgtttcacggggtgatggacactgcgggaataaggacttctcagcagcattatctgatgtagaaaatgaagacctttatgctgtatagctgctggacattttacttcctaaaatattcagactctgatggctggtgtggagattctgacaagatagaactcgccattgagttacaggacgatatccagggtttctgtaattaggaaggctgtactctttaaatattttttaatgttattgttattatgtatgtttgtgcgtgatgtggtaggtacgtatgccatggcagtcatacaaaggtcaggagatggttttatggaattggttctctctgcctttacgtgggttctggggatcgaattcagttaggatgatgagatcgttctgggtgaattctttaacttttcccccaagttgtgtccactatgtaattcaaccctgacctaagaacagtccagctacatagagcagtggttctcaacctgtgggtcaggacccatgggtaggggtggcattaagaccatcagaaaacacagacgtttacgttacaattaataacggtagcaaaattaaactgtaaagtagcaatgaaaacaattttgtggtttgtgacccccaaaccatgaggatttatattaaagggtcgtgacattaaaaaagctgagaaccctgacagaagtggatgctcacagtcatctattggatggaacacaggacccccaatgaaggggctagagaaagtacccaaggagctgaaggggtctgcaaccctatatgaggaacaacaataggaactaaccagtaccccctccccccagaacttgtgtctctagttccataggtagtagaggatggcctagttggccatcaatgggaggagaggcccttggtcttgtgaagattatatgtcctagtacaggggaatgccagggccaggaagtgggagagggtgggttgggaagcaggacgggggaaaaggtataggggactttggagaggaaactaggaaaggggatagcatttgaaatgtaaatgaagaaaatatctaataaaaaaataacatttaaaaaaaagaaagaaagaaaagctgagaaccaccgccatagaagtacactgcatgcttttaaatagtttcccaaagtaatggtacttcactgaagaaattatggtcaagagtagtagcactggcattgaccatgaaaacatcaatagaacgatggcttcttcttggcctcaggcagaaagagcctgagttaagtacctagagcaggtggatcgctaacaacatcttgattcaccatcacaagtcaggacaggagagagggcacagaaccagcggcagtatagtcaaagggactagttagttgttgacatgtagatgagacctcccagccaaggcttgagtttgcagagtgatttgggaaaggaaattctgttggaaattgaagtccctaagtataaataggaacaaaattgtggaataaatgcactgcggctatttttaatcaagctggcgtggattgagaaaagaaaacattattcctaaaacaagaagatatttgaatgactgggcttgtggttccagcttaagaaatatatcatggaaaaagaaaatagcagatgtgtctcaactggcagggggaagaaaaaaaaaaaaaactaagagcataacccaacaaaaacaaagagaatgggggaaagaaattagaagggacaggatgtgttaacaaatttgtaaagtgtctcagcagagaaaatggcctggagtgagtcaacaaatagcccaatgcctgctgagaaaccctgggaaaggttctttctagggccagggtaccactgaaatcaggaagactgtcggaaatgagcagatggagttatcctttagttcacacagccagacaaccatctcttcactagccacataccccacacaagcagtaaccctgggaggagactgggaatttagacactgggaagagtgacccctacagacatgggcaaaggggcaaaaaatggatggctgcctcctgtcagtgagaatcaaaggaagaagggtgatgctgaggctttgatttttggctttgattttttattataaggcttataattagtttgaatgatgtatttatcagtttatatatatacaatcacatgtactataatatatatcatattttaatgtataatgattgatatatatgtgtgtatatatatgcatgtatgtgtatgtatatgtgtgtgtgtatatatatatatttgtgccactttgagctaaagtaaaattttaatttataaaataaaaagttggtgagatagcttagtgggaaaaggaacttgaaatataggtttgatgacctgggttcaataccatgaccccagaagatggtaggagagaaaggactcccaagacagttatctctgacctctaccagcctactggggtaccagtgcacatatgtgcaaacacatccctcacacacacacacttaatttttaaaacaagaaataacgaaagtttcatattattagatcccacatttagaaattgagagtgatatattaatagataacaatcttatcatccttgataaatactccactaactgccctgggactgccacagacagccacagagctgtgtgcaccccaactctaaggcagctggagttgacaagcacacagagctgtgtgcaccccaactctaaggcagctggagttgacaagcacacaggcgtgaatggtgcattttcatctgttataagctttgtgaatctgacttctcatggtgcggtccactccttgtcatcttggatgtttcagcttaagactgagtatgcattatggacgttggtccttcagttaaatttgctctaaagagatgggtgctcccttcttcccccactcccatcttctcttagctaaccattaattacccagttgaagtagctcacattgacattttaagttctgattatatagctagccaggctttcggaagaaagtttaagtattgtaattttcattgtcttaagcctggcaattcattgaactgataataatcagcctttggatttttgttgttgttgtagttgttgttgttagatgtgccagcgttttcccagtttggaggacaactgtcggcataaaagtgaacatttcgtagcagatgtgaaaagggaggcgagcgtctttggacagcaatgcttttagcaagcaagccaagccattggtagatggcatgaaatctcacatgcctctctaacgaaccactcatttgatcctttcactgtgtatgtgagttttagaaatctctcttctctagctgttgaatctgctccctctactggaatctaagttaaacaaaatagaaaggtagctttccaaagtcaaataaggagacttgatcagattgaaatgaggaggagagataggcttggaagttattcccacagcactcctgaaaagagccatggtggcaagagaaagctttacctcaaagggggtgccctttgaattaacaacagtatccaggggttagttcaactcaaaggacagaaaggtttgacttgagtgtttgggcagttgaatataactcaaggcttatcttggagcagttagttctcttgttccctgtttggggaaaacacttaccttcctttacaggctgacatattactcaacagcagaactaaggctggactccacatcttgttggtttaaaatactgccatgtttttatatcttctgtattcactgggaaagtcacacaaagattagtcagcaaactttattatgcccctttgtatcagctattcattattatcttttttggttaaacaggtcagcgtgtacagcaaacacaaaacctgtcttttagccaatacatgagtggagtgcagggcagcgtcagtattctcaaacgtgtccactgcattatccatcaaaactcaaaaccagggtgattcaaaatatgctttcctagaaataagaaagggaaagaataagaaaggagaccacagcatccatctgaccatctatctatcactcaagagtgcttactgagcatcagctagaagccacgctaagaaggtggtggtttgataccaccatcacactcccctggtgtttaagaaagaaatacaggaagtaaaggacagtgtgtccgcaaactattatacatgaaaagaatcagggagaaggtgcgaagagaaccagaggcaggcaacagaacctagaacaatgaaagacaaagaaaacccattttagactggaaagcaaaggacttatcttggataatgaaatttatgaaaggagatgtcttgctcactgctctatgactatgaagagacaccatgaccaaggcaactcctgtaaaaagaaagcaattagttggggctggcttacagtttcagaaagttagtccattgtcatcatagcaagcaccatagctgagatctacaatctgatccaaaggcagagaaagagagagattataggcttggcaggaacttttgaaacctcaagtcacacacacacacacacacacacacacacacacacacacacacacacaccgcccccagggatacatttcctccaacaaggccacaccccctaatcctttcaaatagttccagtggtgaccaagcttccaaatctacaagcctgtagggcctattcttactcaaaccaccaagaagaggactgacaactgccagggagggtacgattaggtgagcactaggaatggaggggaatgttagcaagagccccgagcaaggaaaggacttgaaacttaggagctgtgtggtgctgggcattgtcttagtcagagtttctattcttgcacaaacatcatgaccaagaagcaagttggggaggacagggtttattcagcttacacttccacattgctgttcatcaccaaaggaagtcaggactggaactcaagcaggtcaggaagcaggagctgatgcagaggccatggagggatatttcttactggcttacttcccctggtttgcttatcttgatttcttatagaacccaagactaccagcccagggatggcatcacccacagtgggccctcccacccttgatcactaattgagaaaatccttacagctggatctcatggaggcatttcctcaggggaggctcctttctctgtgatgactctagcttgtgtcaagttgacacacagcacacagtccagggatcacctgnnnnnnnnnnnnnnnnnnnnnnnnnnnnnnnnnnnnnnnnnnnnnnnnnnnnnnnnnnnnnnnnnnnnnnnnnnnnnnnnnnnnnnnnnnnnnnnnnnnnnnnnnnnnnnnnnnnnnnnnnnnnnnnnnnnnnnnnnnnnnnnnnnnnccttgaggaaatgcctccatgagatccagctgtaaggattttctcagttagtgatcaaggctgggagggcccattgtgggtggtgccatccctgagctggtagtcttggcttctacaagaagtcgaactgagcgagccaggggaagcaagccagtaagcagcaccctccacggcctctgcatcagctcctgcttcctgacttgcctgagttccagtcctgacttcctttgacgatgaacagcaatgtggcagtgtaagctgaataaaccgtttcctccccaacttgctttttagtcatgatgttttgtgcaggagtaaaaccctgactaagacagacaccctggtctcattctcaaatatgttctccatttgcctctcatcataaaatagatagatttcagcacccaggccccaatggaaaccctaggaggtagtagggtgatgtggatcaaatctactttttaaaaacctcttttattcgtgtgcgtgtgtaaagttacacaaacaatcccagaatacatccctattgattttaagattggatccctctccccttagaagctctactcacatcatatgcacctgtatacacgccagctgccactctgctgatacaagaaccacattatatttataacagggatcaggaattcataattattctacgtctgttccctcttctgcttagcaatccctaccattggggcacattcagtcagcatgaaaaccacatatcccaagatcctatcccaacaaatgtgctaggtgattaagttttggacaagagactagagttagggggtcctatgtaacttcatgttctctaagtatagaacatcttgccttgcacttcttgcttgttgagtagaaaacgtcaacaaatgatgtaatctcgcagataatagcgaagcaacacagaaacctgaagctccccagaggtcctcattcacagcaaagcagactgactaggccactcaacagaacacttttgtaaatatgggactaacacgtgaaagaaaaacaaactgtcgtctttaagctactatatcttggggtattttgggtacaaaaacttaatctgacgaacactctttctaaatttttgtgctataattcttttcagagttgtgggtcgaatctaggtgagagcacttgctagtcagggggtccactttttataataaggataaattaagagtcttcacaggtgtttcatcccattggcctagaaggaccccatcatcatagcttgtggcctgtgagatatttcagcaccttggttattattcaggatagaaaaagcaatgagaatttctgtctgaatgaaagaaaataggtttttcaatggtgttcctagggatgtcttttctgttcaaatactatagttgttaggtataacctcgagcctagaattacctaacagagactcaatggtacagcctcagagtcactcccgggattatgtatacatcatatctttatagccttatcgatatctttatggccttctgcgctgcttcttattttatattttcattatctaattgtaaagtgatgagattatcttctgagaggatttatggtgcaaaggagatatagtgaggagcctctatatccactcttttgcagaagaagaaacaatttggaaacttgctttttttttttttttaacttgcaaaaggcaaaattaatagctcaccatgtgtgattcgtttctgctagttcagtaattcttaaccaatgatgactccgcccctggggacactttcttggcagtgtcccctgtcgttcttccagggcactataacaaagcgccctaggctgggtgatttatgaaacaagttgactgcatcagacttctggaagctggttgttccagatccagagtccatatagccgcttccttctgaagacctgtgcttccattgttaacacaaccctcttctgcagcgtctatgccaagttttcccacctatgacaaatgaaatgtataatgaggctagagcccagtaacttcattttaaccaaattctgcttttaagatcctgactccaattacagtcatgttctgagttactcagagctagaatttcaatatgcaaatgttaagtggcacactacccccacaaacaatgagaaaaaaaatatgctggtttttcacaactgtaaagggagccactgatatctagagccaataatattgttaagtactttacaatgcaaaagacacccagctcacaacaaagaaactcacagattaaaatctcagtaatatcaaaagtagcataaaggttgaaaatcctttcctagttccaaaatcatttacttgatcatttttctaagcagaaggaaaacacatattatacctaaactgagcaatagaatatgaatctttgtcaggactcaaccatttttcaagtaccatacagacaagctattttcaacaataagtttcagagatgactcttaggaatataacaccaaccatgtcctggcattacttcacccctaaagtccagttggctataattcataaacataatacaagtactttatatgccttaaatgtctgggcaaataaatcataagaaaaagaagcatagcttgtagtattaattcatagattctccaggggataaaatatttttttttgttttgttttgtttttttttccattttttattaggtatttaactcatttacatttccaatgctataccaaaagtcccccatatccacccaccccccactcccctgcccacccactccccctttttggccctggtgttcccctgtactggggcatataaagtttgcaagtccaatgggcctctctttccagtgatggctgactaggccatcttttgatatatatgcagctagagtcaagagctccggggtactggttagttcataatgttgttccacctatagggttgcagatccctttagctccttggctactttctctagctcctccattgggagccctatgatccatccattagctgactgtgagcatccacttctgtgtttgctaggccccggcatagtctcacaagagatagctacatctgggtcctttcaataaaatcttgctagtgtatgcaatggtgtcagcatttggatgctgattatggggtggatccctggatatggcagtctctacatggtccatcctttcatctcagctccaaactttgtctctgtaactccttccatgggtgttttgttcccaaatctaaggaggggcatagtgtccacacttcagtcttcattcttcttgagtttcatgtgtttagcaaattatatcttatatcttgggtatcctaggtttggggctaatatccacttatcagtgaatacatattgtgtgagtttctttgtgaatgtgttacctcactcaggatgatgccctccaggtccatccatttggctaggaatttcataaattcattctttttaatagctgagtagtactccattgtgtagatgtaccacattttctgtatccattcctctgttgaggggcatctaggttctttccagcttctggctattataaataaggctgctatgaacatagtggagcatgtgtccttcttacctgttggggcatcttctggatatatgcccaggagaggtattgctggatcctccggtagtactatgtccagttttctgaggaaccgccagactgatttccagagtggttgtacaagcctgcactcccaccaacaatggaggagtgttcctctttctccacatccacgccagcatctgctgtcacctgaatttttgatcttagccattctgactggtgtgaggtggaatctcagggttgttttgatttgcatttccctgatgattaaggatgttgaacattttttcaagtgcttctctgccattcggtattcctctggtgagaattctttgttcagttctgagccccattttttaatggggttatttgattttctgaagtccaccttcttgagttctttatatatgttggatattagtcccctatctgatttaggataggtaaagatcctttcccaatctgttggtggtctttttgtcttattgacggtgtcttttgccttgcagaaactttggagtttcattaggtcccatttgtcaattctcgatcttacagcacaagccattgctgttctgttcaggaatttttcccctgtacccatatcttcaaggcttttccccactttctcctctataagtttcagtgtctctggttttaggtgaagttccttgatccacttagatttgaccttagtacaaggagataagtatggatcgattcgcattcttctacatgataacaaccagttgtgccagcaccaattgttgaaaatgctgtctttcttccactggatggttttagctcccttgtcgaagatcaagtgaccataggtgtgtgggttcatttctgggtcttcaattctattccattggtctacttgtctgtctctataccagtaccatgcagtttttatcacaattgctctgtagtaaagctttaggtctggcatggtgattccaccagaggtacttttatccttgagaagactttttgctatcctaggttttttgttattccagacaaatttgcaaattgctccttccaattcgttgaagaattgagttggaattttgatggggattgcattgaatctgtagattgcttttggcaagatagccatttttacaatgttgatcctgccaatccatgagcatgggagatctttccatcttctgagatcttccttaatttctttcttcagagatttgaagtttttatcatacagatctttcacttccttagttagagtcacgccaagatattttatattatttgtgactattgagaagggtgttgtttccctaatttctttctcagcctgtttattctttgtatagagaaaggccattgacttgtttgagtttattttatatccagctacttcaccgaagctgtttatcaggtttaggagttctctggtagaatttttagggtcacttatatatactatcatatcatctgcaaaaagtgatattttgacttcctcttttccaatttgtatccccttgatctccttttgttgtcgaattgctctggctaatacttcaagtactatgttgaaaaggtagggagaaagtgggcagccttgtctagtccctgattttagtgggattgcttccagcttctctccatttactttgatgttggctactggtttgctgtagattgcttttatcatggttaggtatgggtcttgaattcctgatctttccaaaacttttatcatgaatgggtgttggatcttgtcaaatgctttttctgcatctaacgagatgatcatgtggtttttgtctttgagtttgtttatataatggattacattgatggattttcgtatattaaaccatccctgcatccctggaataaaacctacttggtcaggatggatgattgctttaatgtgttcttggattcggttagcgagaattttattgaggatttttgcatcgatattcataaaagaaattggtctgaagatctctatctttgttggatctttctgtggtttaggtatcagagtaatagtggcttcataaaatgagttgggtagagtaccttctacttctattttgtgaaatagtttgtgcagaattggaattagatcttcttttgaaggtctgatagaactctgcactaaacccatctggtcctgggctttttttggttgggagactattaataactgnnnnnnnnnnnnnnnnnnnnttaggattttgtccctgtgccctttagtgagtctagctaagggtttatctatcttgttgattttctcaaagaaccaactcctcgtttggttaattctttgaatagttcttcttgtttccacttggttgatttcacccctgagtttgattatttcctgccgtctactcctcttgggtgaatttgcttcctttttttctagggcttttagatgtgttgtcaagctgctagtatgtgctgtctcccgtttcttcttggaggcactcagagctatgagtttccctcttagaaatgctttcattgtgtcccataggtttgggtacgttgtggcttcattttcattaaactctaaaaagtctttaatttctttctttattccttccttgaccaaggtatcattgagaagagtgttattcagtttccacgtgaatgttggctttccattatttatgttgttattgaagatcagtcttaggccatggtggtctgataggatacatgggacaatttcaatatttttgtatctattgaggcctgttttgtgaccaattatatggtcaattttggagaagatcccgtgaggtgctgagaagaaggtatatccttttgttttaggataaaatgttctgtagatatctgtcaggtccatttgtttcataacttctgttagtttcactgtgtccctgtttagtttctgtttccatgatctgtcctttgaagaaagtggtgtgttgaagtctcccactattattgtgtgaggtgcaatgtatgctttgagctttactaaagtgtctctgatgaatgtggctgcccttgcatttggtgcgtagatattcagaattgagagttcctcttggaggattttacctttgatgagtatgaagtgtccctccttgtcttttttgataactttgggttggaagtcgattttatctgatattaaaatggctactccagcttgtttcttcagtccatttgcttggaaaattgttttccagcctttcactctgaggtagtgtctgtctttttccctgagatgggtttcctgtaagcagcagaatgttgggtcctgtttgtgtagccagtctgttagtctatgtctttttattggggaattgagtccattgatattaagagatattaaggaaaagtaattgttgctcccttttatttttgttgttagagttggcattctgttcttgtggctgtcttctttttggtttgttgaatggttactttcttggttgttctagggcgtgatttccgtccttgtattgcttcttttctgttattatcctttgaagggctggattcgtggaaagatattgtgtgaatttggttttgtcgtggaatactttggtttctccatctatggtaattgagagtttggccgggtatagtagcctgggctggcatttgtgttctcttagtgtctgtataacatctgtccaggctcttctggctttcatagtctctggtgaaaagtctggtgtaattctgataggccttcctttatatgttacttgacctttctcccttactgcttttaatattctatctttatttagtgcatttgttgttctgattattatgtgtcgggaggaatttcttttctggtccagtctatttggagttctgtaggcttcttgtatgatcatgggcatctctttttttatgtttgggaagttttcttctattattttgttgaagatattagctggacctttaagttgaaaatcttcattctcatcaattcctattatccgtaggtttggtcttctcattgtgtcctggattacctggatgttttgagttaggatccttttgcattttgtattttctttgactgttgtgtcgatgctctctatggaatcttctgcacctgagattctctcttccatttcttgtattctgttgctgatgctcgcatctatggttccagatctctttcctagggtttctatctccagcgttgcctcgctttgggttttctttattgtgtctacttccccttttagttctagtatgattttgttcatttccattacctgtttggatgtgttttcctgtttttctttaatgatttctacctgtttggctgtgttttcctgcttttctttaagggcctgtaactctttagcagtgctctcctgtaattctttaagtgacttatgaaagtccttcttgatgtcctctatcatcatcatgaaaaatgtttttaaatctgggtctagattttcggttgtgttggggtgcccaggactaggtggggtgggagtgctgcgttctgatgatggtgagtggtcttgatttctgttagtaggattcttacgtttgcctttcgccatctggtaatctctgaagctagctgttttagttgtcactgttaagagcttgttcttcaggtgactctgttagcctctatgagcagacctggagggtagcactctccttagtttcagtgggcagagtattctctgcaggcaagctctcttcttgcaaggcaggtacccagatatctggtgttcgaaccagactcctggcagaagttgtgttccactcactagaggtcttaggatcacgtgtggaatcctgtgtgggcccttgcgggtgtcaggcgactcagctggcaaggtagtccggggctcgagtggagtggaaggggtttgtgccccagatcaagcccgggtagcctgcttccctatgtaccgcagtctcaggttctgcgcgattggattggggcaggcgctgtgttccactcaccagaggtcttagggtcccgtggggagtcccgtgtgggcccttgcgggtgttgggcaagactctgctggcaaggtagcccggggctcgagtctcgagtcgagcggaagggacttgtgccccagatcaggcccgggtagcctgcttccctatgtaccgcagtctcaggttccacgcgattggattggggcaggcgctgtgttccactcaccagaggtcttagggtcccgtggggagtcccgtgtgggcccttgcgggtgttgggcaagactctgctggcaaggtagcccggggctcgagtctcgagtcgagcggaagggacttgtccaggggataaaatattaaactaagctccactagaccagaaagagaaaaagaatgacagccgaggtgtggtgtgaacattagtgtatgcctttcatcccagacaagcaggtagctcaggattccaattccagttccagaatctggagttgacgtgggccagaggatgcaaattatgttcaagaagaccccaggccatcaatgagggtacacacctgtaattgaagcatccaggaggcagaggttggagaactgttccttagagaccgaccaagattatacaatgagtttgaagctggcctggctgtatagggagaccctgtctcaataaaataaaaaaagaaatgatgggaggagacaaagaatgaggttccaagggtaggtaagtggaagcagagtagatggtccagagtagggactagagtaagtgtgctggcaaagaagtcaggtcacccagagataccacaagtcctaaacagaatcagaaaattagagacacctttcctgcggcagctacattcacctgcagcgcttcttagagtgaaacccatctggcatctatgaggctctaaatcttaattgtggcaaggagaaatggaaactgtatcatgacttccagcacctgggatccagcaaagggccagtcaacctagaaaaactacttaaattatacatgtctctgtttcttcacctgtgaaaaggatccttgttcagaaattaattatgtgtatacgtgtgtgcatatgtgtgggtgaagtgcttgaatattattaaaggttggatattattatctggaaacatgtcaaagatatagtcagtagagctgctgaccacttaaataagaacagaggtaatataaaagaaataggcctgaggcttctacattgtttcattgagagaataaggattcattagtgttgctaagaaaacacaaagagaaaactggtttgaaggaaaaaaggaaatactgagttctatttaaaattgttgagttttggtaactggtttgttaaccacgtagaaaagttcaaacaagctattgaaagaaagaaatgtatctcaggcaaaatgccaaagccagcgattgctcccaatgttaattccttgtagttagatgtagtggcttgaataaaaaatggactccctaggctcatatatttgaatgcttagtcaccagggagtggaactatttgaaaagattagaaggattggcatgtgtgacattgttggagtaggtgcacccttgctgggaaaagtgtgtcactgggggtaggctttgaggtctcagaatcctgaggaccagaattggctctcagctgtcatgttccctccctcaatgataatggactaagcctctgaaattgtaagcaacagccccccccccccattaaatgatttcattgatgagagttgccttgttcttggtgtctcatctcagaaatagaaaagtgacagacactagatgatattgcctatgaaacaggttcatagatgaaaaggagaaaaagcagaggtgatagagtgtctatatcctagaccagcacttctcaaatgtgggtcaggaaccctttaggggtcaaatgaccctttcacaggggtctcctaaagccatcagaaagcacagacatttatattatgattcttttttttttttttcttttttggttttttggaggcagggtttctctgtgtaaccctggctgtcctggaactcactctatagaccaggctggccttgaactcagaaatccgcctgcctctgcctctgcctctgcctctgcctctgcctctgcctctgcctctgcctctgcctctgcctctgcctctgcctctgcctctgcctctgcctctgcctctgcctctgcctccaaaattctgagattaaaggcgtgtaccaccactgcctggctatattatgattcgtagcagtagcaatattgcagttatgaagtagcaacaaaaaataaatttatggttgtgggtcactaaaacatgaggaactgcattaaagtgtcgcagacattaggaaggttgagaaccactgtcctagacacttagatttttgtgatgtgcttgatggcacagttcttacagaatttatcaacactacactcactccagggaatacacaatcactcttgagatgttttgaggtatccacagttactacatcaaacagtcaacatgtaagtggagaatctcaccacatggcctacaatgtcctcaaactcatgatcttcctgcctcaacctcctgagtgctagagtgacagacattcactgccatcactttatgtttaatattgttcttgctgtcttattgtttcaaacttgcttttctgtgtcatggtcaatcttgaagaatgtgactaccattagtaatttgctggcatagatttgaaaaaaaaaaaaaacacacacatcacaattgcccgagtaaacactactcttcctaactaaagccttcctctcaggaaagaatagaaacatttgtgcctaacactgtttctatacatggtaggcttctggatatgtattgaaaaggggattgttttcctggtggtgttgttttgttggttggttggttggctgcttgcttgcttgcttgcttgcttgcttgcttgcttgcttgcttgcttgcttgcttggctggctggctggctggctggctggctggctggctggctggctggttggttggttggttggttggttggttggttggttggtaacatgcttgcttgcttacttgcttgcttgattgcttgcttgcttgcttgcttggttagttggttgcttgcttgcttggttagttaattggttcattagttggttggttggttggttggttggttgggtttggcttggtattttctgctcatttacttccttattttgtaagtccaatctgaacaaatgagatttctagaaatgtcatctccccacatgtaactcttggtaactaactgatctcttactagacatagtaaaacagactaatacctagtcacattaactacctctaatttttttcaagtgcactttgggttaatgcttagtccttttgaggttcccattaaaaatgatattaaaatagccacttagtgagataccaaccagctgatactaaatctttttaattatcttataattttaagaatgcctcaagagaattataaatattaatgaactcttactgttttatcttttctgtaccagtacaggcaagagacacagtttcaaaactctccaagcaattcccccataggggtgcgagggatggtttactggtcccccataggggctggagggatgacttactggtcccccataggggctggagggatgacttactggtcccccatacgggctagagggatgacttactggtcccccataagggctggagggatggcttactggtcccccataagggcggaaggatggctcactgatgaagatcaaatactgctccagaaacgtactgagttgagttcctagaacctacatcaggcaacttgcaaccacatatagctcccgctccagaaaccgatccctttggcttccacaggcaactgcactcatgtgcacatacccacacacagatacataatacaaaatttaaaaaaaaaaaaagaatcttaaagaggagattctgttaaataatatgtgaaaatatgtaatccttacaatatgccaggccaggtttgaggtaatttacatatggttagtgcaatcctttctcacagcaactgtatgaaataagatttgtcattatttccattggtgatgcaaaggctgaagtcagaaagtggccaaggacttgctcaagactgctcagctctcaaatagtagatcaacactctcaactcacactgtcagccttaaaaccaaggagatgtaatgttgggcgaggaaggtcattcgataaaattaaatattttgctgaaacttcgaaagcctctgatgttggcggttaagtcatgcacaaagaatattaactctattgagggaatgtgaatcaaagctgcagtcagctcgtgttgactgacaacgtgacaaaaatagtcgagaaaggatatcagactttgtgatggcaaacagatccaatttgaggtgaagtctttggtgtcctcaaaaaccgcttgttaggataataaatcagtgtaatattgctaagtaaaatacgtgcacaccaaaatgaaaccattttgctcctatttgtgtgcccgactgaaatgtatatgaggggaaatagataatgtaaatgtatgtacacattttttgagatggggttaaaaaagcgctagatcaaccccagcctggattcattgttgaagaggggatctggcagagttaaaggcttctggatctacaaagacaaaattaaagtcattgtaagccaaagtggtggagtcaaactgcatgctaaggaagaaagtagggagaattaagaagtcccttctgtcaatactattgttgttgtattgatttgtctaacagtaacactgttaaggaggaactaaagttgtcaattaacttgtgaatcttgaaagatgaatcggaatcagtattcaaggatgacaaaggactgggatctttacatggggctcatacacagtcctgagaaccgtaggtgtcatttgtaaagtttgaaaagaatctataaagggttttaagcagagtcatttggatcattctgtgctccataatctttccagctgccagtggtgagtactctaaagactggcagcagacagcttcatacctggggctgtctgagtgcagagggccagcagtggcatagacagagagaaaaggaagtgagaaatagctgcatttgagggtttgttgacacaaagatgataaggaccgggagttgagctcagaatccactggagaactgtttttagaactggaaaggggaaacaggaagacctctggtgcttgcaggccagctggtacagcagaattgacaaggttccggtttgttgtgttttataaaaagataagagggaaggaaaatgttttggtggaggtgtagtcaggtgtggggaaaggggttcctctgaggacctatgctgaggcatctcttccccctgaggaaccagccacaagatggtatagtatagaatagagtttattcagagcatggggaggggagttaagacggtagtagagacagagaacggagggagagagagggagaggaaggaggaggaggaggaagagaagaagaggaagacgaggaagagagaagaagaggaagagaagaagaagaggaagaagaagaagaagaagaaggaggaggaggaggaggaggaggaggaggnnnnnnnnnnnnnnnnnnnngatcattctgtgctccataatctttccagctgccagtggtgagtactctaaagactggcagcagacagcttcatacctggggctgtctgagtgcagagggccagcagtggcatagacagagagaaaaggaagtgagaaatagctgcatttgagggtttgttgacacaaagatgataaggaccggagttgagctcagaatccactggagaactgtttttagaactggaaaggggaaacaggaagacctctggtgcttgcaggccagctggtacagcagaattgacaaggttccggtttgttgtgttttataaaaagataagagggaaggaaaatgttttggtggaggtgtagtcaggtgtggggaaaggggttcctctgaggacctatgctgaggcatctcttccccctgaggaaccagccacaagatggtatagtatagaatagagtttattcagagcatggggaggggagttaagacggtagtagagacagagaacggagggaaagagatggagaaggaggaggaggaggaggaagaaagaagaggctgctatgagcacatggagagagaggagggagggaagtggggagagagaaagtaagttaggagcaagagcaagagagcaagagagagaggagggggcaagcagccccttttacagtgagtcaggcatacctgactgttgccaagtaactgtggggcagagcctagactgaatgccaacactgttcagtgagagaccttgtgtcaagagaaaatacaggctctcaacctctgtcctccacatgtgtgtgcatagacacgtgcgtgcacatacccattcatcaaccacagaatgaaagagagggaaaagatagtggtcgaagagtgctcactaacattaaaaactccagagaacatcagcagttacacaacaggcaggagaaatttccacaatcgagccgacagacacgtggggaaaatactgagagaatgtcgacttcaaaaccatcggagcttctgtgaagggcacacatagcacaagagcgccaacaggcggcaggctcatgaaatttggcgtggaggtgagcactccttggcaagaacagtatcactccatgtgtgggaaggatgggtaccttcatcctgtggaccggagatgaactgagagatgcagactgcataaaactaaccagaaaccattccaacaagggtggatcacaacagattaagaaaccacattttccttacgttttaagagtcgtcaagacctgcccaagcttgggtgttgaccgggaagatgctgctaacacagagaactgaactgttcatggagggccttagttctaaccgctatactgatttaggatagacttggcagctcgatcaacaaacgtttatttctgccaactcgagaggatagaaaattcaagatccagaacttggtgagccagatttcctcagttctcacatggccattgtgtcctccagaagacaacaacagagacacctccccttccccccccccccaaggatgtactgatcaggacatcaactccataaggaggacaccatcttcatgccctgattaattccaaaatgttccatcaatgaatattatccttgaggattaggagttcaacagatcggggatggggatacaagcatcacattgatagcagagagtaatgtgtcattcactgtagactgcacactgatgtatataagacccttaaggaaggttaagcaaggaaggaagtttggctgtggtaagcaggagactaggagaattagaatttggactgtttcatctttggtggtccagagaattctagttatttccatgaagtaaaggggaaggcatccccagggcatgatgagagaggctgcttgattaagaggtgcacagtaactcgtgaagtagggaacagttcccagaggaaggggttgggcaataacagaaaaacaggtttgtgtagcacagttggaaacacacgaagacctggaatttatagacattgctctgtacattgtgagtttccctttcctagtagcactcggcaccctggaataatcacagaaaaaaacaaattctgatccgttttccagggctggggtcttgccaggagatgaaagcaaaggagagttatggaattcggggcatccattacacagtgacccagctgatctgagccaagctgttcagcaggagcgtgggattggcccctcaagcctccaaagtctagctgcaaacttggaaagacaagagtctgtgccccaaacataggagtgtgttgaacggtgtcatgggtgaagagggacagtacagaagagaactcattaagacatggagagagcatatgttaagccaggtctcaggaggctgagatatttaaacaatgtttttcccaaagcgttcaggagccagcagaagctctgaaacacggccatcagagccatcccacgcatcctattttgttggtgatacaggctgggtcctgcacagagacgactcctcaggccctcaactctgggccaaaccacgtttgccaagccattcattcttctctacaactgctacaggggaagaactctttgtttttttaagttagcatacaaagtaacactttcattcccgcactttcacacgtgaatactattttgcgctgttcctatggatcctcgctttcccctcccctctccaatcctctctccatcctctcctctgtaacttcctcttgctgaccgcctacatcgcccagcatcgtctttcccgtgccatgtattccaccacccccacacaccggaagatcacttcctccctcttatcatgatctttgtacttccatggtctatgcacgcgcgcgtgtacacacacacacacacacacactcacacattacacgcttacacacacacatatgcatatttgtaaacttaaatccagggcatgagctggtgagatggctcactaggtggggtgagagatggaactctagttccattcaggcagcagtaaggctctagatttccctgcagtttgccaacaagactctctctgtttcacctaattcatacttctcgccttagccaaaattagaaggctctcattggctgagcttcttttgatgggtgcttttgtgtttgtttgtttgtttgtttgtttgtttgtttattgtttgacattgctataagtataatttttttctttccttcttgataatgtcattagtgatgtataaaaaaggctgctgatttttgttcattggttttgttatcttgctacattgaaaaaatgttcataagatgtaaaagatttctggtgagtgtctcaggtcttttaagaatgagattatattctctgcaagtaagggtgtttcggcttctttctttcctacttctattgctttttttcttttattgttctacaagatttcaaacacggttgaatatgagcaatgactatgggacccttgtctccagttttgactttggagaaatgtttccagtttcttcccgttttagggtaacactggctttggatacatagacttagttctacatagactttatgctcagctctgttcccttcctcctgctttcttcgaggctcatcaggaagaggtgctgagctttgtgaaagatattttctgctgtgaagtgatcacatgatttcagttctcagtctatatgtgtgaattgacttatttaggtttatatgggtaagccaacttcccatctctggagggaaaccagtcttgccatactgtgggatcttattatgttcctgaagacaatttgcaaggattttattgttatattttatatccatatccattaagaacaattgatctatatttttattttagtacctccttatctggtttggggtcagggtgtctagaatgagttttcttctgcatcttattttttttttggaacatctggagaagtagtatacaacagtgaacataactgatcctaggtatttatgagaacatttttttcccttaatttcaagttgttttactttttctccattaatttatttattcactttacataccaatcacaggctcccctttcttcccagccccccatgacacaccccatcccatcctcctcttctactcgtgtaggggaggaccccctaaccctaaccctgataccaattcaccctgatacatcaagtcactgcagaaccaggaacatcctctcccactgaggccagacaatgcagcccagttaggggaatgagatctacatgcaggcaacagagtcagggaccgctccctctctagttgttgaggacccatatgaagaccacgctacatatctgctacatatgtgggagatgcttgctctttgattggtggttcattctctgggaacccccaagggtccaggttagttgactatgttggtcttcctatggagttcctatcccctgagggactgcaatcctcccaactcttccacaaggctcccaaagctccatccaatgtttggctgtgggtctctgcatctgtttcagtaagccgctggggtggagcctctcaaaggatagttatactagcctcctgtttgcaagcataatagagtaccattcttagtgtcagggattgtttcgtgcccataggatgggtctcaagttcaactggtcattggttggcctttccttcagtctctgctccatcattgtccctgagtttcttgtaggcaggaaaaaacttgggctgaaggttttgtgggtgggttgatgttcatatccctccactgcctggccaccagaggaggagacctattcaggttccatgtcccctcctgctaggtgactcagctagagtcattcttatagactcctgggaaccacctcacaccacccccaacccacccctgcacctatttctattcatccttcaggccctttctctccagctctcccaacacctgattcaccaccccctcccctccccatcccttctccctctttgtcccctccctcaatcggcctcccctctcaatcccctctccaacccagttctctccctccatcggcctccaatggctattttatttccctctgagtgacattcaagcttcctcatttaggctgtgaggacaatttttataactgcctcaatttcattgactgtattgatctattttaaattatttatatctttttaatccaacaagtcatatgcatctaggaatttatccactttttctagattttccagttctttgaatgttttcaaaatattctctagtagtcctttagatttccctggaatttttaatgtccactctagtcatgttaatgtattgcttttctgtctttcttttagcttctttagctgagagttggtcactctggtttatctttccaaagaaccaacatttggtttgattaattggattgttcttttgttccccactttattaatcttcattccaatcttctcactacttacatgtttggttgtagcttgttcttatttttctaaaaccttaacttgcatcattagattatttatctgagtgcttgttctctctctctctctctctctctctctctctctctctctctctcttctctgtgtgtgtgtgagagagagagagtctgcctctgtctctgtccctctctgtctctgtctctctgatttttacataaacaatcaaaatgcactaagaagatattaagaagatattacaattataactatatatgcaccaaatattggggttcccaggattgttagcaaacagtaatggatctaaagttgtgattgttctgatattctctttgaactgtcttaactcattccaaaaattctgataggttgtgatacttttttttttttttttgatcccaagaagtttttcattttcttcctgacttctacactggcccactatcagtcacagatggattgttcagtctctatacatttatgtagtatttacaattttacttattattgttctctagtttcatttcaggatgatctcctagaatataataaattttgtttgctctttagattttaggcttactttgtgacttagaatattgtctattttctagatggttctatggactaccaaaataaatgtatactcagtttccgaagctagaatagtctgtagacatttgcttgatccatttgctctatgatgtagtttaaagctgatgtttctatgtgacttttaatttggatgacttctctagagatgagagtagggaattgaatttacctgctagtattgtgccaaaactttatgttcattagtgtttgtttaatgaaattggcagtccaacatttagtgcacatgtaattataatgttgtttggttggttggttggttggttttggtttttggcttttggtttttcaagacagggtttccctgtgtagccctcgatgtcctggaactcactttgtagaccaggctggcctcgaactcagaaatccacctgcctctgcctcccaagtgctgggattaaaggtgtgcgccatcaccacccggctcacttccttctttagatttggaaattttctgaaataattctagtttttataacctaaaatacagtctattttagagctgggtttctgggcttctgagaagaatgtgtctttttcactttgggaactataatataaacatctgctaggtctgtcagacaccattcacgaagagctgctgtggacaagtgagtgccctggagatggcctatcatcttgctcagctgtgatgggtgtgctctggtgaggcactgccccagagagttcatcccagggtcactactgatgtgctttctcatgtctgtcattgccacactcctcatttatgtgtcttggtgtgagtggacactgggagacactcactgcctatagcctggtgtgattacttcctaggtgaaagcccactgggcaaatttcctgcagaacaacatgaagatgaattttcatgcattaatgctatttagatgaattaattattgatttattaatgactggtgagttagttcctgattcgactcaaataattttaggcagaaagtttatagagatggttttggttgttttatcagaaagatataatagttaaaatcgagaattgaatgtgccccctcctcatagaatagtaagtaaaggctgcataaaaagaggttccataaattgcactaaaatgaaaaataggcttggaacaaatttgtgatcaagaaaacacattcattctaggtcaagtccaagggtgaagccacaggtgtgcacaatatgataaagcaaggccacgtgaaacagttgctttgaacttacaatgagcttatagaatgaaactctgctttaaacttactatcaacatcctgtaacgccccttttatgtaatatttcacctatgagataattttttcttagagaactttttgtttaaaaagctataaaaagctgaaagcaaaaataaaatcttggtatagcccttttctgtgttgcccagtgtgtgtgtgtgtgtatgagagactttcttttcttttctctctggctcccaaagagttaatgaactctgagtcttttcccctggccagagaaagcctctcccacccctcaccctgagtcaaagagaaaatagcccaagtaagtaagtttctgaagctgtcagcttctagtccgagagagagagagagagagagagagagagagagagacagagacagagacagagacagagagacagagagagaaagagagagagagagagagagagagagagagagagagagagaaaccatcagcctctagcacccagaatagtatgagagggttaaaggccagaggtcatcagcttctggcctttgtcctttgtccaatgctgtgtcctacctcagtacatgaccctgtcagttcaagacccctggaatagatccatttgatctattattatctatctattacatatctattatatatctactatattgtggttcagttctttttattagatattttctttatttacgtttcaaatgttatcccatttcctggtttcccctctgaaaactccttccccttttcccttccccctccccctgctcaccaacccacccattcccacttcctggccctggcattcccctacactgggtcatagagttgtcacaggaccaagggcctctcctaccattgatgaccaactaggccatcctctgctacatatacatctggagccatgagtcccaccatgtgtactctttggttggtggtttagtccttgggagctctgggggtactggttggttcatattattgttcctcctatggagctgcaaaccccttcaactccttgggtcctttctctaacttcttcattagggaccctgtgctttgtccaatggatggctgtgagcatccatgtctgtatttgtcaggcactgacagagcctctcaggagtcagctatatcaagctcccatcagcaagcacttgttagcatccacaatagtccacagtcacagtgatgtatctagaaaacacattaatctgtttaacacattgctaattggtaagcactcatacaaataaaataaaataaaattgtcattaatgtttactatctagacggtatcaggaaaatccaaattttaaaaaatacagacatattttactctatgtttttgtctctgtttagctttaaggtgagaatatagcatgtatctgactctactgttatatactagtagatgtcaaaaataatagtagttttaagattatcatactcaagtatctagcaaaacattttgtttcctttgaatgtatttgttacttttttgcatgtataggtgtgtgtgcagtgtatgcatgtgtgtgtgcagtgtatgcatgtgtgtgtgcatatttacatgtggcggggattcgtgtgtgtgtgtgtgtgtgtgtgtgtgcacaagcaaatgtatacacgtatgtgcacgtgtgtgctcatgcatatggaggcctaagggatgatattaggtatccaccccaatcactcctcactctgctgaggcagcgtctgttggccaactgtgagattcaccaattctaactcgtctagctagccagcttgccccaagtatccattgtctctctacccccagacagctgggattagaagtagctgccataccttcctggcttcaacgtgagttctggggacctgaagtcttgtcctcatgcttgcaagacaaatgccttatccactgagtgatctccccagctttgtgttggttaatgttaaaataactcttcatttccatagcatcaccgagttagcgttaacatttgtcaaaacaactgcacaatcaacatctactctgctgaggagttgccgtgggtgtgcacactttcacaaagaaacccagcgtcttaagatgagctttaagtatgaaatgcagatctgatgttaccatggccttcattctcaggatgaggcagcaggccactttctccccaaacctgcagcaactatatgaattctgagctggtcttggttcaggtctgcctagctgtcagtctctggatttctgagacacagataggaaagccatcgatgctatacatcacatgagaaaatggtaaggagatagagaaaggaaaaaaaacaacaacaataaaatctaattacacggactttcacttgaaacaaaaattgattgagttctacccagagtcgcttgttgtttcctgtgccaggaactactgtgcaggcccagcaggaagtgtgctgcagaacaggatcgccttannnnnnnnnnnnnnnnnnnnnnnnnnnnnnnnnnnnnnnnnnnnnnnnnnnnnnnnnnnnnnnnnnnnnnnnnnnnnnnnnnnnnnnnnnnnnnnnnnnnnnnnnnnnnnnnnnnnnnnnnnnnnnnnnnnnnnnnnnnnnnnnnnnnnnnnnnnnnnnnnnnnnnnnnnnnnnnnnnnnnnnnnnnnnnnnnnnnnnnnnnnnnnnnnnnnnnnnnnnnnnnnnnnnnnnttctatcctctcgagttggcagaaataaacgtttgttgatcgagctgccaagtctatcctaaatcagtatagcggttagaactaaggccctccatgaacagttcagttctctgtgttagcagcatcttcccggtcaacacccaagcttgggcaggtcttgacgactcttaaaacgtaaggaaaatgtggtttcctcccccccccccccccccagaacaggagttctagagttgccaggtgaagacatctctttttgtctctttgaaagcaagacacaaagtccgggtttcgtctgcttccttctcggccctactcaacatcactctaaacctgaagaattatgaccatgtccatgaatggtctaagccatcttgcattccatgcaagctcctcatagagtgtttaatctgagaaagagcccccgaccttagcgggttatatatctgggatggaaaatcaccattcatttgttaagggcgggggggggggggcggaatgagttcgttttactgtcttgcttggaaatgtgtgaggcaaacagctggatttccttgcagtgtggtatatcccgctcctcacgtgctgtctgtctgtctgtcttccctcccctccagggacctcagtatgaacaacatcagtcagctacccgccagtctcctacatcgcctctgcttcctagaagagttgtaagtaccactgctgtctgggtgtttccagtcaatgctgagcacattcctgcatttgtctctcatacttgctgtgggaatcagataaaacaaatcggggaagctgtcggcaccaacaactctggcacatgaggaaacacttaagtggtgggggggccaggggaagactagcctatgattctggaaatcaacttataaaagagtttaccatgaggctacaactttctaaggtgagactgagccaagcaaattaaaattttaaagcaaaggctgtttaaaagagctggatgactttctggaaacagttaaacagcggggcattaaaagtttgaatactggttcatgtttattaaaatagcaagtaaagctctaatgaaaaccaaaacctgccgctcgattcagcttgggactgggaggaccgaggccatgttgcctagcaccaaaacttcttgtcctaatcccttttaattactatttccctccttttaaatgtagcttccctcaaggcttcaacggagaaaaacatgagatccagaggacttaacgggttcttctaaactcactcttaaaaaaaaaaatttaaaggagaaagataaaattagttaatgatgcacagaggaaacctgattgagtctagtgatcactttccagaagatgaaaaagaactgtataaaccaaaagtctgcatttgcaaagtcatttgatcctcagaccctgctgagtgatggaagctccacaccatcatggcccctgggagggaggcttggcaccatcagttgggtaaatcctctgacggttgattaaagggattgtgtcggcaatgacctctttggaaaatgcgtcccttttaaaccctaaactcagggtccaatttgaggagtaatttaaatctttggtgcaccacatgatccaccacgggaggtggggtgttccagcgtaaccaaactgtgcatcagcgatcatctcctcaagagggtaatattcccaagttctccatgctagccctttatcctttcctttgtaatggtgttattgcttaaagagcattattgttcttattcctagaaagagtataaccaattggttatcacgtggtatggtggggaatcgggatagtaatttatatagcaagggttggtttttttttttatcatttagagaatatatttagtctatatctagacttctctctcttcctctgtacactctatcacgttcacttacatggctacaacttagccttcaaaaaagctaggagtatatctgccttagtcatgggctgtacataataaataataaaagttctgaaaaatagcaagtgaagcacttcagaggagcttcacacacagtgtgtgtgtgtacatgtatgtatgtgtgtgtgtgtacatgtatgtacgtagcagttgctttaagtaaatttcaaacatcaggcctgctggcttaactgcaactctcttgttctccttgccctgcccaattaaaatgcaaaatttagctctctgcaccatggtattactatgataaaaaactatgtaccctttcctcttttctttttaaatatcacaaggcacaatgcttcctttcttccccaacacatacttcaactttagaccacaaactgaatcaataaataattcacttaccccaaggacttttcggagtctccgcccctccactagtgacttagcccattcaaaataactcctctgtcttcttgaagtaaatgttaattctgtctcaagggcagtttgtcaagagataattgagagggggaagcagactaaggggatggggggaggggggagaacaccattctaaaatgcggctttaatgaacaatctcatatttatctctctggaagctctatccaataccttggtcatagaacgagagaattccagaattaaaggtcactctttgtctgctctggaatttgatctgctgagctgactgaattgctggatttaaggttaagactgagatccatgcgatggctcaggagagaaaggcattggccaccaatccaatcaccagaccccaagtggtggaaggagagaaacaacacccctaaactttcctctgactgctctatacaaacatgtgagcacacacacacatacacacacacacacacatacacacatagggtgtagtatacacagatgggcggggaggttggaaagatatgggaggagttgggtgggggagggtaaaccatgatcagcatatattgtatgaaacaaatttcattcaaatttttaaactaagaaaaaaaaaacataaataaaagaagcaacaaagaccagagagaaaactgagaggttaagtatatatttcattgttgcagaggacccaagtttggctcccagcacccaatatcagtatctatgtataaatccctctccaggagacccatttccttcctctgacctccacatccacctacactcacaagcatacacccacacacagatgtgtagctgaaataaaataaaacatttttaacaataaaaagaaaaaagaatataacaacaaatgctggtagggatggatacagaaggaaatccttatagactgataatgggaaggtaaactggtccaggacctatgaaaatcaattcagagatttctcaaaaataaataaataaataaataaataaataaataaatatataaataaataaaaactagatttgctgtgtgacccaactctaccactcgagggtatttatccacagactctaagtcaacataacacaaacatacttgcacatcagtgggcttttcagcattgttcagtttttatataacagagccaatgcaggggcccaacaacagagagagctggacaaggaaaacatggcaaatggaaacagtggaatgtttgtcagtcacaaagagagatgaagttatgtcaaccgcaagaaaatggatacaactggagataatcatattaagccaattaagccagtcacagagagacaaatacgttctctcacttttgtggtcctagattttatatagtcacatataaccacatataaccacatcacatatacatttatacatatacacacatatacacatatacatatatacacaaatacacatatatacacatatacacatatacatatatacacacatacatatatacacatatatacatatacacatatatacacatatatgcatggctctcctgtactgctcaccacaggtaccaggtacaggacgcttcccaatcagacacctctgactcggtaaggaaggaaacggagatgtgtggtggtggtggatgtgcatccaggttcccttgcctgcatctgtctgtgtgggagaaggagcaagcacgagctgaaaggcaagagccgcagagccaggggagggagcatagactcagatgctaatcccatagcctcgttcctgagaatcatcagcacagtctcaaagcgtaaagtctggcatggttcagcaggcctaaaacgtttgttaataatatttttatgtataaaaatatgtacttaacaccaccgtttatatagtattctccttgaacaaacaaattgccatccatgctggctgacacgggtgtttagaaatccgtacgtgtgtgacattgtgatgttgaaggcgctattgacaaggtagtagccttcccctcagcttacccaaccaaatgctgtgtccttatagccaagtagattactgtatatagtatcaacaataaaatcccatcacaacagtctttaaaaatcactgttaatgactacaaatcaccatccttacctctgacaacccagtacatcatttccctagtttacttcatctgttataaacttcatgtgaaatatatatgcatatgcatatacatcatatgcatatgtatcatatacatttatatcatatatattataaatatatatacatcatctacatatacattatatatcataaatatatgtatataccatatgcatatacatcatgtatcataaatatatacacatcatatgcatatatatcatatacatatatgtcatatacatatgcatcatatatgtcataaatatacatatatatcatatatgtatgtatatatatatatacatcatatacatatacatctatttcatagtgttatagacagcaatgtagacagctgtggctcacagtttacccatcatttaagcttaacaaaggtatcatagttgaaaatatagtaaggacacaattgtaaggatattcaaggagttaatttttttaagtgtgtctctgggtatgatcttcctctcttgttcttggcatccagggagagtgaggctgttccaagctttggcacatttgtttcttcgtttgttaatctattctagtgaccgggtatgcacaggccaatcaaagaggcaaagaaagggagagcctttttcttaatgtatagtataatgtatttccctgagagaggcacacagcacacacatccagaagcccggggcaccctggtctgcatgtgccagttactggcattgaacctcactgggccttgggtgatcagtagtgaaagccaccccacctgtcctctgggatgtttcggagaaccagatggcgggattgaaaggatttaagcaaccctcaacttacattttgagttgtcgtgaaacgcaaacacctttaaagttctgcctttccagtttcataagcctgattttgcaggaaccccagtaacgtgggatctgtggaggaaaagcctgttgctgctgtaatagataaagtcaaggatgccagatagctctttagcaaattttgacatcttgaacaatcgctgcgtttggcaccaacattctttttcttccagctccgctcgctctgttaaggacttcatgttcttctcttgtgggcaaacaaaagattctgcatttggccttccaagtgtggctgcgagtgcaggaactaatggcagatggtgtctgttgctggcatctacaagttagagtaaacttagattggaattctgattagagcaggcagttgtttccattttaaatattcccaagccttcatttccagcttgcatcttaaaatcggcccagattttagtgctattggaatcaaattgtcgactcacaaagaaacatgagaggctctagggaggtccgcttttaagttaccattgttccctggaacgatttgctcgtattatggttggctttgaagaacctctacataaatagtagatatctatcgttaccaatgaaatttggaatgagagataccaccaaacattccgaagcctaatccgtgcttgctatttttaccccctcgccacgtgactgaaaacggtgagaaccaccatcctgcctgtcttttgagaattttcttcaaggaagaaccgtagtagactataccacatgttacttttttgcttgtcaagtgaaaatactgtcatacctatgaaccatcttcatgcccttaggtcttagcatgtcttgagtctcttatttacacagagctgacaattgttttccaattctaccagctagaactttccagtatgatttcgtaccaacgattttggttctcttccaaataaaatcccacctagctagatttacacccttaggtatcttttattgtgtgtaccttgttgctaattagaacactttttaaaaggttttttcatttgtctcctctgtatctctgtaatgtgccttcatccctaacttctatgaaatataaatgcccacccgatttctccacttaattttctcattttttttcttagtgcttcttatgtccaccattcaacatgtggaggggacttgggtttggttgccagcacccacatgaggaactcccacatttcactccagttccagttgatctggcaccttcttatggcccccaagggctctgcatacacatggtgcccttagatatgtgcagacaaagcactcatacataaagaataaaaatacatgagaagagaaatctcataagattcccacctctaggaaaagcactagaggtaactaaagaatactgagaataggagggtcatcaacagggatgagcccttaattgtcatccaataccaagtggccatccctgaaatcatacacacatgagccacactgaactcaacagggatgtatacatctctgtgaatatatacataataatagcaacttagaaaaagaggctgtcttagtcagggtttctattcctgcacaaacatcatgaccaagatgcaagttggggaggaaagggtttattcaacttagtcttccacattgctgttcatcaccaaaggaagtcaggactggaactcaagcaggtcaggaagcaggagctgatgcagaggccatggagggatgttctttactggcttgctttctgatagaacccaagactaccagtccaggtatgacaccatctgtaatgggccctcccacccttgatcactaattgagaaaatgccttacagctggatctcatggaggcatttcctcaagggaggctcctttctctgtgataactccagcttgtgtcaagttgacacacaaaaccagaggccatgaatttgaaagggaggcagggatatatgagaggcactggaaggaggaaagagaatagggaaataataccatttgaatttaattttaaaaacaataaataaatctcaaatgggaaaggtgacatctaaactttgatcaggagctggggagaggctggtcctacagttaagacagagcatttcagagtgaggagctatgaaagcagagaccctgagatagccaagagtgtgaggtgtttgtggaagtagagggacagagagtatcagtaaggtgtgaggatgaaggagcaaggtggggctctgtcaggccaggtgcagaattcagtaggagtggtgggaagccattggagggatacatgcatgcagctagtaaatcaatatgactttttaaaaagatgtatctgggctggagagatggctcagcgattaagagcactgactgctcttccagaggtcctgagttcagttcccagcaaccacatggtggctcacaaccatctgtaataggatctggtgccctcttctggtgtgtctgaagagagcaatggtgaactcatatacataaaataataaataaaaagatgtatctgatgtctgtttgaaaaaaactggaccaaagaattatgaaagcagacagactcattaggaaactgttaattagggtgggtaaaaatcgaagaatatttctcatgtacagatgacattcaaatatcttggccagttttttgtcgtgttttggttttgattgacaggttctcagtaaggttcacagtacagagtccctggacaggagcatttgaacggtctcactatttcctccccattgaaatttattttttgtggggaaatgcaaagtcatgtgccctccccagctagtaagtcagaaactctagatcctgagctcaggaaatcacctgtagtgtgctctgtggatgatactgtttgaagactattcggtcagacagtcagtcagtcagtgagtcagtcaatcagtcagccggccagttggtcagtcggtcagtcggtgtttctggtgatgtcagaagtccccggagttcctcacacatttctgggccccacaagagacattcttcagacagacagaggtaggaggagaacatgaagaacgtgtgtataggagactaccaggtgataaggattctgcttcgatcacactgtgatgactcaaagctagggcatatttaaatgccacctccacttactgtcctctcagtactctgacattcagtgtgttcagaaccagaacaacccataaccacctccccaggaagccctgtcttctgcctggcctgcttttggccagcactggtgtcttagtcagggtttctattcctgcacaaacatcatgaccaagacgcaagttggggaggaaagggtttattcaacttagacttacacattgctgttcatcaccaaaggaagtcaggactagaactcaagctgatgcagaggccatggagggatgttacttactggcttgcttcctctggcttgctcagcctgctctcttatagaaccaagactaccagcccagagatggcaccacccacaaggggcctttccccccgtgatcactagttgagaaaataccccacagctggatctcatggaggcatttccccaactgaagctcctttctctgtgataaccccagcctgtgtcaagttgacacataaaaccagccagtacaactggcattatataaacatctcttaggcccacttgaccacccgggaaaggagaaaaattatgtcttttgtctaattataataattaaatagctctaggagtgcctaacatttatgaattgcttagttacaaaaaaaaaagagaggtagctactatttatacgtccacaatacattatacaacagcttactgaaaggactccagatttctcaatttcaatcttgtttgtaatacaaagggaatcttctttgattgtttctaacctgactacataatagctaaccattttggaatcatcatgccaaacatgaagtaattagagtcagttatatttagaaacatgatcaataatcttgattgattgattgaatgaatgattgattgattggctgataatgaatatctttgagttcccagttctgtgcaggcaataaccagaccacacatcaaagggcagaaaatgaagcgtcccgggcagtactgtgtcgaatgtagctgtggagtgaggtcactaaggcagatttcagaggagttaaaacagagctttattagactatggtttaaaaaccatggatcttttgtgctcattaaagatctcctagttgttctggaagaatttattcagctcacagattttaggcttcaacaattattagcctgtgaaccctgaaatctgaatattcctcatctacctaatactgaaagtgaatgcacagttcatgaacacgcggtccttaaacattttttggttaactttggctaactgaactgagggaagtgatggactggctgtcacagcttttcagcatcaggatgcattaaggcatactagaaaaggcatacaattctttcctggtaagaggatcagttgagacagtattgtcatccttttaagtaagataactgagttgcctgcagcaaatgtaaccaaagatacatttgcttctctcagaagcacctgcagaaatttcacacttaaatgatactttgacagtaattattcagataaattataacctggaagaatacaaataaaagcagaagcagtagagaaccgctatcttcagtagagaagaaatcagaaagaaggaaatggccccagtatagtggcgatagttacacatcgcccagatagttacacatcacccagatagttacacatcacccagatagttacacatcgcccagatcctcaggatgggaagacaactcaatcctgacctcagcactcttcagatttctagagcaaagtggcgcttattcataagattgtgtgccctctaggtctcataggcttttaaaagttggaaaattaatttctgtgacctggcaaaacttttcttagtctttctattaaatcacaagaattgtcatattcctgatgcattcccctttgatggcgtgagtggctcctctggtgtacagcttccatgtcccacatgggtctacatcaaaagttccaggccaggcaggactaccaacaggactctcactgaagaataccattttcttttccttttttgccccttagttaggggacatgaagacaaagaagtaaagtgattttcaaagaaaaaaagaaatgttttcaaagcaagttaatgtgaagaaaaacaaccaaaaagggaaagaaaaaaaactgactagattagaagtcgtgaagttcacggaagagccaggcagccatgttccttgctcagatctaaaagcactgtgtggttcatgggcctatccctagcagtggctccaggcctttccagagagacccaagcagagaacacagtccaatgccccatccaccctcagaacccagcccataggatattcagaacattccctgtctttcaagggcaaagtatggggcagaaaaagtcagatttcccttttataaaataaagcactgacaaaaaaaacaaaacaaaacaaaaaagttcatatcactttaaaatttcaacttactttagagattaagtgatatttatacactctgaaagatgtttttatattattattacaatagcaattgtttgggggaggaggggtgcaccaatagtcttttgcaatgtaatattctttctttctttctgtggaagttatataaagaaagcaagtgctgttgagataaggcaattcatacgtggtgcagcgtcattcaggataacttttgtattataatatatacttttactataataaaagatgggagatttttaccttctatcttattttagaaacaggaatgatgaaagagatttttttttataaaatagtgatttttttttagaaacagagttttaaagagcagcgttcaaccaaatgtcaactagatctctaggactgaaatatttgtccacatcatcacagggaagggaagatttctgtgtggctcttactgtttacatactatgtacacatttcaaagtctgaggagggttcctcccctcatgtagtttagaggtatttaagttttaaagttctttaaatcacccccacatgataaagaaataaaaaattataattctttccttaagttattgtttttgtctgtgggagagaggctgccatcgagctagcccacaaaacagctaatagcataatgcaaatccctttgttttggagcagactgccatgataacaggtcagtggttcacagactagttcttcatacagactccgaggcatcggaagtctctatgtagaaaataagagaaataaataaatgaataaataaataaataaataaagtgaagtaagttgcaagaaacataacccaaagacgtttaccttaatgagttaagctgactagaataaaacttaaaaaaaaaatactttttaaagatttattgcagctagagacatgagctctgggggtactggttagttcatattgctgttcctcctatagggttacagacccctttagctccttggctactttctctagctccttcattgggggccctgtgttccatccaatagatgactgtgagcatccacttctgtatttgccaggcactggcatagtctcatacgagacagctatatcagggtcctgtcagcaaaatcttgctggcatatgcaatagtgtctgcgtttggtggttgattatgggatggatccccaaatggggcagtctctggatggtccttccttccgtctcagctccaaactttgtctctgtaactcctttcatgagtattttgttccccattctaaagaaggatgaagtatccacactttggtcttccttcttcttgagtttcatgtgttttgcaaatagtatcttgggtattctaagtttctgagctaatatccacttatcaatgagtacatatcatgtgagttcttttgtgattgggttacctcactcaggatgataccctccaggtccatccatttgcctaagaatttcataaattcattgtttttaatagctgagtagtactccattgtgtaaatgtaccacattttctgtatccattcctctgttgagggacatctgggttctttccagcttctggctattataaataaggctgctatgaacatagtggagtatgtgtccttattatcagttggaacatcttctggatatatgcccaggagaggtattgcgggatcctccggtagtactatgtccaattttctgaggaactgccagactgatttccagagtggttgaacaagcttgcaatcccactagcaatggaggagtgttcctctttctccacatcttcgccagcatctactgtcacctgaatttttgatcttagccattctgactggtgtgaggtggaatctcagggttgttttgatttgcatttccctgatgatttaaggatgctgaacatttttttcaagtgcttctcagccatcggtattcctcagttgagaattctttgtttagctctttgccccatttttaatggggttatttgaatttctggagtccagcttattgagttctttgtatatattggatattagtcccctatcggatttaggattggtaaaaatccttccccaatcttttggtggcctttttgtcttattgacagtagctgcatatgtagcagaagatggcctaatcagccatcattgggaggagaggcccttcgtcttgcaaagattatatgccccaggggaatgccagggccaggaagttggagtgggtgggttggagagcagggcaggatgggggtatgagggacttttgggatcgcatttgaattgtaaatgaagaaaatatctaataaaaattctttaaataaaaaaatttttaattttttaaagattgattgattgatttatatgtatgtgtctacactgtcactgtcttcagacacaccagaaaaggacattcaatcccattataggtggttgtgagctaccatgtgaattgaattcaggacctgggaaatgaattcaggacctctgaaagagcagtcactgctcttaattgctgaaccatctctccagccctaaaaatatattttttaaatacagtataatctgatcatggtttcccctaccccatctcctcccagatctcaaacctctccgaccctaccctaccccatccccccagagctcagggcaccatgaagaagaagtggaaagagtgtaagaatcagaggagtaaccccacccccatccaactccatgtcttctttttctctctcttcagaaaacaggaaaaacaaacaaatgaggagaaagaagcagaataaaatgaagtaaatagacaaaaaaaaatcaaaacactaagaaacatgcacatgtagacacaagagacagagacaacacttttaaaaaacaaaaattggaaacccaaacatttaagcaagtgccaaaataaaacattatgagacaaaacatcttcaaaaaaaatcattggattcattttgtgttgaccatctaaagctgagtatgggtctcctttaattgtagatttcattctctatgggagagataatgtttttttgtaagaagttttcagttgtagatgcttctgggttaggggtggggacttgtggtcagttcacctctcagtgctgggaccccatctgacttggacccttgctggctctatgcatgctgcttccgtctcttgtgagttcgtacgttggccagttctactgtgtttacaagaattggtttcattggtgtcttccatcccattgaggactgagtgtttcgggtctcccactctctgcacattgtccagttgtaggtctctgtatttgttcccattgactgcaggaggaagcttctctagtgctggctgagtgagacactgacctataaggaaactcaatacgtaactcgtgggttgatgtcatggacaactccttatatagagtattcagaatttcgtgttgtaccttgtatcactaatcagattcagatgggcagtgcatgacacactcctgcctacagactgttgctcttccccttttaaccaaagacattacaccttgactctagtggtgtgttcataacaatgtaaattgtttcctcttctacaccaggatctgctacctccattgtttctctagtatcccctacaccaggtctcctgtctgaataccttaagtgcttttgctcttggccctttaggatattcctataaaaagaatccattcaaaatgcaggcttgttcacgtcattccctaactcttgcagaccatatgaggtcctccatcgccatttaagcaccagccctggacagcctctgaccccaatccctggcattctctgcttagccagtctccatactcgccctgtagaagcatatagaccacaccgcaagcacactactctactctgcccttcacagtatggctcagacctctgttgaaatatcctcaaagcagaaaggctcctctataccccctataccacagtatcaaaaataatcaccctcccacagttccctatttctttacctttgttattcttttcttagagaacttttcatgttatgttgtttgtttacctttgggtccaatggcaatgcccttaccattagaatgtaagctcaatgagctcagaggcggaggggctccactactgtaacaccaaagcagtccctgcacaggggcttaacaaaatactcgctggatacaagctagtatgaaaaaaaatgatagcacgcgtttcttctcaactccaaatggctgttaggcatacagaagccggcaatgctgtgatagctcaggtgtgccaactgcgggttaacagtacaaagataaaaggcagcagaagctaagacagcgagtgtggacgattgggacagctttgtaaacatgattccttgggaccagcgttcgcgcaggtgtgatacttccttgccagctaaataagccttcaatcatccacttgtttgcagaagataacccaggcttatattgatccagttagtcatccaaaagagtccgcaaggctgtgggacagtttggatccacagctccacaacgttatctgggggcccaagtcacttcgctcctttgggggagggtgcattcttgtgtgtgagtgtgggcacatgcacgtaccactgcttgcaggtggcagtcaggaaacaacctctagtgtcctattgtttgagtggaaatctctttattatctaatacctaaccgagtcaagcttcgggagtctcttgtcttttcctcccaactactgctgagcactggcattgcgggcgagcactcctgcacttggcttaagttgcctctggggatcagatttaggtccttacacctgtacgtctagcgttttacccacggagccatctcctcagccctctccactcttctgatttcacctctgatggtacgttcttccgatcagaatcaatgacggtgtttcggcagtcgtctctgcaggacaggcaaggttgaggaagttgggaacaagcaacctccttttagatgatggagaagctgcacgtagcatttttatatagtctgacttagtcatgtaaccacaggaagatgggggaggggcatgggaaaggctacaaaggctctaaataagtatccatgcacctctgtaaactcttaattctattaggggaaatgggccttggagaagggagtgacccatactggaagaccgttgttggtctattttaactactagctatatgctgtttgggcaatgcaccatgcccccagcatttcttgagaactttagactaggttcaaagggcaagccctgggctatgtgttacatgacaggcagaatacaaagcacagatcctataacccaccatccgggtacaaactgctaccaaaggagtttagggtatagaaattagaaatctcagaaatgaggttgcttcgaaagagcagaagagagcagaagaagatgattctaggtcagtggttctcagcctatgggttgggacccctttgggggtcaaatcatcctttcaccgagtcacatagcaaatattctgcatatcagatatttacattaaagttcataacagtagcagacttacagttacaaagtaggaacaaaactaattttatggctggggtcaccacaacatggaactatattaaagagttcttaacagcattaggaaggctgagaggctctagaggaagcaaagagatggctcgcctcgcacaaaggggtttgaggaagaagctgggtgcttgtttctcccgggtataaaaaccgacaagaatcctttagtgaattccctaattccaaaagaactgaccatacaacgattgtcaatgaaccaacagtgactgggagcacagagaggatgaactgagggacagggcagaagatcacagggtttcttatagaacagatttatggggaaattttaagctctttggaatcaccttggccaagtattaagtggaattacatgtgattaacgtgtattttctgaagacctgccatgctgaggttagtggatcccagctttttgttcactgtatatatttaaaactaaatatttcttccttagtctttattccacaaataaacctggtacaaagcgaccatcccttgttttttattctggagtttaattattaatttcagaatgaggtcctagatgtttttgctgtttgaaaagcactttcatggcccatgaggactatgggaagaacacagaatgcaaactctctaagtcttccagattacatctgtcacaggaagaaaaagcacgcacaaattatcacaagacaaaataatgccgtcatgggcctggaagggacctggggtgtcctcttgcctaagtgttccatgttgttagtgatacaaagaagcacaggaatttctactgacttagtaattcaaaacatacacaagaatgtgggcaaagtttttgtgagaagcccagacccgttggtattaaagtccttctaaaaaccaggattacagatactgtggtgtagtcatttgaattggacaaatacttgttggtgttgttatttctgttttgttggttttgagtttgagacactagtattgcatgcctaaaccatcacgcttggcttcaaatgctgtgtgtgtgtgtgtgtgtgtgtgtgtgtgtgtgtgtgtatgtgtgcacatttgctacatgtgtgcatatgctggagaccagaaaagtgtggcagcagctggttgtatgggcagttgagaggtatgtcatgtagagactcggaactgaactcgggtcctctagaagagcaacaagtgacttaacctctgagcaatctctccaacccaagtatctttgatacaaatactatttggttctatttgtaagataactgcattatttgtttaaatatccatgcgtggttgagcgtcagtggaatgggctagcaagtggatgaatatttatagagttgtacagtgactggcttctttcagtcacaacactagctctgcatggtggattctctgcctttgggtataataccaagaggatgtatttgaggccatcagacccttcagaaaagaagttctactcaagtggaccaactctacctttacccctaacatctttactgctgcaagatggggctgtcttgaccttcggtgttctgactctagcatgagatgagattctcagcagattctgagctcttctggctcatgttagcctagggtttcctgcttgatattaccaccaaacatcccgggctatggcttccatgtggctgctaaattagtacagaaccaagcattggagttgcatagccattttgcatattttttccaatgaaatgattgtaaggataacttttcaaatgtcaataggaaaagatgacagaatttggcatgaagtcatctatcttagcacatcttacactaagctctctgtttccaatttaaggtattagccaattaaggcatgttaaattaagcttctctatcttgtggtttaggaacaaactagatgtgataatacacattcttattttacaatatttaaaaaatgaatatatcctggtctaattacagtgaaaatattcttgtttgattatttcctattataaaacagtggttgtaaaacttaagtcccattttgacatgacatgtttgtttcaaattattatgaagttagttttttgtttaaaaacttagaggcaagaatagatacatatacagtacaagctgttaaaggacttagcgtaaaataagttatttcatttttttcttaggcacctcttctgccaacactttcttggaaatttaaagtgtttgcaaaatataagaaagcaaggttctttacaattgcctgcgtgatctgaacatggttatatggcattttttaacagtgaaatgattcacacttgaagaaaaccgtgctgactgtgtctttctctccccctctctcccctcaccactggaccccacagacgtcttgctggaaatgctttgacacacattcccaagggagcgttcacgggccttcacagcctcaaagtgctgtaagtaaaccaagtgttgtcgcttgaagacagtcctgattttcatgtcacatggctgctaattaatgtgcaaatatggggtgcaatttggatctttgaggtggctcaatgaagtccctctctgcctgtgctgatgtcataaaaccatgtcatactttggctgtgatctgtgtgtgacagtttctctcttcttctctaacattatgtctaaagtcacttgcctctaaataactaccttacctactcgcacatgcaagaatgtcttttgttctccatgtcatgcagttggggagcgtgtccctaaagactctggtcactaattgaatagctcactgtggtacgagcatatgagatcacagcttcaaatttccttgaagtttgcttccttaggatatatcaagtaaggacccactcaaacatactaagtttgggtgcataagtagaaagcctggtgtatggcctagccaagtggacagccattcattaagaaatgttggattagggatgtagcttagtggtacacttgccaactatacccaaagccctgggttctatccaagggagagagttggggagcagaagaaaggaagtcttaaatgtgtttatacataaatgtccttaacattcattgtccacttccaaatttgttgtcataaaattcagtactattgcattctatcttactttgaatttctattactgtattgagacaccaagaccaaaagcaacttggggagaagcgtttttacttggcttacatatccctagccacagtccttcgagggaagccaaagcaagaactcaaacttggcagaaacatggaagcaggaactaatgcccaagccatggaaaggtgctatttactggcttgctcctcctggcttgcagagcctgctttcttctagcacccagaaccaccaacccagagatgttaccacccacaataagctaggcctcacacatcaatcactgattaagaaaacagcctacaggcttctctacaagatcaggcttgtcttcttcttcttcttcttcttcttcttcttcttcttcttcttcttcttcttcttcttcttcttcttcttcttcttcttctcctcctcctcctcctcctcctcctcctcctcttccttctccttcttctcacagtcaaactctgtttcagtgcatcctggtttggagcatctaagtaaagaaaatggtaaaagtttcaagtcacttaaattttatccacaaaacaatatcttgatttaatttctttttcattgagataaaagttaactcttcaaaagcactggatttatttatgcctaataaaaattgctccagtgcccaagatacatataagattttaaaagcttaattaagtttaatattttattaaaaattaaattttatagcagaatcattgtttgttcctctaatattactgggtttggcttcccttctatttgggtcacttgtgctattaacagaaatattgtaggccatattgccaaccctgatgctaacttattttatatgttagcaccaggtatgataaacctacatctcagagagcccagcaagatatttgaaccattcaaaatgcatcatgaaattcaagtttaaatgttaagactaaaacaattttctcatgtctgtttatatacagtaaaatatttgaatggtgttaaataaattacaatgtagagtctggagagacggtctagtgcttaaggactgctcttaaagagaaccccaaattaaatgtcagcacccacatggcagttcacagccacctataacttcagttctaaatgcccccttctggcctccacagtctcctgtcagctcataaacatatagacaagcacacacatgtacagttaattaaaaataaataaaaaataaattatactgtaatcaagtacttcaattcattcaacaaactgtatatttagtatatgagttagtgtgtatatatgtgtgtgtaagtgtatctcaagccagcatgttttatttgaaatactagtatcaaatgaatggcagtggattataggatattaagtatatatgacatcgaattacacagaaatataattttaaatccttatttttaattaagcctgaactactcaagttttatacatttttcccaccacaacatcatttacttctcctaattttaccatatataattctaattgcaccatctttccattgaatgcttctcataatacactacacgtcccataaattaaggaaggtcattagtatatcccagctctctaaaaagtacctgaatcacagtatacactcagtaaacacttgtgaaagaagaaaacagacattctacacatcatcactgtcttaattttgtatggtgtgaacccactgtttcaagtttatttacagaatatttattgcacttagcaagaaagcttcctttgcctgatatgggtctctgcctgcaagcaggcttcatgtgcccagaatggttctgcacacattcttgctgcttcttgcattgcattttgccgaaacactctagacagtgttggcctgaactggttttgaaaatgagtcttagaagctaagcttgaatatggttcaagttggtccctcaagggttcatgtactagatatttggtcctagtgggggaatgctgagactgtagaaactttaaggggtggggcctgaaggccaccatgtccttagaagaactgttctcagaaggatcaataaaattctcaccaggactctgggtaattccccagagtgcgagtatgagttgaagaaagggcaaacctgggccttggagcctgcagctttccatcagaccacgtggttgcttccttgcccattcctatgaagaaaggaaggatttgtcattaaaaatctccttttatccattcctaactaaccaatttttccagtcttctaagtcagggatttagcaaggcttggcgattgtgatgcccaaagtgtcgtgaaacaaaccattgccagaaatcactactagatcgatgaaacagatcatgggatctagacagtcaagcagatcgcctctgcttcttggacagagtatatctagagatgtgatcaactgtacagccataaagctatgaaacactcactcagtccagtctagaggtcagccctgacttcctatgaaagagatttccctgcagaaagaaaacacagaggcttgaatctgagagcacagcttggaattaaccctccatgtaagaggtcctgagagaccagtgtgctcagaggcacacagatgggaaagacctggaatgaagaggtcgctccaaacgggttcagactcccgcatttaaaagagagttttgaaggttagaagaaaagcctcaagattgccacgttaggcagctcgagaatcatgttaaaacgttatttttttttctaagtgcaatggggagctgaagaaaaagttcatagggaagaaatgctcagactttgcaatttagttaagatccctaacacactttgagggttgaggggcagcaatgtcctgcaggaattttattagtgttattgctgacttagagactgatgttctacaaagatgcaactcattaaataacttacactaccttgacatcagagcaacggtgctcagcatggaggacctgcctgctatggagtatttaaagactgtgggagagctttctccaggtgtgatctcaatgtggagtgtgagccaggctaaaggaagttatcgcccattctccctgacctctgactatgccctgctatcagtgcaagccaccactaccttattgtgtaactctactgaaaggttgtataaggagccatcatattttacataggaaaatgtaggtgaattaggtatatcccatgcaaaaccattgaatagttgattagatttgtatgttagtttatttctagtattataggctttctaatggcatgtttatgtcaaagtagtattcagtagattcagttcaaaagcaacaaaacaaattgtatatagatatatacagattagatagatagataaatagatagagagagagagagacagagagatagagagacagagagacgagacagagagacagagagacagagagacagagagacagagagacagagagacagagagacagagagacagagagacagagagacagagagacagagagacagatagacagatagacagatagacagatagacagatagatagatagatagatagacagatagatagatgtaatacttgtttgaaattcctattaagttagtagaaaggtaaaagaaaagaagctaagataaaaagtcacattggatttagttagcagagtttgctttataaattttcacactgcttccttttaactaattggggcacaatcatacacagttcgtgttgtagctattattcaatgatttattatttggcgatggcccattgttttaaaatcgtattcttcccctgcctaacaagcttttctgccccactttgaagaaggcagttcgaggactgctcacgtttcccagtcaaccttaaatcgccatgccgtgcggagggaaatgatctccagggtcctccaaagtgctggagaaggaatgctgacgtcaggcatagggagtcagtttgactcatcctggggatgccctgtgtgactttcacttcttcacctgaactgcaaccccactgatttgtttggggtcactctttttttctttcctttttttttttctttttcttttttggtttttcaagacagggtttctctgtatagccttggctgtcctggaactagaccaagctggcctcgaactcagaaatctgcctgtctctgcctcccaagtgctgggattaaaggtgtacgccaccaccgcccggcgtttggggtcactcttattttaataaacagtatttcctttttcctaaaatgcccaagaatgctctgttgttccatgtcttcactggtttcccccaagatccctacccatgtttctgtccttgtatgaaatgccttcaggtcatgttatccttctcacaccttgttattaaaagcacaagccagggctggggatgtagctcagcttgtgaagtggttgcctgacgtacacaaagctctgggttctatccttgctatgatatgtagcatttcatacaggaggcatagcattgtatgcctgtaattccagcaatagggaggtggaggcagaatggccaggttcaaggtcacccttaactaatgagtttgaaatgagcatgacctacatgagatcttgtctcaggaggaaaaaaaaaggagagagagataaatatataaatgttgaatcaaacatctaactcatccattaaaaaattgttcctgggattgtcacatgtaacactgtgcgtctagtgaagcataaacaaataaattgactgtaaattaatctttcatggctctttaataggtaagtcctgatccaatgagattgaaagccagagcagaagcaccaaaattctcagcagcatagacctgtcgctctcctcatacaaactctcaaaagtggctgtaaaagtcatcttcatttaaagctatgacttgcataaggatgagcagagtctatagtaaaacaagagaaaagtcctagtgacccagtccagtaagaccaagaacaaagatgacagtggcatttgtcagctggtgttgtcttacatatggaatcttattgtgatctcttgcatctaatatttaaatattattgcccttgaacacattgatcccaagataaataagctgtttggttctgttatacaaaatacttaacccaatgaaatgccaaataaggctatcctcggcaaaagttcattttgtgttagtcaagaaagggcgccatcctccaacctcccagtaccaaaccaaaaccataaggtgatgggcaaagatcaccaaagaaacatcacagagagccataattctcccgttcaacactgacctacaatccagccttggtaggcagcgtgatgtctatgcataggacacttaaacagaaagaacatccaagaatcaggtcatcaattgtcacaagtctccattcaacaagatgacaagctgttctctctcccacctctacattcatctgttctcatttagccttgctgatcaaaagttagagagaaaaaagaagacaaaaataccagcaaagatgtttgcttagaggagcctgaggatgctgtatgaaatagtgactgccttaagcattcccagaaaagatgttaggaaaatacaaaatcacacgccgcctctagcgaaagcagttcgcattcttttgtacacttgtgcaaatgataaaatggaattatgcacccacatcatgaccaggacttcttaggctgttactataccgtgtattcagtaagcaaggtttgtggaagaaatcaacagccatgtgagggttttccatcttaactgcacactgcgggactataaaccctttaacggttttgtctctcactgaaacatcttgaacaaaaccagaattttctaattaactcactggggactcgagataacctgctctcgttctgccatctgaaggtaaccggatgagagatgagggcttaattgataattgggggttttgtaggatttatttatttatcatttgcactcacacacccccaggaatttaacctccccccaaaacctgttgtgcgtgatgctctgatgtttttaagaccctgggacagtgtctgatgctactgtgttggggacagcgattgttaattttcttttctgtctttgttgttgttgttgttgttgttgttgttgttgttgttgttgttgtttgcatggacagtatgctgcagaacaaccagctgagacaggttccggaggaagcgctacagaatttgagaagccttcaatccctgtaagtacagctgtaactgcaaaccatgaatctcaattgagaaggacctgacctgtgttatccaggagctggtggggttgaacggactagaagccttggccttagcctttggtggttccaggcagatgtttaatgacgtcttcagtcaaaagcctgaatatgttggtgtctccagagcaaacattcacttagataatcctgtccacaggaccattagtattttttttttctgaattcaaatgaaaaatgatgcttaccttttacctagaaaattggaatggacaatctgccattttggcttctttaatttgttttatctttaaactgtctgagcttctttgtgatccaaccttacttagcaaaataactacaagtgttttaaattccacattatctgtcaagggccctcaaattaggaaatccagatctaccatgtgtcctgatgcatagctactacataaaccacaagctgcccatcactgtacacattgataatcacaaacagtcccacagtgctcatctacataaactcaaagacctcacacagacagagacacagacacacagacacagacacagatacagacacagacagacacacagacacagacagacacagacagacacagacagacacagacacagacagacacagacacagacagacacagacacagacagacacagacacagacagacacagacacagacagacacagacacagacagacacagacacagaccagataaacacacagacacagacacactacaatggtgctaatgccttttgctcagaacacacctttccagcagaagtttccctcccagcacccacataaacaaataagtaactccccacaagaggagcattcataccggccagctgtttggggacttgggttggaagtaattattctcaaacgctactcggcaagtctctgccataactgttgtgttagtaaaccatcgtctcaccagaaggtaggaatggtaacagtacagttggatgatttctgacacacatgtgtgtcaagtgctctctaattatacctacacttgaggtcttcatctgtcaaacaaagcgctgctttctggtcctgactgatgagggagataaaggcacggaaaaaaggaaaaaaaaaaaaaaaaaaaagagcgaggactgcagactctagccggaaaaatcctccgtaaggaatccatcagttaataattacatacggtttgcttgatgctttctactgcagtaacgagagaagggggtgtgagatctgaagatgagaccttcattctttgatcttttccttttaatgaaagaaaatctgtgcttgaggtcatttcaagcttttttattctagtcaaacaaagtgacttcctaggttttcagcagcctatagataaacaagcgcacaagggaccctttgtggctggggctggggctgttgcatttccaacccctccttaatgacaggacagtgtcactctgcttttgttgagcttgctctacctgaaggaagcaagcagagggaagccgactgcctccagtagggctgtagtggggggatggggctaaatggaaattgagatactgacactgcccagtaggaactttaaacagctgcaaagcagtcagtagattctaggataagagtttgtaaccgaaatcccctattggctgaaagatcacaaacagaagggaactctttgagaaagagaaaaccatgagccttttcttcacttcagctgggcggcgactctctgataaaggtgttcagatttagtttctgccaggctagatatgtactgttcaccaggtgtctcccagtttctggttcacaaaggaatttctttctgaaaccttataaacacataagtgcgtgttccctgtgaaaagagtcaagggttaattttctgggatgacatcacatccgaaatgaagcgtctagacaggttctcagcccctggcacacaccgctttgtgtcagctgggttaggtgacaaatggtcacaaggtccctttgcccagagctcagtcagtgtgagctatgaggcaagggcagtgtacactggtgtgcttctctttgtcgctgatcacttgtgctgccttggtgggacaattaggatctgttcacaaaagattcgtgagcacaacttaaccaccagctccacagaccatgctgcaccaacgaaaggtgcccctgtcctggtttggaggtttggggaacagcaaactctattcaagttgtgttgttatcttgtgtgttaagcgctaccttgtggtaaattgtctttctcatgcttctatttaccagctcctaaatgaaagccttacagtaggcctcgtggtcctcccattccttatcggtttccattctgattccagactgtccacctggaacgcaaggacattcacttcagtatcaataagagcagggggtgggggtgaaattccatcgtccccactgtgccaatattaggaagtccccctaccaagtcacagcctcttcttggacctgggtcaacacttagattaccacatggccccattaatatatggaggttctattagtctactgtcttcaattaacccccattttcccaaccccaacacacacacacacacatacacacacacacacacacatacacacacacacacacacacacacacacacacacactgggtgtgggggacacactgggtgtgggggacacactgggtgtgggggagaaagaaactttctttgtgttttatattactctctaagaggcaatcctcgcattgcgcatgtcttcccacagagaaccttttcaatgttgatgataaatcattatccagagagccttggcacctagccacacctccagacaatgcaaatctgaatctctgagtattgccatgactcatgcctgtcaagaagcagcctgggggtgggggtggatgggggtggagatggaggttgcatttatcttggcttacagtttgaggggatccaggtacaggccatcatggcatggataggtggtatctggtcacaacacattcataataggaagcaaagagagaacaggaagcggagccaatgtatacaacctcaagacccgcccccagtaacccactcttcccagcaaaactccacccactaaaggttgcacagccttcccaaacagtgccatcatctaaggatccagtgtccaaacacaagaagagcctatgactggcattcccccaactcaaaccacagccctgaggaggggttccatgcattggtgttttctaatagctttgttgtatatgcaagtgcttcgtaaagttaaagcttggaaatggcatgttctgcgggtggtatgtatcccctcgggtgatatgaaaacctttctgagttctttgcaagcctgaaaacaaaaacccaaatccatactttgcagtccaatttgagctaataatataagtacaatagaaaagtaaaacattgccttgtgtataattggaaacagttcacctctcagcctgttgactctacttactacctcgggcaaataaagttaagaggccacatgctgtactgcccagatactcaaatgtgatgcctggaacagccagccgcaccagtgccaccttaacttctcagagccttggggcccagctgagcgttacttaatgagaatctttatttcagcaaaactctagaggatctgtatacgaaatatgcttgaggaattaaagtgttcagtgttctgttaccctaccaaacgatcgacacacccaagaaggttgagaagcagtaaacccccaccatttgtagtctctgccccacccacctacccttgccttcttggaggaaggttaagaacttgatccatggcaactggtaatgtttctgtgaggacgagacagattgttctcaggttgcaagggttctaattctccacttgttccccataaacaaaaactggtttgttcctaatgaaatgacataggtacatttgtgttcttttaactgtctcctgatgcttaccaactgctcagctgaagccagggaccagcagcacagaacatactcctgtacaatatgtacatttgacttctgacacgggagtgactgcccagacaccaagtgggtttttgtaatgtaatcaaatgtaacttaatttcctttccgtatttttggaagggaatagaaatgtaatcagaattcacagtgagttccatttcacttggaaacttttgacattgtagactaatgagggctagggattgggttacaatcatctgatgataactcaaagcctcgctctcccgcacctcccacctaagaaatcaatctatgtgtaaagactgcctcgtttgtgacagccattagtggatttcaaatatctcaaagttacacatgaagtttaagctgacctaggaaaattatacattcctatttgtccaagtagtcaagggattatttgaaacatcggttttaattccaaatgctcattagcaaagttaattgtgtaaaatatgcgtcaaagagaagatgagctgctaaataggaaatggaagcaggatcaagcatgtctttattattgactctattttctaattagctaatattcatctgcagggtataaacccaagtagaatgtacaattcctgcctgaagtatgacctgcccacacgtatcatgtacaatgtctaccccaggtctgcctacacgtatcatttccagggctacaatgtctaccccaggaccatgtaaaatatctatcactgacttcatcgagactcttcatgacttgtttctgcttatagttttctttaaaagagataataccctagatgagtctgggaggggaaagaagcagggtgcagttctgagccaagttaaagtaagctgtcctgggacggcaatgtgctctcctattgacactcatgagcctattgagttccagacccttgacatagaatgggaaggaagtaacaatggacaaggaagtgtgaccagacggaaagaatacaagaaagcctagagggtaatagtatacaatcaaaggggctaaaaataaagtggccttagcaccggtgacatttattccttccactaaaatagttaaagagaacatgagctcacacaacaagaaatatactgtttctatccctccccacccccaaagatgccaacatactggggtgggggtagacttggaagggaagctctagaggcctgagactctgtctattgaactaaagcaaatgcaaagcagcatccagtaaatccctatcaaaaagaaaaataggtttttggtttggtttggtttggtttggtttggtttggtttggtttggtttggtttggtttggtttggttttctgcttccccccagtttacacatgaggagggagcagttttcagaggaaagactctctctacataatatttgcaagcagagaagctacaatgggagcatcgtcttcctagatgggggactaacatgagtcgtctattttaaaaaggccacgaaggagagagtccaaggccaggtcttccagcttcagggctgtggtagtgtataaatggcagacccgcccgaaagggaaggagaacgcgcgcgttaggaaattggaagtcaaataaaccttttaaagcagagccgactctttggaaaagttaaccaggtaacagttgtgggaaggcgagccatgagtggagccaagtgtttccagatagatgggatgtgcggtggaaaagcaggagagaatggggaaagcagagactcttcgccatggtgacgagagaagccagtgctgtccccgtcctacctcatcctcgtgggttaggtgctagcattttccctttgtcatgagaaagcaaaactatcagactattgaccttcccaaggtttaacagcttagggggagaaaagtcaaggtggagatgtgtttgagagaactctagtctgtcagaatcccaaacgctgcccatttcatgcccctcgttctttacttccctaccggtgggaaatggttactggtcaaagagaaagcatcagccttgctggaaacacacacaccccacataggccagagatgtgactgtgaaccttcacatgaaggaatgggagttgtagtgctgccagagaggaataagtgaatttaagaaagagaagggaatcctattcaaacctgagcctgccagcccttgttaggatttccctggcatttggttctctgatcccttgtgcctttgagggggcaatcagttctctccagatgagaagactctgtgtgagaaagttcctgatagcacagactacatgttgccagagcttgctgggagggtggagaaaacctctgccatcaaggaacagagaccaaataagtggctgtgttgaggtttagtcctgttgactattggaatgctaagtgcagggtttggggcgccagatctggagcctgcatgtgatgctgtgtgaccctgcccccaagttacttctgattggtaaataaagatgtcaacagccaatagctggacagaagacacataggtagggtttaggatttggggggcttgtggtcagaggagaaccacaaggaagaagaagaaggtgaaaggagagagagaagccactgtagatgtatccaattatgatctcaaactttatcatggcagtggtggagttcattactaccctccccaatgttctgggttcctgaacgaaagacacacacactcattgatattcctaaaacaactcaatggccaggctacttcctaacctccaggtggctaatccacctccctcatatattcccaagtcattacttactaaaatctatattccatcttggctgccctggccccagtcaggcagccttcttgggaccactcttccccagctcctacatggtggctatgttctgtgtcctgcaccctctcaagtgtagcatctgtcctttccttctcccaggcactgtgaaactccttcctcctctctctgtccctaatccaggaatcctaaaagtcctgtctttgtctgtcttgcccaaccattggctgtcagcatctttatttattaataagaaccaactgggtacaggatcccagagtgtcttatgtgcagacattcatgggaacagttttggggacacaaattaacataagaatacaaacagctacaagccaccaagggttaggtgagtcgtgaaaacatgatcctgaaggctggaaaattggagttaagagcaccccaaataaaagatagtaagtaaatattcaaagttagtgatagaaagtagatttaatagcatagaaggtagatatctgcccagttcttgtgttgtttaaggcatgttataaatataaatgttgtgcatgtcttttatccaggagctgaatgatcaaaatggggtagaaacccaggtagggtttaaatttttctacaacaggctaaagtgatattcctgaggaagagatgagtatcaagacaatcttataagccatgttagggccagactctgtgtaagtacatctggggcacttgaaggataatatcaggcttattgcaagatggaacaccacaggaaggtactaataaggaagggaccagatctgcattgttgaggaagtcagactggagaaaggaaacctttatcagaacagatgctggagatcagaagaggaagatggatttgagaaacacctagaagatgaagtttccagaagtatcgacaaagaacaaagaaaccaggcatggtggcatatgcctttactaccagcacccaggaggcagatttctgtgagtttgaggccattcttgtctacatagtgagttccaaggtagtcgaggccacactgtgcaacccttctcaagagaagaagagtaggaggaagaggaggaataagaggaagaaggagaagaggaagatgaagagtaaatggaagaagaggaggagtgtggggaggggggggaagggaaggggaaagtaacatgaatgatctctaggtttctagtttctccaacagtttgcctaatgaggcagtgactgggataagcaccactgtagaggattgcatgaggagaggggatagatcaagatttctgtcttatgctttaggagaaagaactaaatacacatgacatgtagtttgaattccagagctatactttaaaggagtttggggtgaagcctacctcctaccatgcacgtctcttccctgaacacttcatgataagaacttgtctcactacttattttgaactgtctcaaaaaggctataaccatgcctgctggtttagtgatttatctccagcctgagacacaaagacagccttctggcattacttattgaaatgaactgaagatccagactctaagttgtattgtagacagctgctcggggttccctgctttggccataagctgtatatactcatctccctgtgtctaggctctaatctgtgtatggctttccccccacttcttccctggatttagttgaaccaatgttttctgcagagatagtagaattggcctacttaccagtttccccactctgttagttcagaactcctcacttcaggagtagggacggaggaaaagcctgctgattagaagaataaaatttggacagtagtggagacccttctaaacacaagagatggtcatgaacacaaagcctagaattactgtgggaaagagatagaagaagaaaaaaagttgactagatcagagaaataagagaaaggttcaaacagatacggtagacagagggccttgaatgtcagaagggaggcaggggctagatttgaaaggaatggtaatttggaagaaccagagatttctaccaagggaatgatataaaggccaatttcagagagattaatctggcagcagtctgcaggattaattgagaagataagggatcaaaggcaaatgggaccagctcagaagccgtggccgagatgcaggtgtgaaacgataagagacttagcccgggagtcaacccagagatgaagataaacggagagaaattattgagggatggctggaaggcagtgggagatccaaaagtagattcaaggattcaaatcctggtggttggtacctgggagactaaagaggccctaacacaaaaagagagcctttgtttccttcggagagaaatgaaacccaagaagtgactgccctcaatatttttgttgtagctggctccttgtcacaaaactcacagcaatgttgatctctgaaacaaacaaacaaaaaagatcaacataatgaaccatgcatgacctgaaatctattcttcatcggggttagggcacaacttggtggcagagcccccacctctcactatgtgggaagcttagctccatcttcagcaatgctggaaaggatgccagagagacagaggcttagataccccacctatttttatccagctcccgaagcaatggacaagaataaattatggcatttccatgaatatgtaaactctttttgccaagagacagggaaaaagaatttttactgtttcagacatatgtctgaagcaatgattctctccctgagagggccacactagctttacaagtgaattggaaagggaaaacagaagcagaaacttcccatctaagctgtcacggcccttttgtgaacctataccttgtcttcataagatattggaaatgtctcatctgtatgggaaatctattaaaagatggaatccctatgttatggccacaacacaaatgttgaataggaagagcaacagtgaaaatgattctaataacatagagaatccatttagatccatattgctgtattatatagatgacctactatcctgattgcactgggataatgatcttgtgttaaattcaatggctatcatccactggttccaggacacaaggttcaaaacaacaaaattttaccataatgcagaatctgtgcattttgttgaactatatttgaaaatggatttccagttgggtggttttcattttattaggcaagtaaagtgatcattgagaatgtctttatttctcagtttaccagtgacccagagagaacattgtggttccctaactaactatccatgccttcctcaaaatggtctcacagatgtaaaaaaaaaaaaaaaaaaaaaaaagtatctactctacaagagtggaggatcatatctttaaatttacaaaggaaaaaaaagtgctattctgtgaaacaccggtcatgaaaatgccatgctctgtaattctgtttattaccgagtccccacaagctgtgcagtacagctgccactgtcttcacacttgggcccttctttcctctcagtcatctatgttaataattgacactattatggtcatcctggtgtggaattagccaagatcaatggcttatcttgtgactaacgctttcttccttgtagttaatggctcatcaaagacattcccaaacaaagatacaagcttatgggatatgttggcaaggtgtcatagagaagacagataaagaaccattttcaagaataacaacagcagcagtgatctcacagcacctctaatccctacaataatgctgcttataaatcaagggttcctttcaggagaatagagcagattcacaaaatgtttctcttaagaaaggaaactttcagttagtgctttatgcataaaagcattaagattaaaacttcacacagaaaggggaaacaaagtgttctttccattcctggttaagaaaagactaacatttttcttgatgctttgtagctttgttatgtagaacacaagctattgcaaaactgcagtcagcctgcacatgtaattctttgtttatattttacataaaatagagtggcgatccttcttgctctcacatgatctctattactccatttgtccagaccagaaagctgactcgccataactttcttgcttccctttctagctagtgacttagttagcagccctagataaagcccttcctctccctttccacacctcttcccggccttcatctctctcaaaaggttgactacaattacctccattttttttctactggctcctcttacacattgctatgagagtgaacagtctacagtatttccacatctatggatcagtctaaagaaatgtttgtatatgaccttgaagatttcttagagaggatgggacatttcacataggcagatagtccagaagtcttctgaaagttaagctatccagactcaaagctcttgaaacctttcagggtgaagtggatggtcttgcccatgtaggaataaggaaaggcaacacaaatccacaagacacagtcctttgggctgcccagcttgaacagcacaatctctttggaaggctcactgtaacaggcaacaaagcatagagcataactgtaaaaggcacacactaaggggtgtgtgaagagtaagagaatctcgagttctgttcatctataagaccaaaacatggtgtttgcctggagagagatgtgaaataacaatgaattcaggaattgagagaaaaatggtcttctacagggagaaagatgctgctgctcacaaatctaaagactaccctcaaatattaacacttattggctttcaaacatttccattcaattcccatagtaattctatgatatattgtgatcctgctttatcagtgaaaacttatccaaagacatataagtcaatatgtctcaaaatttcagaattgataagggacaggatcttgacttaaatttgttggtgacttgcttgcttggttgactgttgattagttgattactttgtagttggttggctggctggctggctggtgtttggttggttggttggttggttggttggttggttggttggttgggtttttggtttgtttggttggatagttggttggttggttggttggttggctggctggctggctggctggctggctgactggctggctggctggctggctggctggctggttggttggttggttggttggttggttgggtttttggtttggttggttggttgattggttggttggttggttggttggttggttggttggttggttgggtttttggtttggttggttggttggttggttggttggttggttggttggttggttggttggctggctggctgcctccctggctggctnnnnnnnnnnnnnnnnnnnnattacatcctggcccttagcttagctttacttgtttttccaattcagtatgctttccagttttccatgtggccattatatacattgtcgtcaatgctgaaagaaaggagttaaagaaactggagatgagtcaactttttaagagcacatgatcattccagtggtcgtgagttcaaatcaccacaaaaagcagctcccaactgcctgtagcttcagctccatggaagccagagctgctttctggctgccctttgcactcacagacatatggcattctctctctctctctctctctctctctctctctctctctctctctctctcacacacacacacacacacacacacacacacacacacacacacacacacattttaatttttttaaataagtggtttaaaatcttcaatccatcagaagcaataacatataaggaacatgaaacagatgccacttcccatgtgatatcctttcagattgtatttcaagatcgtaactgagaggcttaatctgagttgaaagcaaggccatgtctactgttttttaaatagctcactttgctatgcataaccacatataggttctgtgccacccctgttacattttgattgaggcatcaaatcattgctagaactttctccgagaatgtgacatctgttacacatcaacacttgtcctgtgcctctgaaatgaagatgttatattcagtgatagattattaacaaaacatgaccttactgtatgtacgtatgttcactcatttatacgtacatacatacaaacatgtacacatgttttattactaaagtctgaaaagaaggggccagtgaagtggcttagaggaaaatggtgcttgctgccaagcctgataacctgagtttgaccaccagaacccgcaggatgtaaatagagaactaactgtccgcaaaagtaaaggtgcacagggctatgcgggtgtgtgcacacagggctatgcgggtgtgtgcacacagggctatgtgagtgtgtgcacacagggctatgcaggtgtgtgcacacagaggaagccagacaggggctttggatattttgaggctggaatcagaggccaggtctttgcaggatgagaatccatcattaggtggatgctaggatgtaaactctggtcctcatgatctcacagcaagagtcttaaccactgacttatctcactggccccagtgtgtagattttctttcttgtacaatacagaagccttctatttctctgtttaaatgtcacatttgtccacttgcctgaaagggccagactggcacagtgtgacccctttgctgactcactaggtaggcacaacttatgccctgccaggcttaaccttgttatgtaaggatcacctgcaaagtgagtagataattaattccatactccaatttagccttgggagagtttaaaattaaatcagatatcagtgaatggaagcagaatgatggttgtcagggccctgggggttgacggcaggaactggagaagactggttaaaagacacagagccttagtatgcataagttatggtgatctactgcactgtattatagtactgatctatatagtactgtgactataactaataatgatgtatacttgaaattttctaggagagtgcatttaaatgtgcacacacatgaaaagaaataagtatgttaataagatttatttgatcacttcacattatatacttgcaataaaaccctgttttatatatgtgtgtgtgtgtgtgtgtgtgtgtgtgtgtatgtgtatgtgtgtatatatgtgtatgtgtgtgtatatatatatatatatatatatatatacacaccacatatgtataccctgtaaatttataccttttttatttgttgatttcctactttaataaagtaggaaagggaaaactgaaccagacagtgcctttgagtataaagaataaattcatatctgaatgaagctggaatcccaggcaggctctgattctgaaacactgatttaggagcactgtctgccggggtttccattttcatagattttactggtgtatattaatttataaggtaatgggttttatcatgacatttttcatctgtgcatagaaaggacctcagctatacccatgcctgtgacactcttttatagggagttccctaaatgataaaattgtaccatggaaaagcatttcaatgctctgctcaggacacccagagtctgttaagaacgactggtctgggaatgctcattagcgttgagaatgtgacagcactgagcatttcagacagaaatttgtttaatagtatggccagattttaatctttcatctgaggggagcagaaaggataatccctagaggagcctggcccaaggaatggatgtactcacctaggggactgatgtcaggccactccttgctggtcccaacttaaaatgtcaaaggagaaagtccaggcttccatgctgacagagccttttgtagggctctccaacattgcgctggactttcaggtttgtcctatgcaaggcgtttgggagcgatttgtagggttgatgcctaagcaactaggttagaaagacgacgtgcgatgtgcgcatgccgtgcgcatcagaggcccacgctgtatggtggagtccaactgaaaagctacagttaaggcaatagttacgcccagtttaaatatggacttctagccaaataaaatcaactacctcctcacccttaatgaagttgtgctgtaccctagcataggcaaactgctgagaaaagaggtctgaggctagaatggattccccccaaccactttcagctcatttgttgttttcaactcctacaatcatggccggtcgtctggaagtgtgagtgggtcctggcaaagacggccaactcagaatgtttgttccaagtggccttacctcagttattactgaagcttggctcagggcccaggccagcaggggaaggggatgggggcgggggggtcacctgtctcattgatgggctaaaagtaaggaacggggagataactagaatgatgtatgtagcccaaaagtgaggcatccgctttccagagagattagctgtctgccaccgagggctttctctagttctagactgtttaaatttggttcgcaccagattgttttgtgattctcctgtgcttcctgcagctgtttagtcttaaatgcttccaaaacattatttttaatccgtcctttcatgattttctaatccttcctaatacacgagctgcaatgaaatgcaactctttaggttttttgttttttaattctagttttcaaaatcaagcaaatgtaaagtcttattaaaaatgagtggtaacagctatggaagtatgtctgattgacagtgattcagttgttcatatacctcgcaaaaaaaattttttttaatctcgaattacctccattttgtcatttccacaagcaccattaggtcactttaattacagccaccgtttctcttgaattatgacaaaataaatgtcctaccctccctcggctgactctgaggctacagcagcttattaaccagccctatttttagaactgtttcccattttaaaacaaaacaaagaaagaaaataagagaaacagaaagtggggaaaggaagcaagagttgtgaagctgctaattttattattcgtttaaactgtcagaaaaacaaacatctgcctgaggcaaatcgttaggttccgggaggcagccagcagtgtcgaagctcttcccaggggcagatcgaacagcctttcttactaattcttttcgaatattgaagcaatcttttcccagggcttaggaacaacccagtagattgctgtctcctatgttccaaacagtcttggatcgcacagccattcatttggcttggggtgggaaggaggcgagagaatgtctacattagactgtccgaacgggatgcaattttacaactccaggaagccacttccgatgcatgaacgcatggtacccacaagcctggaagagagtcagaacatgtcaagggggaggggagtcgggagatcaggagccggggtggaggggtggagggatagagggtgcgggggggggnnnnnnnnnnnnnnnnnnnnnnnnnnnnnnnnnnnnnnnnnnnnnnnnnnngaatcagaaaagaaaacccgtcccagtttgtctggggcctggagcttgacagtctgatttgctctgcctaatgagcacatgcaacttccagctgagtctgtccgcagcctaagctttgcgagctcccattctggcgctctttcttccaggcgcctagatgccaaccacatcagctacgtgccacccagctgtttcagcggcctgcactccctgaggcacctgtggctagatgacaatgctctcacagacgtccctgtccaggctttcagaagtttatcagccctgcaagccatgaccttggccctgaacaaaatacaccacatagcagactacgcctttggaaacctctccagcctcgtggttctgtaagtttgattgacttggctctctcttttatcactctctaaatcccctctgagatcttagccttcaagtgatggacctcaaaacttgaatggaggcacattaaaaggaaggaaaaactctgagaccctctctataaagacatagatttttccaattgtgtgaatgatttaaaaaaaaaaaatctatgaaatacctgatgagtggtaaacatctctggacatacaaaggtcaaaaagcccctctacgttagcagaatctacattttaaaaaaaaaatcatcgcaaagctaatgaaaaaaatctactgaaagataatttgttattaattatatattattatataaagctattaattatacaattaatagtgtatatatgtatatgtttatatgtgtatatatatatgtgtatgtatatatgtgtatatatatatatatgtgtgtgtgtgtgtgtgtgtgagtgtgtgtgtatatatatatatatatatatatatatatagagagagagagagagagagaagagagagagagacgtttttagttctagggatggaaccaggcatcacaaaatgctagctggatgagtattaatactttgtcagtaaagctacgctcacggccttgacaagcacttttttattttaattaagaaaaagaaggcagctcgttgctgggctggggatgtatcccaatggcagactgtgtagcatcagtgcctgcgtttgagacctagtactggtggaagaaagacaggaaaagatagggagaaagaggaaagggaggggaagggagagaagaagagaaagagagggaagcattgactctcgacagcgctcctgcttctctagagcttcttttcctctttgacatctagatttcttttggcttggtttggttcgggttcttgaaacaaggtttcctgtagactggccttgaacttgttgcgcagttgaagatgaccttaaagtcctgatcctcctgcctccaccaccttgatagaattctaagccaggcctcaggcccatctctccagttcagaaaacaaaatggttctcaacggatagtttggaattgagtcagtcttctttgacagaaaagctgtatggctctgtgcacgtaatagaataaccaacatttatctagtgctgatgtttggatgcagtttcgacctgaaggactataagatcagcttgcctgatgtgttagtccctgtgataaatgcttgagataaagctggacatgtggcctcaggccaataatcctagggccaaaggtatatagatcaagccaggtggggtatagagtaaaatcctgtaagggaggaaaagagagagggaaagagggaaggaaggagggagggnnnnnnnnnnnnnnnnnnnnnnnnnnnnnnnnnnnnnnnnnnnnnnnnnnnnnnnnnnnnnnnnnnnnnnnnnnnnnnnnnnnnnnnnnnnnnnnnnnnnnnnnnnnnnnnnnnnnnnnggagggagggagggactaactacttaaagggaagaaaggtgcatttgagcttgcaatttccttccacagttattgatctcactgctctggatccatggtaaagcagagcatcgtgaagagtaggtctacacggtagaccaaagatgctcacctcatagcagctaggaaacataaagcgaaacaggaagggctggggaccctatagctcctccaaggacaaggctcagtgacctagcttccctccactagaccccgcctctcacaggccctaccaccttctggtataacaccacacatgctggctggctgctaagcctccacttacaggtcttggccagctgtttatgacggcaaaccttactgaggagcaaaaatgcttcttttggtctctccctgtccactgcgttgctgacgttggttaaccatctcttcttccgtagcatatactcgtttgagggtgtggacccatccatcttttggttctctccatccccgctctcatccttgtcatgtaaaagactttgaatagggctggagagatggctcagcagttaagagcactgactgctcttctgaaggtcctaagttcaaatcccagcaaccacatggtggctcacaaccatctgtgattgaattctatgccctcttctggtgtgtctgaagctagcaacagcaacagtgtgctcacatacataaaataaataaatctttaaaaaaaattttttaagactttgaataaatgtcacataggtctcacctgaaaccaaaaacaaatttttgatttatttatttattaaaacaaagatctaagtctgggaaaaataaataaatttaaggggatattaacacatttctactctgaattctttacatgaatacaatatcgctgaccctgaagaagctggctatggcctttgttttgtggtgtgttttttttaattgattttttagaagatttgtatttatttattttatgtatgtgagtacactgtcactctcttcatacacaccagaagagggtattggatcccattacagatggttgtgaaggtggttgctgggaattgaactcaggacctctggaagagtagttggtgctcctaaccgctgagccatctctccagccccctagactaatttttttttaaacctctcctcctttaaacccattttccaaaatctctttgggagttaatttacttttcagttgtctacacagctgttctcgttgactctgacgtaactgacttatcaatcaagcctaagatgataattgtccacattaaaatagttggtcaacattaccaatcgtgggcaataaaaaagtctgatcactagtccctgtaactaaaatcctttcttcctgacctatagcccggtcctgtgactagagtcgagtccccgtgtgaccctccctctgtcccatgacctcggtgatgttcagcatctctgttgagcactctatgtctccaaggcacaaggagcaaaccacactagaaactacagtgaaaaatgtgaatcattcgtatcaccacacacacacagcagttatctcaagccttacgctatagaatcacatacagtgacggcagcacaggggattttcatttttatttttttaatgttcgtttcttaccatttgtgcatcctttatatgtctttgggtttaaaccaccaaaatgttgttcctaaattttctctgtcccatctgccttcaaggctgttcctgactgcgggtaatgctctcttccaggcatctccataataatagaatccactccctgggaaagaaatgctttgatggactccacagcctggagactttgtgagttgatcttctgtttgtttcccctttcccagtgttttcatgaatattctgacggaatcaaaacagccttaaagccaaacgtgatgtttggtttggttaattgcctgagccttaaatagatatttacagaggttttatcttacacacacacacacacacacacacacacacacacacacacacacacaccacagagctaaacaataaaactgtgattccattttaatctcttgtgagtggcaaattagtagggatggttaaagttaaatgagatcccgctaagtaagccgtgactgcttgcttaggaatgtgtgtcctccactggggagcactccctcttctcaggagcactgaattaggtgtgagctgagtcctctgctgaagggaaactgccaaccccgagatctaggcccttcataaggaatgaggttcatactgaagcaatccaagggaccatatcacttatggaatatgtgcatgaccacccgatatacattgtttaagccatttttacaaatatcttattagacagctattcctatcccatcttagagcctactgagttactttatcaggactacatatttagcctgtagcataattgggaattgcttctttctgtaacctgattcagacatccatgttcccatgtgctagagcacaggtatagccaatagctccaggtgctattttccaagaataggtcacaacttccactggacgcaattgcatgtgcctgtggtctcacgctagtcataaggctgaagcggtgtgtcacttgagcccaaaactctgaggttcacctgggccgatatagtaagaccccctaactcaacaaacaacaacaaaaatagctcagagttttgtttgttgatacttttgatataaaggagtcagtcagctggtcatctcctagagcccagagccaggataaaggatctcatggtctacctagagcacaggcctcctcctcctccaagaaatggacttaaatgccctgctgagccaacaaagtgcagaaaatgtggacagtaagcagcaaaagacctgagtgtactggatgagggaggcatttgcagggatgtcctcaagtcccttctcattttaatcctgaaattactgtaagtgacacaaggccttgtggcgatcacaccaccaagtcttccatgaccttagggaccatggttcaattgcatacagaccttaacaacttagccacggtctgtttagcttctaactagttctggatcaaccagcttcctgagagactctctctcctgggtcttctaataactgaagagcacccacagctctccctccataatgactgtcactctgctcacttctccaccggtgtcataaaggaactcatccaggcgtgaccgtgacagcacaggacagcagtttccaccagctaccacagtttccattggctgctacagtttccattgccgctaggaaaaagttacaatgtctctctccttaggtagtactttctcatccctatccacagaacaatggagagaaaaaaacaagcaagcaaacaaacaaaacaacaagattagctttctagggtgtttccacaaatgctttccctgtccccagtcctgagtgaggaaccagccttgcagaaaaaaatacaaagcaaaaagtttcaggacgaaaatctgtacatcttaactgtctggccccactttgcccagggctacagaggatcagtaaattggttattcccaacctcttcctttccctgactagaaagctaagtaatttataagggtccagtcctggtttaatcaaaaaaaaaaaaaaaaaaaaaaaaaaaaaaaaaaaaaaaaaaagaccatctggagagatttacaaacaggaagaaaatttatgtccacaaaagaccagagtttcctacctgcagaatagcttaaggatggcttctgccagacaagtaggaatctcgattcatgtcgaactcagccaaattatctttctcttaaaattaaatagcaattcttgtctactgaggaggatctaaccacatctgattgccttaccaaaagggttttctgtgtcatttgggaaatctgccctacccagggaccagacagcaattcctttttcatatgaagaggtaggtagactaagcctataaaacatgtgtggggaacgggatcggaagccatttgtgtcattacagatagagaaattaatgattccgagattctctggcgcttctattgctgtgtgtgagggataatacagagctttgcctcacagaccaagacaaacatcagatttctgaatggatcatcatttgtgactctagggaaactctagacttcacatccttgttaagagtcctctgtatcacctaaacctttccaaacacatgtcttgtcccagacttcaggctgagtgagacacaggctctccctctgagccagggacaaggcggttctcatgtcctgcttcctagatgggaaagggggcgggggggggggtaacaagaaaagagatgtatcctaggacagagtacaaacggcagctgcccaaattcagtgaaccaggtcccagcgaaagagctgcatccggaagtgacccgagcccaccaagcaagcatcactcctccttggaagttaaacctgcggcaggacctcccccctgtttaaaatgaaccagtgaagccactgatttttggcaggaaatttctgttctttggggtcgtgacttgtaatgcaaatgccttcaaactcttggtggccagggccctagagatagcttagcaggtgaaatcacttgcagttcaacttgatgagctgaattccattcctggaaccctccagaggaaggagaaaagtcagctcccaaaaagggtcttcttccacaagcaagcttggtgctagcacatacacgcacaaacacatacactcattcacacacactcaagcacacccaatacagtaagttgtttttaaaatattagcaggaagcatgccccaataagccctctcctggaagagaaagaagagcttttattgatgatatgggtctttggaatagcaaaccaacttaccttgtaaatagattaaataggtttttatttttactgaaaacaccatttatttattttcagagatttaaattataataaccttgatgaattccccactgcaatcaagacactctccaaccttaaggaactgtaagtgttaagacaggcttgatgaatgaactgttattctttgtaaatttattttaaaattggcgtgattattatgtatgatagctgaagctttttaagcttatataatagttaagtgcacttgaatttgtctttaactgatttctataatcaaaaatcaccagaattttaaaatgtacatctgtcctcccatatttgtgtgtaaaaacacatattttatatttatataacctatttcctaagtgatatgtatcctagtaccatttacaatcttaatatatttgtaatacaacagcagtaggatttagttatgttaaacatttctatgaatctagacatttttgagttgcataaatataaaattacatgaataaaagtatgtgtcctctgtatagtgataaatgccttcacatatattttattacatgcattattctttaaatgctaagtgaaccgtatttaattttttaagcacaatttcactaaaggtaaacgcacttttgaccattgggtgtttttaatttagtctttccttttatcaaaaaaaaaaaaaaaaaaaccgaatagcttctgcaagtactgtcttagcacttgaaaaaatatatataaacctgggaccttatttccacgaagcctatggacagggtaggttgtttataaggaacaaacccttgtgggttccacctcagagaatcacatatgtatcagctgggtagcgaactgacagagggaggcagccttgtcatgctgcgcatgcgtacagtcacagaaaacccaaagatcgctgaatctgcctcgctgtcattccgactacatttgccccaacggggaaatcgatttgttattacagacccactaatccttttcctcttaaaaaaaagattcctgaaatctctacttcactgcagctgaagtcaattttgccttctcccagcccctaactgggagtgatcttaagctctccgaagaaggctcccaccgctcaagctgttaagcgacaattctttactggatatcaacaaaacgattttccttttatagcgtaatatcctgtttccataaagcacacttgggatttgcacagcctctctccctctttcaagcctggagcatgggagtccctttccctctctgcggtaaatgaggacacacgcagttcatgatgcagggaggcgtgacctgtgctctggtactaaagacgctgattatggttacatattagggcaaagagggctagtaaataacacacacacacacacacacacacacacacacacacacacacacacacacacacaagactttctataacatttgtctctctttctagaggattccacagcaacaacatcaggtcaataccggagcgagcgttcgtaggcaacccttctcttatcacaatgtaagtggcctttgcgctccgtttacgtgtccttcctgacatagaacagttttaaatatgttgtgcctttaaatataatgcaattaatgttatgtgttcgcctgcattttgtcacagtctatgcagaaatctatagagaagtgccaacattgatatatttcatcaggtttcaactacacactgaaatggtactgaagattgctcttttaggatctgtggtgccccttaccttacagatgctatcaccaggctaatcttacaagggcttttgcttacgtatattttctaatgaataaaactgattttagaacatccaatgtgggctgccgagatggctcagtgggtaaaagcactgacagctcctctgaaggtcctgagttcaaatcccagcaaccacatggtggctcacaaccacccataatgagatcttgacgccctcttctggtatgtctgaagacagctacaatgtatacctatttataatattgaataagtctttgtgccagagcaaaacttcggccctaaacttcaattctcaacaaccacatgaaggctcacaaccatctgtacagctacagtgtactcatatacataaaataataaatagatctttaaaaaacaaacatccaatgctagatcacttagtcattcaagaattcaacccaagtactctagaaaaataaattattatatacagaaaggaagctgttgcaaacagtttgtctctggcttaaactgctgccgtgagtgtttaacggaaggaatatcgatttatgttcactgcctgtttgttcacaagccctacccttgagttgaatctaaacaaaattatgatgcaattctagaacggtgggtttattctagaaaggaaaatacaaggactcatatagtataaaaataaaatagatttataatcacagagtatcaataatgtttcacactcagcacagatagaacatttattaggcatcaacattaaaaaaaaagtgtaattatttggttggctcctagataaaagatgtatgtccaaggtaggtttagggaatcatattggccttagtgagatctacatagagaatgtaaataaaggcaaccgttgtacggcttggcagggattcttcctgtgctaacttggtagaagaggctttcggaaacgatgtgtcatttgtcacaaatgagctgcaaccccccacttagccttgactactgtgggggaggagggttcgaacacacaagcaaacagcaccattcatcacctctgaaatgcgctggcaatattttggcaaactaaaggctttgcattctattgcggaataaacattagtcctcattagagagcatttgcatactaaaagattagtggacttggcccgctcttcctttcagcccacgagtggtgtttaatcagtcctttggcatgttaatgagtcaggaggagcagccctcccagcctttggagccctctccactttccacagggatgcactttctcccctccctctgctctcctcacactgagtttccatctcttgtcaccggcttcctttccaacccaactcagccatctctgtgtgtgtttttgctccaagccctgtcatctggtgacccagccctcatttctgcctcttcgatctccaacccaaaatgccttctttttgttcttacttcaccacctcctgttagccatgccttcttgctctttaccagcgcagaggcgtctggcctccctgtctccgccatcatcagggatgcttgaagctgcatcctccttgctactctgttgctatggaacagacatccaggatgcaagctctgtaccctgacatccacagtcttccacagccaaccttcctaacctacttccccaaagctctctctgacaaggccataacccagctaactaagctagcacaaagattccatccccgcacgaggatgattggaattctgtctttcatatgtgtctcaaatggaatttcatagatttttctttttgcctgccccccaacaaatgagagagctgcctccagagaacccgggaccttttcacagtcgtggtgatattctgcagtagacatgcaagcacatgtattcataccttcccagtgtgtacatatctacacatgtgtaccagtttaattatgtgcatataagtatatagtatagtcaaggaagatgtgctatgagaattccatttgaagtcatcaagccactcttttttaaattctttcacttattcttcgagaagtccatgcacatatgccctgtatcttgatcacatgcaacccaggtttcccctgccccattgcagttctttcaatgattgtctaatcccaagggaaaggaagaggtgagtggtaaggtggagagcactcgggtgtgctaggtaacaaacgtgccagggtactgtgtgagccgtcatgcgtgcgttagcttttccagttgttagccaaagcctgtgaccaagctcattactctctaagcttaaattgaggatctgggaggctatgagctttcttggatagctgagcctccattttctcactggagaatgaagacagttgtgtctatgccgtcgatcacagtcgttgcacagatcaactgctttgtcagacaagagatgtgctgttgcttgtctgactccagctggtgccaggcttctggaagaatattttatcagttcctcttgaacctccatcatttagaatgttttccagtgatagcttctttattgaacaaatcttcaaatcactgcaatcactacttcacagtttgaacatgggtttgttgtatttaattgagctacccccatgcctcagctatgagatctgtgtagggctccactaacaaagcagttcagctaagttttgattacattaaaaggtctataaaacaaaatgttcttaagttttaatgatgtctcccgttttagattcataactaatttaagaaatttcttacactagataaaccccacttcttctcagttatgtggagtgctttgtagatgttatggtaattatatttaatcacaataaaaccttctgtaaatatagagatagtgataaatgataggtagatagataatacatagataaatgtgatagatagataatagacacaagatagaagatagaagatagatagatagatagatagatagatagatagatagatagatagatagactgaattgcaactagaattatttctttgttgagtattgaaagtgttgaggcaaagtctttatgtgcagttagttaattaatgcacttttcaacttcataactattattcatacaagccctgctatgcaaatgttaatttttttgtttttattaatcttggagggaggcttacaaagtgtgggtttcatcatggcatcttcacacattgttatttttctttgctctaactctcctcctcctcttcctcctcttcctcctctccctcctcctcctcccccaaagtctctcccctttaaattttatatagtaaagattccttatgcaaaatctcagaaagcaaaccaatgagacggctcagtgggcagaggcccttttctcccagcctaagaacttgagttagatgttgggagcccagatccagaacttatcctcttacacagaaagaactcacttccacaagttgtccgcacactcatacacactgtggcaagcactggagtccatgcacacacagagaaacaagcaaatgggtgaaggaatgaataaatgatcgatcttgaagtgtgagtggagacactttcaatgttcacttgaaactgagtaaccgggatgtacggtaaccagtaaaaaagaaaaaaaaatcagtaaaaaaacacagattcacattagaagatatgttgaaatatctattctcttgaccatcagctttcttataacacattggtgtttggatttttcagacacttctatgacaaccccatccaatttgttggagtatctgcttttcagcatttgcctgaactaagaacactgtaagtgtctattctcttaaagctgcctctgctcaacctgtagtattgctgagaagaccaaatgagtgctttgggggaaaaaatggtagtaaaagtgagccctttctagaatcttctccaaataacaattacacatttctcctaggactttgaatggtgcctcgcacattactgaatttcctcacttgacaggaactgccaccctggagagtctgtgagtatttgagcagacccttagctcctcccagaacacgcattaactttggagttgatcaacctcaacatccatgaatcaaaacacgtcagtgtgtgatacgggaatgaaagaattctgtctggcttgtgttttaacaggactttaactggagcaaagatctcatctcttccccaggccgtctgtgatcagttacctaatctccaagtgctgtgcgtatcagtaaggcaatgatgttgtataaacaggcaacttccatgtaggggtaaaatggcagacagtatctcaacaggcctcggaaacgaggagaaagctctttccctgcaggtctccaggaggtcatggttcctcctctgcctcctctgggccaggttcccagccatcaccctggtagccgtgacagcgtatctgttttcaagaggaaacagctgcccattagtgttgtagttgatacacatttcctttcagaaaatgaatgtgtacaagcaagaaaaacccctgcatttcctcttctaaaggtttcacagagtagaattaaatagactaatggaccaacagcccaatattaatgtcaaaaataaaactgtcaaacaggcaccaaccttgctagggagactgaacattttttggtacagttaaggatagcatgttccaatgtttgttccatctagtggccaaccagcttgaatgttatttctgttgcctccgatctcatttgccccttcctttcccatgttttgttaaaaagtagtttacagggatttgaatgacaatattttgacattttgctttggttttgttctgttctgttctgtttttttctgtcaacgccacttgaccctcttgtcttctcaagcatcattgggactcatgatagtccggaccctcagtctcttataaaatggttcttctctcgtgaaatagaagtctatcatcaatcagccagccacctattatgccagcataagtttttcttgccagctgagccagcacagtgcagatgctatgtaggaagggactgtctgctgcatgattgattctgcccttccttgtggtccccaggctgccgtgtcactgcagatgctcagcgacactgtgcagtagcagcacacaggattctttgtcagtcacacgtgtctgaaggaaggcgtataaaacaagccttgaactcccagcccacatttctctatgagaagcagctacagacataggaactgagaatcctgggtacacgatcaaagtcatgcttcaagaaagcaatgggattttcgtttttgtttacttttaccttggtataggtgtgttcacgtaaggttggtgcactaatgtcccataatgttggggtcagatgacaacctcaggtattgctcttcaccaagagcagccaatgcacttaaccactgactctctcctgtagtcttagcagttaggaaaaccatgtagaagggccataagttggaggccagcttgggctatagagcaacctgagctaagtaacaagtctgtctcaagcaagtaaacaaacagtaaaagattctattccttctgggtggaacttgaaatatgtgtatggacgtattcgggcttcatgatagtgtgttgccattctcaacgttccacctacaaagctcgtttgttctttctcacatacctgctgccaggtatcttctctttgaagcagaaagccaagaccaaaacaaacatcagtaagtgcgcaggccagcatattaaccaagagaaacctattgatttggggactacaatttagaaccttgatcttcactagagggtcttttggaagctttgatccaactggtctccaactggtggttcttctccatggtttccctaactgctaagactacagaggagagccagcggttacgtgcactgctcttggtgaagagcagcacctgaggttatcatctgaccccaacattatgggacactgttgggtattatgggacattagtgcacccacactatgtgagcatgcctatacaagatagaagtaaacaaaatggaaatcccattgctttcttgaagcatggctttgatcaacgtatcaaactctgctgtcgttcttattcattaacatataatgtttcatatgatatgattgtgagtgagcatctttcccctctttcgttaccgtcgtagaaatcacccagtccactattgaggccacaggtgtgttctcgactcacgagctgacattcttacagaagtcatcccactctgtatggggatatccatggtgtcactgtcataaggtgatcccaggattaaacttcagtaaagctatgaccatagtgcccgtacaaggaatgcttggcccacactaaccctggaattgttatgttgtgatctcagttcctggggaggctgaggcaggaagatgccaagttcaacaactgcctgagctacataatataagcacaagaaacaatggactccctgagcattctgaagaaattaatgtcattatcctctttgataatatgtttgcccatcttcataagtcactcctgttcaacaacatggcatatggttaaacagacctattttgcatagatatacaggttttccattcgtttgttttggtaagtttggttttttgttagtttaggggaaaggggtatagtctttcaaacctctagtgcttatatagaaacttgtgtgtaaaatacagatgtatacttacagacagcctcatttgaattatttatatacaataattgaattcttcctgtataaaccccattcattcaataaatgtaggataaatgataaggataggatgaactgatcaattataaggatagaataattaaaagcctcttagaaaaataatactgatttttttcagtcgttttgatggttttaagagttagaatcaagcatgaaaatggttagttgattagctgataacttctaaaacatgagacaagattttttttacctctatgttattttatctactagttttctttctttcttttttttaactttctgcaaattaccatggcttgttttagattagttatattatagtataaatatgtccagatgtttttgttattctgtaatttgttgagttttggctgaagcctgtcttagttgccccccccccccatggtgattgatttcaaagttagtgctatgttttgaatggttgggttttgtttttaagttgattaggaaagaaccagcaatgacttgtgttagccgtagagaaacagcagtttccagagacaagggcacagttatttaatttaatctgtattcatttcaggaagataagagctagaacattgtagatcatcactaacaaaataaataaattcattaagtagatcatttaaatcaattaaaggagtatcacagtaaatatatgagccccttgcctaatccagtaatgcctgtgtctaccttcgggctgtcagggctgtgggggagtccagagcttgccttggaggcacggccatgtcttgagggctttgaaaagaggaagacgcatttccttaagattaatgtgtaacagatttttctcttttgcaccttttgctttccagagatttgtcttacaacctactcgaagacttacccagtttgtcaggctgccaaaaacttcagaaaatgtacgtctttgaaagtccttaagtaactcagaaaaaaaaaaagtcagaagcccaaattcctattgttcagggtgaccggctactccaccccaggcctcactggcaatccattggcatttatccttatgcccacgagacgtggggtggagtgtgcgggaaagttgggtaacagagcttttctcacccatctactgtgacatccgttttctcctttgtttttcccagcccagtgtaatagggaatcgggtgagtctgagcttgggaacttttcctcttttatgcagacaaggtctcatgcaacccaggctggcctcgaacttactatatagttgaggctggccttgatctccttcctgtgccttcctgtctgtctcccaagagctgaatgacagacgtgtgtcccacgggctaagttctctcttccttttcacatacaacgaagcttccacttccgatgggtggtgctaattttgaatatggtgaaaccttgggtcacctccttcatccacaaaatgttaaccacattgctttgtgtttggtcagccttccattttcataaaaacaatatcagctccctctcatttcacacttagttttcctctctcagccttcgggtgatgaaggaagaaaatataaattcattttctaaaatgtaaagactggaggggatagaaagatggttggttcagcagttaagagcacatagtcctcttcataaaccagagtgtggacttcggcacccacaccaccagtcagctctcaaccacttgtatgtccagtgtgaggggtccaacttctcgggtctccactggccaccacactcacaggcacattcccacacacaaatacataattaaaaataaattggatgcttcagatggcctttaatgaatacactaagagtttaggaaacagtaaaagaggtgttctcaaatgattctttgtgttttagtggtggtgatggtagtgtgtgggggggggggggaggggctgtggagagaaagacaggtatttatgtacaagaccacacatgtagaaatcaaaaggccactaactttgtgaaatgagttctctccttccatcttccttcatattccagggatcagggggaatcaaacccaaagccaacagacttgtgtgtggcaagcaggtttacagatgaaatcttctcaagggtccctgttttgttttgtcttttgttttgttttgttttgttttttccagagagggtttctctgtgtagccctggctgtcctggaactcactctgtagaccaggctggcctcgaactcagaaatccgcctgcctctgcctcccaagtgctgggattaaaggcttgtgccaccactgcccagcttgtgttgtcttttaagaaaggctctcaggctagcctcgtagccagagatggccttgaccttccgatcatcctttccttgctgcctgggggctaggattgcagacatgcgatatccgacctggtttatgcagtgcagggacagaagctgaggcctcctgagcactaagcacatctttcctcccactgggtgatgacagtgtgtataggtattttgttctatactcccttgagagaaccagcttcttggaaagagaggcaatacttaggtgaaggtaaaaattgaagtgttatgtatgaaacaaaacccaatctcttgattgagagatagtcacacttcctttgagaccacatttcctctgctccgtggatgaaggacattcaatccgagtgtaaaaagtcctcagaagtctgttggaaacattaactctgacacccatctttggaactctttcttttcagtgacctgaggcataacgagatctatgaaattaagggcagcacttttcagcagttgtttaacctccgatctctgtgagtatgaccccctgcaccccctcagcactgactacttctctctgttggtccgccacattgtttttaccattgcattactggacatttgttttgtcattttaaaaaaataaaataaatattttgctcctcacaatttccaggaagaaatttaaaagtagtaaatttgtatccaggcatggtacatagacctttaatcaaaggacatgcaagacagaggcaagtagatctctgtgactttgagaccagtctggtctgcgcagcagattccaaatgagccagggaaacatagtaagactcaaaatataaatttttaaaaattaaaaataggagtggcaaatgttcgattatgctcccaaatgatcctttaaactgtactcttcatgaagaagaggaagaagaagaagaaagaagaagaagaaagaagaagaagaagaagaagaagaagaagaggaagaggaagaggaagaggaagaggaggaggaagaggannnnnnnnnnnnnnnnnnnnnnnnnnnnnnnnnnnnnnnnnnnnnnnnnnnnnnnnnnnnnnnnnnnnnnnnnnnnnnnnnnnnnnnnnnnnnnnnnnnnnnnnnnnnnnnnnnnnnnnnnnnnnnnnnnnnnnnnnnnnnnnnnnnnnnnnnnnnnnnnnnnnnnnnnnnnnnnnnnnnnnnnnnnnnnnnnnnnnnnnnnnnnnnnnnnnnnnnnnnnnnnnnnnnnnnnnnnnnnnnnnnnnnnnnnnnnnnnnnnnnnnnnnnnnnnnnnnnnnnnnnnnnnnnnnnnnnnnnnnnnnnnnnnnnnnnnnnnnnnnnnnnnnnnnnnnnnnnnnnnnnnnnnnnnnnnnnnngagggaggatggaaggaaggaaggaaggaaggaaggaaggaaggaaggaaggaaggaaggaaggaaggaaggaaggaaagaagcctgctcaaaggcctgcacaatgcccctgtctgcagtgtggagaactagagagcagagccggagaatctgtgttttcgcaaacctaccacggtttctgtttcagtacaactatactaggaaatgattctgtttctagggaaatcgatatgtaaaaatttaattctgttttataatttaaaatgttggaagtagttcaagcctgagaactcaagttcaactcctggacccatgtgaaaagcctggtgaattctcacgcacttgttatcccagcactgggaggaccgggagagggccagggtttactggccggccagcctagcccccaaagtaagcgcaagctcagagagagaccatgtctcaaaaaacacgggagacgacggtttgtagaaagactcctgagatcgtattcccgccaccacattcacaggaacggaagaaaagcctgtttaggaaccatcccccaagagcttggttagtctatgaactcagttcgcctgacgctgctcaggggcccagcatcggaacctgagaatcgtgggctctgacgacttctgatttctttctaatgtctgcttcttatcttaatgtcttagacgtttcaaaaatgaaatctccatagaagactttctagcacttgcaaggctctgactttgaaaggaagcgggagaggaagggaaagggtcttaaatttatagttcagattttaaaatatggaagttcttgcctctgacaagaattatctggagaagtttacactaaggattctatccctgcaaaattgtctacacttcaacatctatgtatgggcaggtagacttcatttctccataaaatatttttccttgctttgaaggattttatttctaacatatgctttcttctatttcacttatctcgatgaggaatttacttgtctgtatcttttggtgagaattttcttgaaaacatctgtttacttcagagcttgacctacggatatggtgtacacaaatgcttggttccatttccctgtgtatccaggatcatcttgtaatttaaactctattttcttgtcagaggaagaccctgatgtttgcctcttcccagcccccaatctccagtcattttagaaaaacgacaattaaaaatggatatccatgttagagtcaacctttctagcaggaagctaataagaactaaaatatctacctgattctttcaaacagggctgatttgaagttctgcttttagtgattttttttttatgtcgttttatctttatctgaaggagaatttgatgatcctgctattccacatttaaaaagaaattaggttggctagatactggatacatatgataaaaaatgttgagtgttctttttaacataatgttctcatttgtctttttttttttaaaaaccaggaacttagcatggaataaaattgctatcattcaccccaatgcgttttctacgttgccgtctctaataaagttgtgagtattgcttatttatgagactttttcaataattagggaccatctggttagggaaaatgttagctgtctgatgttacccccaatgtatagccagtgtgctgtgttctccctgtctggagctgcttcctggccaaggaagatgctctactcctcctgggccatatgagctcttatggggatcactgtgtgacagctgagcaaccagagtgtgttaagatgagaatttttttccttatttttttttttttggttaggtcctattctctttttattattattattattactattattattagatattttctttatttacatttcaaatgttatcccctttcctggtttcccatccaaaaactcctttccccctatcccctcccactgctcaccaacccactcactcactgacagaagggggtggcagaatcaaccgttaagcattttattagtccttcttatctgtcttcaaataaatgtatttccccccttgattttagatgcctctactttgcaaaatgaggccaaatatagaacaattttgatgcatttcaagtgtgtccccctagtgtgtgttctgattgtaaataaaaaaaaagctattggaaactaaaaccaacagaggttagctttaccattgaagggaaggacgctgcttgtttttattgagcagtgtaagtcatctttaggctgcttttgtaaacatgcacattttatgctgatggagactactaaaagccttgtttgatgttctgcagggacctatcatccaatctcctgtcgtccttccctgtgactgggttacatggtttaactcacttaaaattaacagggaaccgagccttacagagcctgataccatctgcaaacttcccagagctcaagtgagtttgtcattaaaacaaacaagagacatttgtgatcatgtgaaagaacagttgtcgtgttgtgatttcaatattggtgaggtcatgagacccttgtgaaatgcatttcatgccctcagtccccacccctaggacactgtgaggacaaggctaacatggaaaactgtcttcctgaccacatttcctttccctctcaaagatgcttcctggagtcacagagttcatggaaagagtttaaaaagcactgatccgtgggatacatagtgggccgtgtaattaaataacattgtaacagccctgcacttctgtttacaatttttccttcattgagaatgtggatgctctaataaaatggactaagttaatagttgaggaagcagtgccctttaaaaccgctatgcttatgaacaataaaggaacatcttaaaggttctataagcaaaattgaaaccctgcctgcacactttaaaatgaagaacgtaataaagcccccaaaagatagtacagaagagagaaaagtatattttaaattgccaccttgatcaacattttaaacaaacaacatgttgtttgtttctagtatgttttacatcatttaactttgttagaatctaatcgtgtgtagaatgttatggtatattttagttaattaacataattttgccataattttcctaccgttcacttcttaaaccattttattatggaaaattttaatcattgaaatcccatcactcaagttccttacttataaacacttcatgatggtaaattttaataactgtggttctaagtatcactagaaggaacaccattgtgcaaatagcttataatttgggtaactggtttaggttaaacttccaaagtaaacattatatattggatgaaaagataaacattttatttcatgacccatcatccttacgtgtatgtttttggttttgtccccctcctgtataggattatagaaatgccatctgcttaccagtgttgtgcatttggggggtgtgagaatgtctataaaatttctaaccaatggaataaagacgacggcaacagtgtggacgaccttcataagaaagacgctgggttatttcaagttcaaggtaagaactgatgtcatggggaggaagctatagtcagaaaggtcgtgaaacgttagtacatggaccctgaaagccaggagtccctgtgtaatcacccagcaaatggagaatcagtcttactctgtaaagactcacaaagacagaagaattgccgcctattttataagtaaattcttggcaattttatttgtacttagatcctccttagcatacacagtgctcaaagacgatcactccatcaacatttccaaactttttttttaaagactcttatcccatttttcaaatattctcctgtatttctcactctgagagagaaaaaaaaaaaaatccatgcttaattttctggcccagagaaatggggtagggggatgggacatttgaaattcctccgtattgcagcagaagggcctaagaattcattttctcatgaaactaattctaaatcatgttcgcctcgtcccctacaggggtatctgtcaggaaggtgaaatgagatcacgtctgtaaagccttggctttccttgccgtaagacgttacttaaacagaaagcaatgcatctccacacctgtggggatgaagaggcgccttgggcagcgccccctccactccctgccaaccttgcgagtttgcacaaagtccaacagaaaggcttctcattcttagggcctgaatgacttgttgattccaacgtgtaattcagcagccagtctgctaagtttccttaccctgtccgcatacccatcagttgatggagctaacagccttggtgtttgtttgtctgtttgtttgtttgtttgttttaggtcacacaacacaaatcgctctcttcctttggtttcagctcttcctgccccatcaactctaacctcttctgcttttactccttaaagctttaaaatttaaaaacatagagtccattatctttcagacactccatcagcccctgggattacataataacactaatgtccttcagggagtttattttcaagactggagattctcagccacgagccacgtgttagaatgacacagaaggttttgacaaattactgacaccagagcggggggagggggccaagttagccaagggcctggtgtgtaagcatgacgatctgatcagagttcagacctccaacatccacattaaacaacaacaacaataatgaagtgggatgtggcagctagcaccagtaatcttagtgttgtgagacccaaataactagtgtttaataaacagccagcccagctgaatgggcgagttctgggttcggtgagagacccttgtctcaggagataaagaagggaagtgactgggcagaccaaaacctatctatgacagctatgggtaaattcttggcatttatatttctacttaggtcctccttagcatacacagtgctcaaaggcgatcactccatcaatatttccatacttttcacgtattcttttgagaatcatgtgtacacacatacagagagaaaatactgattcccaagtctcacacaaaaccaagaatatgtgcatcattaggaaaagtgtatcaaattacaacttttttgcatagtttactaaatcatgcactttgctattactttgtcttttgcaatgcagaatcccccaagggggggaaaaactgatttttcttcttgtggtcagagtagcctagaacactccagcatagctattgtagtgttagaacatgggtcactcctctttcccagtgcctgcctgggtgctggaaatccaacctggcctctgagcacgctaagacaatagtctaacactaaaacgcatccccagtctccagaaaactgagtaagatgtgcttcctgcaccgggaaacttaagaccatcgcaagctccagggacccgcagaatcagcgggcttgggtgttttaacctagagactatgggaacgttcctccccacaccctattctgctgcggtatagccagagtagatggaagagaagaacatccacgaggaaccttctagccgacctgcagcaaagtcttgccttcatttctctttgtgacaatccacatcttgaggtcgaggtttctggtacagaaagacagaactaaccctcgaagcgtttctcattccctcagatgagcgggaccttgaagatttcctacttgactttgaggaagacctgaaggcccttcactcggtgcagtgctcgccttccccaggtgagagagacgtcagtatcaagggtccttgaccacggtggctagacttcagaagcgaaatctctgcccacatgtggctcctccctgggcctgacagtcagaacttgtaaaatacaaacaagctttaatcccctggagtcaccctccattcacaaatagaacttgtgtggagacctgctgactcgggctgatacaaactagctagcatgtgctccgaggcagataggattgaaaaagcagtgtcactactcagcatggaatggtaccacctagccttgtttgtatgaccaatacattttttgataatgtaaccttgtgaatttattaatattgatattttgaattttttctttttttataaattatatatatacattttttcttttttacatttcaaatgtccccccttcccggtttctcttctgaaaactccccatcccccctcctccctgcctctatgagggtgctccccaactaacacacccattcccacatcaaatcaatacatttttaaataatttaggtcttctttataaagaactatttagggactaggaatttagcccaagaataaagtacttgtttaatatgcttaggactctgcccttgctgggtgtggtgatgcctttagacctagacttgggaagcagagacaggcaggtctcataaagctcaaagctagcctggtctgcataggtccaggacagccagagctatgtagagagagcatctctttaaaaaacaaaaaaatcaaaacaaaaaatcaaaacaaaaaaatgaacaaaaaaaagaaacacgtgaaaacaaatagaatatggatgaattttaaaatattcaattcgttaaactgtcctgttcctagtggggaaacagtaggtaatttagtggggaaaggcactgattaatacttttttcccaattaatgtgttccttgctccctaagatgtccatgatgcgcacactcctgctgcctgccctgctctcttgtggcctacttccccacaagtctctttcttgggctgtggagccatacaagccattccggtcttagtgagaaacccaggcgatctggctttccacattgcccacactggaatgtcttgggagtgaagttttcccctttttatttttctatacatcttctggaaacacaagaacctggggcatcagtgggtcagtgccacagaatctccaaggcagaccctcccactggtttaagaaagaggagcgaggctcgcgggcaccgtggttacaatggtggttactgacctccgtctcttggcaagtttgctacatctgccagtccaatctgatacaacctctctctcttccttccctgctcaggtcccttcaagccctgtgagcacctatttggtagctggctgatccgaatcggggtgtggaccacggcagtactggcgctttcctgcaatgccttggtggctttgaccgtgttcagaactcctctgtacatctcttccataaagctgctaattggggtaatcgcggtagtggacattctcatgggggtctccagtgctgtgctggctgccgtggatgcattcacttttggccgttttgctcagcacggtgcgtggtgggaagacggaatcggctgccaaatcgttggcttcctgtccatttttgcttccgaatcgtcgatcttcctgctcactctggcagcgctggaacgaggtttttctgtcaagtgctcttcgaagtttgaagtgaaagctcccctttttagcctgagagcgatcgttttgctatgtgtcctgttggccctgaccattgccacaatccccttgctaggaggcagtaagtacaatgcctctcccctctgcctgcccttgccctttggggagcccagcaccacgggctacatggtggctctcgtgttgctcaactctctctgtttcctcataatgaccattgcctacacaaagctctactgcagtttggagaaaggagagctggagaatctttgggattgttcgatggtgaagcacattgctctgttgctcttcgccaactgcatcctttactgccccgtggctttcttatccttctcctctttgctaaacctcacctttatcagtcctgacgtcattaaatttatacttctcgtgatcgtcccacttccttcctgtctcaacccacttctctacattgtcttcaatccccattttaaggaggatatgggcagcctgggaaagcatacccgtttctggatgagatcaaaacacgcgagtctgctgtccattaactcggacgatgttgagaaacggtcctgtgagtcaacccaagccttagtatcctttacccacgccagcatagcctatgacttgccttccacttccggggcatcaccagcttaccccatgactgaaagctgtcatctctcttcagttgcatttgtcccatgtctctagtgactatgagagaggaacgtttttaagagttggaaacctgaaaagtgatttctatcagagcagtagctaagaaaagctgagctaaaaacctaccttaaaacccaagcaaacatctctaaattggtgtggaaacagtggtgccttagagcaggagagcatcattaaacaccgcttgtatcatttgttcagctaagaaggaaagccatcaagtcacttaggtgaacccagatgagaaaagcagcctgaaatgctcttcgcattgtagtctcttctgactcaccagcatagtctcccatagtgagaagactcgttggatgactcaatgggtgtatttaaatccacaaattccttgtttaaaaggttagagttttaag

SEQ ID NO: 51 - DNA, 3098 bp, Mus Musculus
atggacacctcctgcgtccacatgctcctgtccttgctggcgctgctgcagttggtggccgccggcagctcaccgggaccagatgcgataccgcggggctgcccatcacactgtcactgtgagctggatggcaggatgctgctcagggtggactgctcggacctggggctctcggagctgccctccaacctcagcgtcttcacctcctacctggacctcagtatgaacaacatcagtcagctacccgccagtctcctacatcgcctctgcttcctagaagagttacgtcttgctggaaatgctttgacacacattcccaagggagcgttcacgggccttcacagcctcaaagtgcttatgctgcagaacaaccagctgagacaggttccggaggaagcgctacagaatttgagaagccttcaatccctgcgcctagatgccaaccacatcagctacgtgccacccagctgtttcagcggcctgcactccctgaggcacctgtggctagatgacaatgctctcacagacgtccctgtccaggctttcagaagtttatcagccctgcaagccatgaccttggccctgaacaaaatacaccacatagcagactacgcctttggaaacctctccagcctcgtggttctgcatctccataataatagaatccactccctgggaaagaaatgctttgatggactccacagcctggagactttagatttaaattataataaccttgatgaattccccactgcaatcaagacactctccaaccttaaggaactaggattccacagcaacaacatcaggtcaataccggagcgagcgttcgtaggcaacccttctcttatcacaatacacttctatgacaaccccatccaatttgttggagtatctgcttttcagcatttgcctgaactaagaacactgactttgaatggtgcctcgcacattactgaatttcctcacttgacaggaactgccaccctggagagtctgactttaactggagcaaagatctcatctcttccccaggccgtctgtgatcagttacctaatctccaagtgctagatttgtcttacaacctactcgaagacttacccagtttgtcaggctgccaaaaacttcagaaaattgacctgaggcataacgagatctatgaaattaagggcagcacttttcagcagttgtttaacctccgatctctgaacttagcatggaataaaattgctatcattcaccccaatgcgttttctacgttgccgtctctaataaagttggacctatcatccaatctcctgtcgtccttccctgtgactgggttacatggtttaactcacttaaaattaacagggaaccgagccttacagagcctgataccatctgcaaacttcccagagctcaagattatagaaatgccatctgcttaccagtgttgtgcatttggggggtgtgagaatgtctataaaatttctaaccaatggaataaagacgacggcaacagtgtggacgaccttcataagaaagacgctgggttatttcaagttcaagatgagcgggaccttgaagatttcctacttgactttgaggaagacctgaaggcccttcactcggtgcagtgctcgccttccccaggtcccttcaagccctgtgagcacctatttggtagctggctgatccgaatcggggtgtggaccacggcagtactggcgctttcctgcaatgccttggtggctttgaccgtgttcagaactcctctgtacatctcttccataaagctgctaattggggtaatcgcggtagtggacattctcatgggggtctccagtgctgtgctggctgccgtggatgcattcacttttggccgttttgctcagcacggtgcgtggtgggaagacggaatcggctgccaaatcgttggcttcctgtccatttttgcttccgaatcgtcgatcttcctgctcactctggcagcgctggaacgaggtttttctgtcaagtgctcttcgaagtttgaagtgaaagctcccctttttagcctgagagcgatcgttttgctatgtgtcctgttggccctgaccattgccacaatccccttgctaggaggcagtaagtacaatgcctctcccctctgcctgcccttgccctttggggagcccagcaccacgggctacatggtggctctcgtgttgctcaactctctctgtttcctcataatgaccattgcctacacaaagctctactgcagtttggagaaaggagagctggagaatctttgggattgttcgatggtgaagcacattgctctgttgctcttcgccaactgcatcctttactgccccgtggctttcttatccttctcctctttgctaaacctcacctttatcagtcctgacgtcattaaatttatacttctcgtgatcgtcccacttccttcctgtctcaacccacttctctacattgtcttcaatccccattttaaggaggatatgggcagcctgggaaagcatacccgtttctggatgagatcaaaacacgcgagtctgctgtccattaactcggacgatgttgagaaacggtcctgtgagtcaacccaagccttagtatcctttacccacgccagcatagcctatgacttgccttccacttccggggcatcaccagcttaccccatgactgaaagctgtcatctctcttcagttgcatttgtcccatgtctctagtgactatgagagaggaacgtttttaagagttggaaacctgaaaagtgatttctatcagagcagtagctaagaaaagctgagctaaaaacctaccttaaaacccaagcaaacatctctaaattggtgtggaaacagtggtgccttagagcaggagagcatcattaaacaccgcttgtatcatttgttcagctaagaaggaaagccatcaagtcacttaggtgaacccagatgagaaaagcagcctgaaatgctcttcgcattgtagtctcttctgactcaccagcatagtctcccatagtgagaagactcgttggatgactcaatgggtgtatttaaatccacaaattccttgtttaaaaggttagagttttaag

SEQ ID NO: 52 - protein, 907 aa, Mus Musculus
MDTSCVHMLLSLLALLQLVAAGSSPGPDAIPRGCPSHCHCELDGRMLLRVDCSDLGLSELPSNLSVFTSYLDLSMNNISQLPASLLHRLCFLEELRLAGNALTHIPKGAFTGLHSLKVLMLQNNQLRQVPEEALQNLRSLQSLRLDANHISYVPPSCFSGLHSLRHLWLDDNALTDVPVQAFRSLSALQAMTLALNKIHHIADYAFGNLSSLVVLHLHNNRIHSLGKKCFDGLHSLETLDLNYNNLDEFPTAIKTLSNLKELGFHSNNIRSIPERAFVGNPSLITIHFYDNPIQFVGVSAFQHLPELRTLTLNGASHITEFPHLTGTATLESLTLTGAKISSLPQAVCDQLPNLQVLDLSYNLLEDLPSLSGCQKLQKIDLRHNEIYEIKGSTFQQLFNLRSLNLAWNKIAIIHPNAFSTLPSLIKLDLSSNLLSSFPVTGLHGLTHLKLTGNRALQSLIPSANFPELKIIEMPSAYQCCAFGGCENVYKISNQWNKDDGNSVDDLHKKDAGLFQVQDERDLEDFLLDFEEDLKALHSVQCSPSPGPFKPCEHLFGSWLIRIGVWTTAVLALSCNALVALTVFRTPLYISSIKLLIGVIAVVDILMGVSSAVLAAVDAFTFGRFAQHGAWWEDGIGCQIVGFLSIFASESSIFLLTLAALERGFSVKCSSKFEVKAPLFSLRAIVLLCVLLALTIATIPLLGGSKYNASPLCLPLPFGEPSTTGYMVALVLLNSLCFLIMTIAYTKLYCSLEKGELENLWDCSMVKHIALLLFANCILYCPVAFLSFSSLLNLTFISPDVIKFILLVIVPLPSCLNPLLYIVFNPHFKEDMGSLGKHTRFWMRSKHASLLSINSDDVEKRSCESTQALVSFTHASIAYDLPSTSGASPAYPMTESCHLSSVAFVPCL

SEQ ID NO: 53 - DNA, 146077 bp, Homo Sapiens
ccacaccgctcaggccgcgagcagcagcaaggcgcaccgccactgtcgccgctgcagccagggctgctccgaaggccggcgtggcggcaaccggcacctctgtccccgccgcgcttctcctcgccgcccacgccgtggggtcaggaacgcggcgtctggcgctgcagacgcccgctgagttgcagaagcccacggagcggcgcccggcgcgccacggcccgtagcagtccggtgctgctctccgcccgcgtccggctcgtggccccctacttcgggcaccatggacacctcccggctcggtgtgctcctgtccttgcctgtgctgctgcagctggcgaccgggggcagctctcccaggtctggtgtgttgctgaggggctgccccacacactgtcattgcgagcccgacggcaggatgttgctcagggtggactgctccgacctggggctctcggagctgccttccaacctcagcgtcttcacctcctacctgtaagtacttccccacgtcactccgggagagagactaagaggggaaggaaggttcgtccaaggcgaggctggaggctcctcggcgcccgcctgctcgtgggggaggggggcgagtttgtcaagggcatcctggccaggcctgttagggcccccagagaaatgcacgtgtctcggggagtagcgtgccggcactttctggacccgcagagaaatggcttcgagtgcaacccgggaaagcgctgctgcgccgcagcttcccagtccagcgctagaaacatcgcagggcgaattcctgcaaatgcaggcatttgcgtgcggagtggacatttgtgacccagagcctggtacccaaaggcaggctgccatctggtccccgccccaaccgcctctctgcgtctagtcgcattccacgaaaagatggtctgtagaaagtttccccaaaggagaaacaacttgcccagctccaaagggtttttagtctgcatcccttgcactgtgacgtgatgtaacctttttggggttttttcctcttttcctcccttccttcctcccttcttccttccttccctccctcctttctttttattttctttcttttttaacggcgtgattaaaatgtggcaaccacaaaccccgattagagctgccagaacgttatctttacctttggctgcccgcgccgccctttgaagtgcccgcggccgctgtgtaatctttaaccatctcttcccccggggaggaaaggggaagtgggctgaaggctgttgggctggtaaacagcggcaccgacacccaaagggagacctgaagctctctatcatccctgggggattctcccaccccttctctccccactgcaacttccaaagccctgaggcggcggctcattgcgtaattttttctgtggaaaacccaggcccgaaggtaacaggtagttgggtgaacgcggtgacccaggaggaaccctattctcggagaccaaggcgactactctctccacccccgtgcaaagcatctggggcttcattccttccagcagagaggccaggttctaggccactctgggaaacaggtgctccttaccacaaggtgaaacatttaggttttagatcaagacattgcagcgagcccaccccaagcccatgcagtcccagttttcggcttctctgatgtaccttggcaggagagagttgggatgtttgtgaaccagttcttccatctgtttagttgttttctggagggaagaaacatgaagaggcttgcacaacattttccactaggtagtgattctttttctggagacagagtgaggaagaaaaaaacatcttttacttgctttaatattgtctttaaagaaaggtaccattctgctagattttaggattggtagatggcaggtcgcctcctcctctaccataaagctattttgactgctttttcttttttacctgaaagaatgttaaaactgtttccccaccaggtttcccttcaattgcactcgtgcatgtggtagtgatatcgttccaggaatggaaatctctcctaaatgatcacgctctcagaattcacatttcctcctcctgaacagctatctctactacaaagcagaatactcatccccaaccactctagtttaactgctaaagtcagtgttgcaaggatcccgcgctctccaatgcagtgaatttctgagaccagtttggcaattttgcttggcagcctataactcctcttccccatcaccctgaagaagtttgactgtatgcaagggaggtgtgcagtacccccagacacttaacttactatttaaatcatacattcattataaaatatgtttaaggatacagaaaataagcttatgaatagttccagattgcttgcttctctcacttgaaagaacaaacatttgttaggcttccgttactaaaagttggcataaaattctgctttaaaccatttcccacatacctcaaatgcatttaactgtgtcctccatgtgctcaggggaacttactgccacctactgccaatgttccctatctatctatagatagaacaatctatctatctatattatagataacctcttgaagttaagatactattaggaaattaagtgccatattattctcatgtgatgacagcctgtaccctggcctaagaagacattttcccagtgccctgtgaaatattaaactcagagtatctgtaaaaagtgatacagtaaatgttaaatacttatttctaatgcaacacagttcagggaatatgagtgctgaatatagaagtcagtcctgaagtaaataagcaatgtggtgttctttataatgtgtgatttcataatttggtgtccctatatactaaaaaatgccagggcccatgggatgccctttgagcaggtattgagggtttgggggctttgttggtttcttacaaccagaggaacgctgtgcagacattaagggtagatgatgccctcttttggttacacctagtattctctgaccatttctgtcttcacttgtgcagccaaaacataaaagaggaattttgatttattcatattcaaataaatgagtatgtgttctactgattttcttatttgaaggaataacttccctttgatgttgaaagggaacacaaagttatagctccactccactggggcccagtagaaattaagccttgatgaaaaagttgcagtgtaccaagactgatgtggtaaaaagccagaactactatcttttattatttgtaagaggttatcatcatttatttagtcaaaatgttatcacccaatccccttcaaaaaaagaacaagcatttccttttcttcaaacagattgatgatggcaagttccagctgtacacatttggcaagtagctgtacacatttaccacaatctgagagctggctagtcagacttgtaggtaaagaaagtttcctacatctcttcacagaatgcaaacactatttatgtgccattttgtaatctttttttcccagaaaagcaaaattttaagccagtgcaaatattaatattgattctcttttcttactgagctgccttccacagtaggtctttaactggaccaataaaccgagtgaaaacgctggaaaaatctcagtcttcatctcttctctccccctgctgccccagcaagtggttatgggctctgattttactaacaggggctaataaagtttacttagcagaaaataaggaacgcaccaaggttgagatataaaagcagacaataatggtttacaacatttaataccagttgtgatctgtcctaaataaagtagttctaacatctaatcttagtataggtaagttattttaatgcatcaaatgtggacatttttattaatagggtcttaaaagtaaactcctctctgctactttgatgtgtctgtctagttagtgtgacattcagatagaaaactgaatcctaatgaagatcctaatataataaatatacttttctttattggtccagaacagctattttattttaaaaagaaaactgaatttttctttgctgttccttaaaggcattcacatttcatccacaagcaaatgtatgttatataaaccaaagggaccaagagaaaagatttttttttttaattatatgtagtttggttactttttcatatgtaactttgaaacaaaatttaattttacacataactcctaaaactaatgttaataagaatggaacaaaagccacaattagttaaatcaggcaccgccttaatatcataaatgtgttttaagtgtttaagatgcagtttcaagatgaaagatcctttttaggatcttctttgaaaatgagttaatatagttctgcttctcttatcttaaataaaagaaaatgtactttagaaatgattacaaaaatagtaactcttataacagccttaacatttagatcaattacaaacattatacagtttgctctaaaatgtacttttagaattgtttaaaatataatgatgccagtaaattttcttcattttaatgaagttctttctttttctccaggattcctggggattttttccatagtgtttttgttatagggtgaattattaaaactaactgataattagtctaagtaattttttaaagtagtgagctcattcaaacaattttgtggcataaatttaaaataaatatttactgaatatatttaacatatgcatggcagagttggtgtgacaagaatgaatttttacatataataaacatgatcttcagtttttttctttcttccttatgcattttcctcaaagtaaaggagttctgatgtagcaacaaaaggtagcaatcataaatgagttagaagatcggaatcaagaaatagcctgtgtagttaaacaacatcatgttttgataatagaccagtcacacttgggtgtgtttaaagaagtttagaaacacaaaactggtctatgatttctgagagttaagtattttatctgaactattttattgttttcagttttcaaaatatatatctatcaaaggcatagaaatttcagaccaaacaattaacccaataaagctatcaaaattaaagacattatagaatatttataattttataactgatacttaattttgacttaccttagcaaagcatttttttatatttcttctatcaaattcatggatttaagtcattttagctacaaatttaagtatgtttctgaatgatctaaatcacaggccataagacagaaatgaaaaacagtagtgggttgtccaatgagcaattttgtgaagtaatgtttttgtttggttcagttattatgcaaatttagaataaagctaaatggcacattttcttgtaaacacttcctcaatagatacttctggtaaactgaagtcttcatgagaagacaaattccttcctataagattcaaattcctcactccagttgcaatattttcctttatagagcctcattttgtagtagagagatgaatcagactggcactaaagccacaactggtatattacaaataaaacaaaatgagctgagtatctagtcctgttgctatttttgatgtatcttggtagaatttcacttgttaaatcggcccatgagttctagcccactgcaactctttcattcccagatctgtcagctttaatccacactttaatttaaccattgtaaataaccaactacatgcccaatttcacctatggaactctatgccaaaaggagacatttcatagtctataatgtggaatttttaattaaattctcataattcaaaactgattttgttatccataagttatatggtgggaagcaggtccgttcctaaaatctgtggcatttttctgtttaatggattaagcccaatgggaatgcctggcttgaaactggaacggagaaaaacgttagtcatttgatttcaagaaatggaataatgtatctagtggtaatgctaaaaggctcttaacaggatgttagcattagtggaaaactattcaaaagatgtttcataagcagaagtgcttccgtatatcctcatgtattacttctctttttaatgtttaagtctggaattggagacgctgagatttacttggagagtatgcaaaggaaccaactcctgaccgtgtaaacaacttcctgaaagtcagatggaataacaccctagggtttcatggtgggctctttccttcagggcttattcttcttctttggctgtgagctcctccagggtagggcattttccactttataccccaagtgcccataccaatgcctggctcttaagggagttcagtaaataccagtaatgttgaattgagtagaattggctgaaccagctgctgaaatcccagtggctaataggagtcagagaaagacaggtgagaactactagtccgcaagtacaaacaacacaaggccactggccacaattattgtccagccccatttgaaatacagctgaattgtgttcagtttaaatgatgcaatgagttgtttattttaacacatgccatgatttacatgtataaattactttattattgtaatagcaatagtcataataactgatagttgtattgtgtttcctaagtgttcggcactaaatacttcactcagtcataggccccacaaagatactaaatactttactcagtcaataccccccttgtggtggggcaacttgtgacgttaggaatgataatagtacctcttattaggtaagcttactgtaagcttatttcaagtatttccattgctcaaaatatttttggatttcctttgaagttatcttcagggccagtttacagcaacccaagaaaacaggctttccaatttatacttatgccttgtaatcattttaattggtgctgaaatgttttggcccatttttcttttcaggaacacaatttatgaagccctaataccagaaatattttttcagggaattccagagcaaaatgcagttttcaattttccaataatgtgagcattacattatatagtttagggccaatattacaaatttagtagacatctttttatatatccattttcttactaccacagaaacaatttttcttgtcttcaaatcagagataagttgcagtagctgccagagtattgtgaagagggatcaatagattagtaaccacctaggcaagaataaaacttttttcctataaccagatctatgtgtcaaattaagtagctgcattctttggaactatttctcagttcagacagacatgaactttcttaacaggcaaattctatttgagcttgtattcacctttaaaatggatgagatgcgatacattgttgtcacgaaggtatcagaatgttattcatttgattcacaatagaaaattgtttcaaagttttatcaaatcccccaacatatttttaaactttgcatgctttgacaattagtgatacagacttatgtgtcaattagaaatctgcataagtcatagaaaagtcccctccttcaaataatgaaaaaccttttctgaactatgcatttaatttcctcagtcccttgattcagcttattaacctgatatacattaatcatttattgtattacaaagtcaacagaaaaaacagtactgatgtttagaaaaattaggatatgtttggggtacagtctctagaatgttttaaaatagtactctcatactccagctttttactgacttaacaatttattcaacaatctctaattttcaaatgtcctattttttctatatgcacattttccacacactcattttatccttcttgccttcagaaggagtgtttgcttcttcttcaaacaaggactgtgatggccaagggggaagaaagtgtctcgtgcacactaatacacacaccaacaagaaacaattccctttgtgccacttgcttggcagaaatgatacaaacattggcagggcatagccgtgaagggccgaccctttacaagggagagactgtggaactggctgcttgaaggcaccttcagttcggttcagaaactgaaatgcagaagacaatcgtcctggcaaagggagcccaactccagctgagaacgcgtgcatggagctgacctccctcctcagcctgccaggcgaaattaagctttcctcaagtggtcccttgttagcctgtccttttttccgtgttgctcatctttcacaactagaagccaagtgtttcaaactgttcctcagtttgcagccaaattcctttatttcccccttcctcctcgtctccctcacacacacacaaacacacacacacacacacacacacacacaaactgtggtgactaaccttacatgcgtgccttcttttcaaagcctacactgagaaaataaccttagaatttttaagtttcactgaaacactggtaaatacttttgttctccttttttcttgaaaccttgattaagtggagcagagacctctacaaaagatgtcgatttgtaaaaataacctttctttaatcaaaaaagccacaaaagtgtacttctcaggaaagtagaaaaccacacatgatctcaagtggaaaaaatataaagaatttgctgaatttttaaccttagtacataacaaggatattattttaaagttggttggttaatgtgggctgtgttagaacttccaatgtgttgtgtttgggttgatgcaatgttattttaatgagtttattggttcgatgcacaaaacaccacatggtgcttgaaggttttaggttataaattttctcgtgaggcacttacttgaaggaactctgttacataatcaattggtctttaaatctatccgcacaaaatataacctttcagttttttacatatatggttgttattatgtgattatgaaaaccaaataaaaatttccatagaagatgttatattccttaatgaactattttgtatatatattgaagttttcacaataaacatttatttcacagtatttgttgagtgaatctacaaagtgaatttggagtcttctagtaaagactgagaataaaggatcttcctctttattttgtctttgtacttcctgtcctgaagggacccttagcagacatgcctgcatttggcaataggcctactctatcattgttacagtgttaactgtacaatagagaaaagcctagaaaaagaatggcaagagaggtggaagggctaatggaagaaatttgcgacccaagggacagtgctgacggaactgagagactgtgagttactggactccactagacacctgttcccaggggatacgcttctcctgtgtctctctttgcctttctccatccctcgcttcaagatagtatcagagaactgaaaggatgccttttccttatctcagacacttttcccaccaagggcgtcaaactagaagatgaagggaagtttagaaaaaagagtccttgggatttaagtatcaactccagtcaccaaaattggggtctctgattttaatttggaaaagctacattactgttcctgtggtggaagatcttaactcatgcgcagcccctgttcttcagcagctgttgttctctgggactcagtgcaatatagtacaggaggaagttcaagatctttttttattgagtcttcaagcttgggtagcaaaaggaaatcctagttaaaccagattctcccaggatgtgagcatatctcatttgaagatcttaaaaggtctagcggcatgattaactgacagcaagtgtccaccttccacctcccagctgctggccttccaggaaaacatctacttccctagagtctgatagtcataagtgttaggtagatatgttctggtcctgaatgactactacatagtaatttgaagccctctttgccttagctgtatgaacatttcagaatataattagttgtatattacaaaggaaagcaaatttggggagatttatgttaattataataaacttaatttagagcttgagctaatacctaactacatttagagtaagttctgtgaagaactaaaaggacaatcttttatccacaaattaccagaatgactaagctgtatatctaaggtcacattacacaatgcaagactgaaatttaatcgtgattgctagagcattaccctaattgcccaaataaacagaattaaaatcacttagatgggttacaaaggatttcagtgcatcaaaagctatggctacccagggaatttagaatgggaagaaccttggaatttacctaatccaacgtctttatttcatagatgatgaaattttatattcataaggggttaatgacattctgaaaatcacgcagctagcaaagacagaattggactccagatctcctgaaaaccccagcccagtactacttcttggtcacctttatatttcaatgtcaaatactcgaatgaactcaaaaactcccagttacttttccagatgttgccaaatagcccgttgtttacacatgttgtgtatgtccatatctagatatatacctgaattttaacaatatcatcttattttgatccactgtaaatacagacacagtgtctctgtattacctaaaaatctgcagagcaaaaaggaacactcagatttagtttgaagaataattaagcataattaattccccaaatgtctgttcatagttgtcatttacttcttttttctttttttggtaaaaatgggagtatggctatgttgcccaggctggtctcgaactcctggcctcaagtaattatccacctcagccttccaaagtgctgggattataggcagtagccaccaggcccagcctctgttcatagtagttaaatatgtgattattgtaattaaaatttcatttatgactttatttgatcacattttggttgccttaatgtctcttctaactgttctctttctcttctagcagtgacattgcactagtccagggtctactcacttttttcctggataactgtagcagtttcctgtcatggtctacgtagacctcgaacacatacgcacacactccctactatcctgctactctcttcaagatgcacctctggtcatgtcttacctatattcaatccttcaatggtgtcctgtgatttcataataactttgaacacctcagtttagcccacaaagccaactttttttacctcatccctaacctgcaacccctgctgccaatcccccctccctagctccctgttaaaagaaaaaccttaggcaaattaaacttaacagagtttaattgagcaaagaacaaattgggcagcccccaaaccagaataggttcagagagattctggcaatgccatgtggtttgaagatttatggacagaagagggaaagtgaagaacagtgaatggaagtggggtgcagatcagatgggttgattacagcttgatgtttgccttatttgaacagagtttgaatagttagccatctttgattggacaaaactcgatgcttgggacaagaggaggttacagtctcttttcacatccagttaggttgcagcttacaatgtatggaggaacttttaggccaaacttagaatatgtagagatagctttagtctgaatttaacaccccaagctctcttctctccagccatttcaaactgcatcttacaatttccctatttcatgcctccaggtgttcacatgtgttgccatctgctgggattgcctttcttcttttgctaacctctatgagtctttccatactcagctcaaatgtcacctcctctgggaagctttctgtaaccccacattttagaaacctgtctttgatgctcccacatcatgctgaacccactttgatcatagtgctcaccacacttgatcaccatatttcatctacttgtccgtttctactactggactatataccccttgaaaattggatcagaacacagaattcttgtatattgaccatgtttttcattttctctattttatggtgctttgacatcttggagccttgctgctcctagagagactgcccctcctagggctagggaattcctggagatagcaaatgattttcttgggagtgcacctttcatatgcaaaccaaccaatccaaaacccacaaccccacaaccactccctttcccaggctctttcagggctcttgactctaggtcaatattctcctgttctactcaccccaagctcagatttcaataaattgggatagcccctacatcccacagcacactgaaactattcaactagccaatcctaaacctgcttaccctgccttgtccattccttcccgtggaaaccacaataaaggaccttgcccatgcttttcttctgctccttctgtctccagactgagcccagagctttcctgtgtggctctgcatggaatggtgggccctctcctcttgggaactgtgagtaacaaactccctgtttaatggcagtcacctcctgatctgttggcctcatcacacctgaataatattaacacctacattttaaaacaccctgtgtccatgcatgtctgcatctgggcaacttcaaaagggcacatagcccaggcagacttgaaggacagtcagcacagttttctctctggagggcactcttctgttcccctaaactctacgtaaaactcaaactttgtccacatacctaagacataagatgccattttctagctacaaaatgtgcaacggagtgagactacttgatataatttctgatataatcttataatgtgatgacagagagattctttcctctaaatttggcagactgattgtttggaatatcccaagacagaaggaaaaaaattcaaaaagtgctgttgatgcttttacacgtagttcctcatttgaccctcctaacaaacagtaaaatagttgttactatcaacatgagaacatctcttgatgttagaaatgagaacatttcttgatgactatttcagccttatcttcagtgaccttgacaagttactcaatgcctcagttttctcatatgtaagatggcaataataatgacatctacctgactaagttgttgtgaagactggtgagataatgcacataaagcactttgcatggcaccttacttgtgtaggatgcattaaatgttaggtgtaattatttctgttgatgatggtgcagttattatcacactaaactcatgcttttcaagtatgccatgttgtctgttactgttattccctaaattagctaaattaattgccctgaatgtttaaaagtataagtgtaattttcattaaacaagatttcttaatgttaaaaacaagaaaagaacgaaaagaacagcagaaaggcacctactaggtaaagaactagaggagaaagaaggggcatcttcaaatgaatttggcatcacccaacaactgttataaataaaaatattctaacttttgtttctgatccttggtatcaaatagacaaaagattatgagttttaaatgaggtttcatatttgcacatgagtatgtagcattttgaagacactgcacaaatctccaggatagctgagggctgagtgaacactttgtcacagagagtaggctgatggcacaatgttaggagtctactcctcagatagaatttaatgaatgacccagaatttgtagtcctgggtttgaattgcttttatcctttcctttttttttttttttttaatctcatccaccctcatgactttttctgactgtgaaagaaaaattcaggttgatagcttcttgtgctcttagaagcaccagtatcagccgttgatttgctacagtggcaggcaagagatgatggatttcaggggactgagagaaggtcgggaattcaaccttccttcagagccaaaaatacattcaggaaaacccaagatttcaacacaacaaaaatgtgtttcttttttttttttatattaactgaaaaaatagttctactttaagaacaaaaactgatttaaagaatgggcttgtgtctacctgaaaatacatccaaaataatctaattttcatgaggcacctcagtactcatctttgataagaagcagttggttcaacataattgcaggaaggatctttcagtcagtgatggcgatgaggctaatatcattccctgagaatagtaggtatcaatgatgtgaatctgtgtaggagaggggattcaaagttaaatagggggtcaaagtaccacttggacttgtgtttcaagcaggaagcctctggaattaggtccagtgatccacaggggagaagagagctaggtgagcagttcttggagcagacagtcttttaatcctattggatgagcctgtattattgtctctgcagatgttctgtacccttctgcaaaagaggcaagctggcttttcccataactgatgaaatcaagagagcaggtctggaaaaaacaagggaaatctccttatatcttactacgtgtaaaaagatgattctggaattcccgagtgcctactgaattaataaaccaggaagctgatttattttaccactctaaatccaacatggaagaaaccgtcagacatctactacatgtcatccagcagtacagattggagaagtaaactctgtcagcccacctttatcaaacagtgtaaataatcaccaaaccaagggaagcagaaggcagcaaaagtcgaataatttccaatgaagagtcagaggatctctctcagacaaagggaaatccttcaagtggagaggagatggtaggaggaaagtggcagcccagaggagatgagactgtggcaaattagaaagaaataaaacaatacccaaaggaactcaaaggagaggtgaagttcaagtcagggagaagagtaagtcaagaggactacctgccaagcatagcacagagcttggttactggctccactgtggagctggctcaccccatgggtagagtacaatccttcgagatccacaaggcacacacacacgtgcatagacacaaacacacacacacacacacacacacaaaccccacggccacatctctgcatatacacaaaagaacaagaaaaaaaaaaacactcattgtggaaataccctcaaaatctcaaaatatatacctaacctataggataaagcaaccggaatactcctgggaactgggaaatgattatcactacggtgcaggggaaaaaaagcaaacaaaaaacaaaaccaaaaaaatgcaggagactagtacactagattagaagtccaggtctgtagttcttaaacttgccaacacattagttccaactgggagctaatttaactatcttaaagtccagatcccacatcaaaccaactaaatcacaatttctgagggaaggagctaggcatcagaatgtatttaaactccccaaggcaaattcaatatgcgaccgagtttgagaaccactgatctgggcccagctaccccactaatcagccacagaatctctggcaagatgcatatcctccctgcctcaatttttgtatctgtaaaataagagaggtaaatacatgttctgaagtctctcctaattcagtcattctaggagtctaccagcttgacattgtgtgtattgcaatagggcaggtgtagcaggattgtagaaaatgggaggtttccacacacccacacccactcccattttgggcaacaaatctggaaacattgtttactctcctgccttgagcattacttaaaatgactttatttgttttacagtttacagagcctctgtaggtagcctcaggagcccattcatttcattaacattaaatcaacaagcagaccttctttctgcctctctctagcaggattaatggattttggcatgatttgtgcacctagcagcaaaacctcgtgctgagaaagctagcaggcttgactaattcccagtagtgctaacttcataaacttactttaagcttttaactttgactaaagattaaaggtaatgactgcacgctgttgtttggatgtatgatactcaatatacacaaaaaattatacaaaaatgacaaactatttgataaattaacattgtatatatatgtgcatatagatatggtttttatgcttatgaaaatactcaattctgtatatataaaaagatcctctaaaacactgagagatttatgtaataaataaccatagtaaatagagtattgacaaatgtatttgtaaattgtaagcataaaaatttatggttagaatattataatatactgatagaagacccagtttcacatgatggaacattgactatgagaaattttctaagaagcaaaatttttctactctatgagaccagttatcacctataaagcattcccacacatgactatgcttatacttttttattccagtcttacattaaattcaaatttagataagtccacataaagacgggggagaaaaggaaaaaatacaatatttccagcccatctgacaagactacataaaaagcttttgatcaaagggtcttaagtacactttactggtgtgacaaacaacatttttatccctttattagatttatttttcttctgaaaactgcagtgaccagggtatggtttgtgaaagaaagctggcagggttgtgttctttgattcctaattaacaccttcagtctcaaaagagaaccaacagaaataccataaaatgttgcagctgcattgtgattccgcttggttggtttgttaaaagtcggctgggcattggcagctgcaataaagggaaagctcaatggatgttttgtattgtgcccactgaagtgaaagaaggcaaccattttatttttcaaatgggcagctgcagagggaggtttaaatggagctaaatgcaagatttactgttaatttatagtaaataaataaagaaaataaaacctagctttccagtttttacagtcacagaacagacattttagctagaaattattaaggacaatcatttcagagctttttagcaaccaatttggggaattcggcaacaaggaatagcattcatttaaaatcaaaataggctttttgaaagagctgagcaagccaaagctttagaagctgacatttccactttgaaaggtaaagatatatctttcctgtcttgggtaacgtaactccctcgtcccactttattgaaaccctaaaatttgttcagatggaaactgaataagattccatacacccccatctcactttttttttaagaccatggagttgaattttgcctatggtaggggaataaaggaggcatttaactttggtcagataaatctcactcacattcaaaaatgcaattaaggaaatatgtaaatctagatgtttcatcaaatgctagctaaggggttactagttcttttcgaacacaatgactgaactaaagaactttagtgtctgtgtaagaaccattgtccaagccgcagtccctgttggaaacagagtccggcctggccgtgggaaatacctacatatttgacacagaccctatttctgagagaaaggggatggaagagaaagtatggagattttactgttgcattctaatcaaccatgatctgcctaatttgctttgatcaggaagataaactaatttttctatgggctggttaaaagtaattagcaagccaaagctttcatgttatttcaaaagagctaaagtaaaggggatcagaaattgtaatgctgggagctaaatacatcttttctgctcatctaagagcactgttcattcaaaataggatactgacacagaagagaaactccagctaaagatagtttcatgggctgcataaccattgtaaatccagggatttacatagttagtgctatgtaactaaacaaggttaccaaaggtgacttataattggtgtctgtgtcatatagtcctgctgttttgtgggaacacctttaccttcatgtaaaaaggtgcaattattgtctggtcctaaagcattgttggtttttccctgaagctcagcctttcacatgtgagttgttggaggcagttgcctgtgtttatttgaaccccaagctgttgctgcttctctcatgtacacagacccagccagcttgggatcctacaatcctggacatactagaatgggatctaagatcaaattgaaaaagttagtcaggaacctgacgccacagatgcttcaatttcacagcctggttcatggtttttgtgccagttaccaacttcagtagtgccgcctcctcctttcttgtttttttctaagctcccaaacacatgtagtcattagatgagaaggaaagattttgaaatacgggattttgtttcttaaaaaaaatctactatttagtgttactttttttcttgttgatatgacctttgcattacttcccttttcaaactgttgtagtagatatggtatctgtaaccctactgtaaacttaattgcttttttggctactaatctcctgcgctagggttcttagataccaaagtgtgtatttcaagtcagatttaatgttccttataaaatgagaagatcttttaaaagggcctctgtgaggttggagctcaacaagcttcaaggttatagagaaattattactgtggaataattctaaaggaaactagagaatatttaaagaccaatattctaccttacatttaaaattacttaaaataattggatttagttttctgatttttttctactattttttggaaagctgcagtcaacaaacattttaactcttctttcattgttttaaaagtccttaagcagtgttttaaaatgtaagtctgtttgtactttcttgctagtttttataaagtctagaaaagatggcgactattatgagtaagaagtcaatctatgactgtggaagagatctttcatagtgtcagcttcgtgttcctgcaaatttattcgttcatttatccgtttattcacacaattaatatttttatcaactgcccaccttgtgctagatgctgagggtatagcagtttacaagatgtacacaatccttgcctttgtatggcagcagaaattttttaaatgcatatttaaatgtaaattattaagatgaaagagctctgatggcaaacaggagtgcactaaaagagaacctgcctggtcttggtggtcagggaacacttcccttgggaaacgacatttaatctgaaacttggaggatgagttagagttagccaaggaaaggagagggaaggagtattctagactttcccatttaagtctgagcagtggctgaattctcctctgtgctttctgtacttctaatatatagcatgacctagtaagaccagtatgtaccttatacaaaaggaggccttaatgcagtccctaagaggcagaatcctcctgtgagatctgacctataattactaggagccctctcataaggcaaagcactctgcagttgtgttctgatttcataaatgtaccttctgccttactggcttatagttttactgggcatatctcattcattttcaattcttctgaaatacaattatgaattcatttatttgcacccctaataataacataaggagaaggtagcaatcatggcatatgagcctgtacatttttcctgcatttgatggggaagccagaagctgagggccaggtacatacgctgagccccactccccactggaagtagaaagcatgagtcccctctattcttctcacattcatggtaaactctcccaatttttgttcacaagggggagctggccaaacctaagtttattaattcaactattcaactgatatttgttcctcacctactatcaggccagttctagaccaggcccaagaaacaaagatgaattaaggaacagcctctgctccctggagttcacaatttaattgaggaagacaggcaagaaaacaaaagtagtgtagtggttaagagccttcctctgggataatcacttggtattggaatcctggtactgccccttatttgcttggacaaattatttgtactgataatttagaataattattactcctataaattataataatttataattattgatattgttataaataattattactcctctggggcttccatttttctcatctgtgaaatagaatgtttgggctagagctgtttccaaggtttatctgcagaccacttagaacagtgcctggcaggtagtaaagacaaggtaaggttagctattattactaacagaggttggtataatgtcctgtggaagcagagagaagaaaatcattcactccacttggagttgaaaatacttcacagagagggtcatgtttgccctgctcttgaagaatggggaggttttcacctagagggatggggcataccctctagaagtcaggacccacatcagtgcaggcacaagagtgtgaaagcatgtggaaggaaattttcagattggctgaacatgagacaacagtgactggaaatgaaaaaatgatgaagagagaaatacaaaaaggatcctaagagtcacaaggactcatgggaagacactaaaagtttagtgtggagaagttggctaaacttacttctcagttccaatcatgacttctgcctgccaaataaagcgtaaggtccttcttcaagttttccttcacagcacatcaagcttctgagtctcagggttttcatctcactctgttattgattaactatatgactggcaggtaccatttaactcttactgatctgttttgtcttctactatctgttatatcttctgctaaatgataattcatccggtgctcattttagtgaatgcatccccctggcttaactttatatacagtaagggatgcttaacttgcaaattaatgccatgtttaacccacagacattacgtgtccctgaaccggtggaaaagtggaggcagaatcagactgggattcctctataacttgtttattttctcaggaatcatccagccccattcttcctcctctcctacatagtgacttccatttcatcccgccttacacagcgcctccatttcctattgtaaaacagggctagttttcttacttctccacatctttgctcaacccttcccctgcaaaataagtgaatgaatgaatggtttctgcatagcactctcaactaggctgttatcttgaaactcaatcccacccacttcaaaaggctttcagaaatcattgctctgctgagaacagaaccatgacagatcttcccaggaattgttccttatccactctccttgccacagcatccacatttggaggttataatctgtcttgcaccttttctggtagtaagcacagcagccagaaaccacagtttagccttatctagatctccaggcttctgatgacctatgtgtctgccctgcccccttccctcatatctcagaagggacatgtttgccccttttccaaagttatcatgcatctatgatctgtcattccattcccttttatctcctgggaatgatagtttattcattcagcaaatttttattgagaatgagttatgtaaggtgctatggaggacacaaatgaaaatatcagttaattatcttccagacatatgaaatctaaaatgtcagtatcattccatactgtattaaatttgctaacttggcattttacttgataaagggatttccatttgaagatatcaccatagcatcctctatttccgccttttagtctatttattatcatgctccccactagcatagcacttggcacatctaagtgttatatacatattttctattgggggaatgatagattcctcacttcaaaaagcaaagggtctttcctgtgctcttcaatttcctcaaactgtttccattctgtctccttcccctctctaccaacattcttgaaagagaaggccatattcattgccaccatttcattaccacccagtcactctttcatcccttttgaaatcagcttgccacctccaccattcaacttaaatcactctgtcttaaatgccaccaatgacctcctactgtctagtccaaatggccttttcttagtcctcaatcatcctggaccactctccagcattgcactctgatgaccatccccttgtcccatctgaagtggggtaaatactccaagaatccagccttaaatgcacaggttttgtaatctgccgggtgtgaatttggccatggtccaaagctcagtttcattatctgtaaaatgggttaatagaccctgttatctgtgcttgacacatgcctgctcagcctcctaatgggtctccttatctccctctcatctcatgcatgtgccactgccaaatcagtctttctaaattgaatgctgatcgtgtcacttccctgctcagaaagctccagcaacacccagggatgggaaaactccaaatccatagtcctgcatgcaagatctctacaatcacctcaagtcatacccagctgtgctccaacagcaggactcatgcaggactgagagtctggagagagtttcctctgtcaactaggcctctgaatggctgtcatttaatatctccttatctagtgtcttcattagcagattgaaatcctaggttaatttaaagctaaagctcctcctagctataaaatgctaagatttgacctttctggccttatttttccatattctcttttcaacttttctattcaggaaaattggactgggatccatttttctaacctatttctgctttcctccccctgtctttgctctcaccagtttctcccatgggcaaaagtccttcctgcaagctcttctcaactacagtctcctcatcaatggctgggagtaatcgtctcacccaatagatgccagtcatcttttatggtgcattcatgccaggcaagtctcatttggaccactgcaattttctcctcactcttcccattgcccctctggtggaagctttgcactctgactaattccgtcttcctcttgccagttttggctgtgccacacctcacttaaggacccatcatgctgcaacattgtccagtgcttcaaatccaacatctttatccaagacttcaaaacacttcattaatacatcccagataatcttagttctctcatctgcccactgctcttcagggaaaactcacaccaaagtagtcatatcatatatggatagggcattaaggggcttgaatttttaatattaattgtgtcgctaactagacaaatgcccttacaagttagtataaaaacttcaactgtgattgtattttattaaaaatttagtattatggttttagcacatttagtcactttacaatagataaagtaaaattatataaatatttgagtgcatttatactccagcccagtagtttataactggggcaaaaatcagaatcattcatggggatttttttaaagttcacattcctgggtaccacctccagaaaaacctgagcatctgttcttgaacattgacacaggtgattaagactgctggcttgcacaactcaaggaattgtgcagtgcacagctccacagctttaggaagtggcccaaagtagactcagactgtatattctcttagcttcagtcgagaggtttacttaggctttagcattagaaacatttgggttgagatcttagctttgtcacttacttgatgtgtgactttgaacaaattactaagtctctctaaacctcagtgtccacatctataaaatgtgacagtgatagtactcactgtagaggataaaatgagactggttctacaaagtactcagtacagcacctagcagatagcaaacaatcagtaaatgtcaaccattatgatgacaatgatgattatttaagtccgtctctccaaatccctacttgactaagtagctttgagaccaatttacgatagtactacagaaaatattaacacaaggtaattgatcattctactgtatacttgtaaagattagtatctctgcaacaaacagctctcttgcctttattatttatctacaggttattggcatatattttagcatatataaattataatatacatatatgtatacatatatatgtgtgtgtatatatataatctctagtacatcaaatgaccatgtaaaaggtcttgatcctgcctgacttttaaaccaaaagtttaaaaggaggcctttgtcagtataggcaaaaaaagcactgtctcagaggttagctgataactctttgaagtgctaatttttggccaaaggaatatagaaacctctgcaaaaatatgttattgtagggtggacttaaatgtcagtttataaaagattctttaaatcatgtatgttgtattccttcacaatacttgcaaatgtaattaaataatcacttgtattattatcagcttaatgtttatttccatgaaaaatatctcaaaggaagactctaaagagacaggaactatatctgtcttgttcactgttgaatcccttgagcttaataccatgcctaccacataataagtgccaagtaatatttgttgaataagaggaagaaaggaggataggagggagggagggatgaatctttgtatgtccacatatttatcacagacccaggagccgtgcccagaatcaactttgaactacaagtgaaatatacaatctggttaggggtatctgacatattcagaagtacatgacatgaaatacacttaataagtgttttaggaaaatgatgactttccggaagggttaaacacaaatagaggagacacagggccacaggctgatctagaagatggattgaaagagacaaaaaaatgaactgagttaagaaaaatcagaattatatcacataagctacaattatggccctagagtagacagaagggaaataatcataagtctatattaaggagagtttcaaccggctacaggatacatctgttgtttgaataaatacattcaatatcataattgctttgattttaatagtgatatttaatttaaaatgtctttgaacattcaaagttggcatgagatttttatgttcagaaaacaggggtgtaggttaaaaaagttttcctgggaagcagacttggggttagagatttgagtaaagaatatcctggggtgtaccttcaggatcaaacctgcagagagatggaggactgaagaaggcaggattgggcagagggagaagttaaactgagatgaggtcataagatcctctgctaatactacagggagctctggcatggagtggcccttcagaaatgtcccttcataccttcagaccgaccagttattggaggcaggcgtccccctccctagtgcctcctcgaagtatgaccttgggcaaggagcctctctttaatcgttcaccaaggcagctcagctggagctccagctgcacgaatgagagattcaatcctgaagcagaggtaactgggcagcataccctaacatctcctaaaactggtctgaaatgatttagttgggaagaaggagtaaacaggtaagactgccattgttcttaggagaatcatgaaagtggactcaccacagtaaggcggtgctactctgaaaatggccaaccctcagtaggatccttaaattatttcgactttttcttttccattttcctgctcttctgtttcaaaggctcctttaactttctagttagttcctttcctgtctttatcatatgtgcatgcatttctactgttccaaagaatgtttatgatccttggcttttctccccctgtgctttaaacaaaactcagtttcctagtactaggattcctcagggaattacagaacagcctcagaatactaccatgctagctcaactccatctcccatccagctgcataaacttcctttcttcctgcatttatagtttccatgtccatcaggtaaacgcctgctatttaacacctggcagaaggatgtttttcagtttcctctattagaaacttacctcaggattcctttttcaggtaacataaactgattaactggaaatgagaaaataagcagtgtctggtaatccaaagcacagaaattatcaaatggccacttcctaaccactcagaaaagtctaaataaaactaattcagtgaaacaacagcagccactgtattttgttggtcttcaactgtgaactcttaaaaggcagcaactgcacctcttccatactcctttccattgcacaatgtctagcacactgttagaactcaatagaatgagataattttttatccagcactgcacctgggaagactggcaaagtgccaccaactagatggctggtgtacttcagtgattcctgtgcctttatgtagacatagaaagtcatgaattacaccatctagacaaactgctatgaggattatccattgaataggacagtttttttgtttgtatttttagaataaggacaaaatatactagcataatccttctttctgaatcaagagtcaaatcgaaggagcaaggaggattatgaaattatgttacttctgtatcatcaactctgaaagggcttaacattccatcatttcattttagcaaagattttattttattaaatggagttcaaacatttaaggtgctcttactaaactgatagttctttaggattccttgcttggtaaaatattagatggtgtaaagttgtgagaatatcatgtaaagaagtcaccttgcattgacttctttaaattgaatgggaagaagatgaagaaatgaaaagtaaatgtagcagattaaataaaaaattcacttatttgggggataaaaagaatgttctgcatccatgattcttcacgatcatactattttgcagttagattccctgccaaaaaaaattgatcctataatacatgtgataataatttcctctgtcttccatgtttttttttttatgagtagtaggtaaggaagagctggaaaattataaagaattgaaaacttaaaaggttttctttggtatctaaggtctggttgtcattttcaggttttctaaatttaagaaaactgaggagataggaacataacgatggctcttttgggagctattgattttgtgaaattggtaacacgtcctccttggaaataggcagaatgcatctgactttaaagttgtagtgaatcttcagtgataatgagagttaccaagaagttatgtaaggtagggtatgaatgcttggaggatgaggaaggcaaaaaggcaaataatgtggaccaggttttttttttttaacaaaaatagtcatcatttataatctgccagacttcccatatgttaacttatttaatcctgacatcaaaccggtggggtttgtttctattccataaataaagaaatcagagaagttaaggaattttccaaggtcacaaaaccaataaatagtggagtgaggggatttgaaaagagatctgtctgattccaaagcctgtactttccccaggactctaagagaatttcagctatgatggccattctaatttgcttccagaaggctggagttttaaagttactttaaaaggtagtgaagataattgtacatttgagagagacttgttcaagatttcactgatgagaaagtgcctgtggaggggatttggcctgaagaactggggacataataaataccaggaacccagtactgaagatagtaggcactccctctttgctgtcatttttaacatctgcatcaggaatggctggttgtcatttcctctgtttctgattatcactatctttcttggggaaatcaaagttgtttcatttgtctgtttgtttgtttgccaggtagtgtttgctaaggaaagtattagctacatgtaacttcagtaataattagtaatatcaaaaaatatcttagaatgatggtagagatcaaaactaatattttcagtggacaaacaatgccgatttggcaggttgcatgcaacagtaattttagttgccataattctgaatattctgcctagaaagtacttgttcttttcatgtcatttccataggaatgctgtaagttctagagatgggtgtattttaacctcatgaaaatccaaagtattttattgtttaaacttgcaaagcacattccatctaagaatttcacagagccttatctgattccttattaattctcacaaagttgagagaaatgcttttaaaaatattacataggctaaggaacattatgtcatattaatgtgggataagcagattgattttcactaaacattgtgagagtttaaaagggtaattgaatatttttaatgctttagccttcatctatttaatttgtttctatatttattttgatggccagaagctgtgctgtaaatgacaaactggtaggcaagacagtacccagacaggtacatgtagttttagcaagactactgggacatttggaaaaataaaataaaatgttgtctgtttttaaaggcaacagttgtaaagttgtcagtctgagtctcctatttgcactgattgcacttgataaaaaataacaagctgtgacaaatagaagggcaaagtttcagtaattcactaaagaatgtctctacccaaagctttgtggcaaaaaaatgtcttgtttgaggcacaattgcagagttgaaataacagcccatgaataccctggagaaatgactatgtacccaaggtgaatgctaaagccttccctcttgaatgagccttttaatcaaggcattatctaggctctgaaaaagtcttcagtggtcctacctaaagattaatgggaaaagccgaaactctgagttggcctatttgcagaaacaattttaaagatttactgatggttgacaaatgccatttaagctttcaaagccagccatatgcttttgaaaaggatttaaaggaaatcctcccactacagaagacaactttgaaggatctctgtggtagcctcttttttttttttttttttttttttggtgcgtggacatgttgagttttctctttccttccttttttcccacatctttgctaaattcctaaaacgtggggctcagaaaaggaataatatatttctgtattcagaaggtactcataattttgtttgtcagtgagaattagataaactcttgccaaacaattgtgtatgttgagaatatctttctcaattacctttgtattaatataagagctgtaaatagccccccaaatattaaaagtgtaatgtcacattgttcgaaaagagaattgatgctttctaaatgtgtttagattttgttcaatttttgtattttcgtttagtttaaatttatgtttagttttaatgtggagattattttctacttccagaatgactatgggcaccattttccttctacattcattctctgagcattttgccattggtttttggccaggtgaatttattcagcctgaaaagtaaccgacttccaaagagattatatttaaaacatttcttcatagggtaaaaatctgaatgcaattttaaaatattacccagtcataatgtggattagaattgcctcacttcacactttgtcattgccttcttctactaacttcagtggaatctcgaggtgatttcataaacagggcaaactcctggcgtcctctggcctgatcctggaggctgagatgagtcactgtgtgctgggcgggcctgtcactccaattgcctgcctccgcgtgggcgctgggagtgggaatcagtgcggttcaggagcagcacgctctggccttgtttgcccatttccctgggccgctgacagtgatctgacagaaagcgacactgacacaaagaagccaagaggggcaggagatgggggtgaggtcaaagcggagaaactgagaaaatccagtgaagtggaagctgaaaggataaacgcatgaaggcttagagccgcttctcggcccacttcagtcggccacacctcccccaaaccctggaagaaatgcccccacttaactgccttggtaacaattaaaggcccagtgccatgaaggaaggaagggtttttacagaagtgccttaaatcccactgcctccccgccgccccacccgccaacacctagaaagtcttgtagtgagtttcctgctctttcttttaaaagcaggaacctaatgaaggctcacctctaggcagagtaccatcgcacaacacacattccagtgtgcagggccctttcttgtcctcccttctcacctggattattgaagtgacccgctgtgggctgactgtcctctaattcattcccaggccaccaccagggagacatttctacctctgctaaaaaaccttcagtgcctcctgggggtatccataccaccagcagtatccaaagtgatcttagttgatactgggtcatgaaatctaaaacatcttatcacctaaagggaaagttgctcccttttcaatttcccttcagcccttctggcttcatcaatgagaaagtcttagccagggttagtttgtcttccacacctctgttgctctcactaaactccctttttatcaaagggagaacaggcttcaggctcagtttgacttggcagcagctaactaggaatataactagaatttattaacattgtttggttttcattgtatgtactttaacagtttccttccatgtatgacagatgatactggttttctatttacaggtaatgatggatcttttccacttttatttaacttccctaggtaatttgagtccaataatatatatccataggtctatagatatgtctacatacacacatatatgtctttatgtatgtagatgtgtgtatacacatacgtaacacaaatgtgtatagaatcatatttaagttactgtccttatagcaaaataatgagtttgggaaacactagagtatgagataaaatccaaacgcagcctataaatcttgctataatcttactcccaccccatctctaggcaggctcaactttctgcactgcctcatggacaccttacaacaaaccatctctgacagaacatgtgctgtccctgcacgtgaggccaagattgtcttcctcactctactctacctagatgatccctcttcatccctagattaggcactaggccacccctcaatggagcttttctgccccatcttacccatgttccccttgtctgaagtatgctcccctccaatgagctcccgcagcatcttggttacatctttattagagcacttaccaaattcataactatttgtttgtctcccctccccatgaggacaggaatgttgttcagatccctgacacacctatctggtgtacagtatttgttcagtaaatgtttaatgaattaacaaattctttttatcaggaaggcaaattatcagagctacctaataatcaaaactttttaataataatatagtaaatgattaataaataatgaagtcaaccataatgggtaagaataagggctctatcaaaatgtggaaataacccaaatgtccaccaactgatgaatggataaatacagtgtggtatatctacacaatggaaaattattcagcaattaaaagaaattaagtactgatacatgatacaatatgaatgagccttgtgtgtgagtctgtttgtacaaaatgtccagaataggcaaatctattctgacagaactagagacagaaggcagattatgttgcttacagctgaggagtaggaggatgttggactggttagtgactgctaatggacatgggatttctgggtgatgaaaatgtctgaagttagattttggtaatggttggagaactatgtggatatactaaaaatcactgaattgtaatactttaggtgagttgtatggtatatgaattatagctcaataaagctgttttgtttttttttttttaagagtgagggctctaagaaaatttgttttgaatcctccgcaacttaccagctagtgatcatgggcaggatatttagcttctctgtgactcagtttccttcctataaaacaggagtaataacagcccccaccacaaaggatcattatggagactgaataggccaagcacagtgcctgtgacataatagcactcaataaatattagctatcattattactaaaagagtatgtagtatattctgaatcatgagggaaaaaaacaacatattctaacatacttgtaatagtctttgtgtcttagtgacatgccttcagaatgataaaataaactttggggactcagggaaaagggtagaagggcggtgagggataaaagacgacacattgggtacagtgttcactgcttgggtaatgggtgcaccaaaatctcagaaatcatcactaaagaatttattcatgtaaccacacaccacctgttcctcaaaaacctagtgaaatttttttaaacatagtgatgtgcctgcagcatatataacattcttagttaataagaatactttttacttactcatatactaattttatataccatgtacaattcatgacaaaatgcatgcatatacatacattataatgccatttaaaccttagaatagccctatgagataactattattatccccattttataaacaaggaaactgatgcaaaaggtaacttgctcaagtttccatgcctcatacatggcagaacagaagccgtctgacctccaggtcagtgttctttccaggacaccaggctctccccggagcaagtatgcccacagatacatacccagtaaacagggaaatcactccaagggagagctgccccaatagatataataggtttcacaaagctgtccttattcaaacatatctcccacatcaaacaaccacaacatgtcctcctatcttgtgtgagattttacaagaagaaatattcttttgaaatggaaaataggcaaagcctttgtttcaagaatgttgttaaacaaacataacctgagaaaggatagggctgggggatccataccacaagggtgtgatccttgtctctcaacactggcattgtaacactattaagaatactggctaaacaagagcttctaacatctgacttccatcactctagtcagtagcaaaatatgtgttacacatggcatatgaattccacagcacacgttgattgtataaagcacattctatgatcaaaaaggacaatgcaaacctaatcctaagtggatagtagaattcacttggaatatctgggagcaacctttatggctttaggttaaattctctctccccaagagtgagtattcaatgaatagagtgatagaagcttcagtgcacatatactatgctatcaataattcatatatgaacataatcgattttagtatttaattattgctaaatctccaccctcaaagagattacaatctagtctgaaagattttaacggtggccatgtcttacaggatcttacattcccagcacatcatggatctggcacacagaagattctaacaatcaacattcatagaaatgttggttgagtgaataaataagtgaatgaattatgatttgggaggaaattgtgtagtaggtttataaattatcatcttttcaacacttaaaaaatattcattattaatttgttgaatgatgaatggcaggactttaaatgaattaatgtgacaagctgagttttcagaaagaaactgaaaaatgaatggcattttggttaatttccactgccctgtctgttttattcatttaaaaaaaattttaagtcggggcataatggctcatgcctctaatcccagcacttcaggaggctgaggtgggaggatcccttgaactcgggagttcaagaccaaccggggcaacatagtgagatcctgtaactacaaaatatttttattaaataaataaataaatataaatataaaaatttagaatttggtttaaaaagagggataaatttgcagtgataatttaagtcatccttaattttaagaatatgattattcaatttaccagattactagtgttttattattatatataaaacaaatgaaattacagaacaattatctatatatccttagatcctgaagtaatacactctgtattcatttgcaatcattaaaaatttagagtcagtttaccatcctaccaagtagctaagtaacaacacctcgctttcccagaggtcagtcttcttgcaacttcagcctcttaaaacaaatccaagagttgaaaaaggatgctgagtgtcgaatattactgtacaaatctcatgcactaaaatctcttcaaaaatgagccctgggatctctttcacatcctatttgttttcttttacatataatccagataagctttcttatttggcttttgaatgtacgttgaatatatatttcaattctataaaaactaaatacaaaaaaaaaatccctttcacttttcattgataactgcaggacttatcaactaataacccaaaaaacagcaaaggataaacaattcagaaattagaaccaaaaaataaagcaaagctatctatcaccatttggtgtgttaacaaggaatcccacagttttcactcattagtttcaaaagttgctcccgagcaggtactggtgtttataagatggtgaccatgaatgataagaaaaattaaaattctttttaagacagtaaagtatagaataaattactaaaatattcctataccaatttttaacattgaaactgtcttggcactttaaaggataagcttcagtttaggtgggagacccacacctacagaaaaatctattttaaaatcgacccagtaagtggggagaagttattttggtatttaaagtttataaacggatggtttagttccccaatcttttaaaatactaccattagtaaatatattacaaagcaacatatgttaatactctctagattatgtccttgcctgtattcaatttcacatgacagtatgtggaaaaatcaatttacttaattttaagcttgtagggcttcttttagataatgttcaaaactataaacaatgtagcaactgatcgtcttctagaatgagtctgataaaaagtgaattatgtaattcttgaacttggaaaaggaggaaaaatacatcatagcatagagttactttaaagctttaatgttggccaagggagattaaattgcctttggggtgtacagatgcagaagattccgttggtgtgcttttcaaagcaaagacagatgatattaggaaataaagcatgagggcttctgctttaatctgtccacattaatgttttgatctgtgactaattggaattgcaagtagggttcaagaagattctcagccaatctgaggctagcagacatgtaagtctcccaaaaatgcatctaggaagattgcttgaccacaaatgaaagaacgtgtgaagaattgttctaatttaagcctgttagtgcatctaattcaaaattaatatggaataatgacacaaaaatgacaaaaaaaagttggctatcaagaaagaaggaaaataaactaaaatatactatacaatctccaaaattaaaacactgttccctttatacgtctttaatttaaaacaaaagaaaaagaactgccacccaagagatttactaaatccaaagatgatgtcatttccctgcttaaagtcctagagtggctcccagagcctccaggatagtctgaacttctcaacgtgacatatgaggccagcttgatctggccttggctgttgatgcttttcaggcctcctaatgggtcgtgttgcaacacaagcacttccattcaactatgccaatctattgtagtttctgcagaacagcctgctctcttatgctgcgacgctcttgtacatgctgttctcctaccagaaatgcttttccttctctcactcatcccccccttatcatagctgatatttcttttcaagactcagtttaagtgtcagggcctcttggaaccctaacaaaagaaaggttgtgattaacagtttaatataagtaaaaagaaaattctcagagagtttagtggaagaagagattaattcctaatcagctaagatctaggagagatttttatgggaatatagattttatattaaatctgagaggacaatgaaacttttaccatttttatcttacttagaaaatgaagatctttattctatacatcctttcctccttggacgaaccttgagagttagcttggagattctaacaggatagaaaaatcactgatatgttggggattgacacgcagggttcctctgttaaggaaggttgtcctctttgagcagaaggttaaatgggggctcacatatgagggaatattaggacactatccagccagccagattaataggtggacagtaaattcacccaaacccaccagttccagtggttcgctggaacaccaaccacttcgtctgaataccaacctgaccttactattcttcatttgatattgaaaaagggctactgaaatcccatctgcttcaagaagctcttcctaactaatggaaaatgtattgacagttttgttgacatgcagtagttaaggacatgttcttcataggcatacaaacttctaagtgagatcattctgagtaaattgcttaacttctccccaatgtgtgtctactctagggttcaagcctgactgaggaatgatccatctacttctaggaagtatctaaaaggaactgtgcctaactggagaagtctgggtcaagggcagtgggatttgccatggtggtagcatgggtgacagtggtaccagtggagccctgaatacttttttgtctcagatataaaacgccaaagttaagcatctaaaatagctgactggtggatcgttgatggcatcttgacacattaccacagccaaatcagggcaggagaagaggtaaacagcagacaccacactatggtcaaaagaactagttcttggcagggagatgagtcatcccagccaaggctggaactttcagcatgattttgggaaagaaatctgttgggaactaagttcctaagtgtgactacaagcaaagttatggagagaatatgttgtggctatttttaatcaggttggcatggattagaaaaataaaacgttatacctaaacaagcagatatttgcataactgctatgtggtcccagcttaagaaaaatatagccgattaaacaaatgtttatctcaagtgacagaaaagtaacttaaaaagcataaacctacaaagataaagaaaacaggaaagaaattatagtagacaggtacattaacaaatttgtgaaatgtcttaagagaaaatgacatggaataaggcaagaagcaagccaattcctgccataaaaccctaaaaagggaaggtcagagtactggcaaaaataggaagatccactgaaagtcttaataagaagcagttaaacacatcccttagctcacacagccaggcaactgtctcctcaccacccgttttctcaccacaaacaataaccctggtagaagactggtgatttacaatctgaagacagtgacccctgagactccacactaaacggtgcaaatggatgcctctgggaaatgggaatcaggagtggaaagggtgggacacggacctaatggcttttttgtttcttcattataaggtttgtagttctttaaaaaaacatgaaaatgtatacatttaataatataatatatattatatgtgataatgtaatatatatgaaatatactatgtattatatatgtgataataaaatatacattgtacatatatatcattttaacctagaataaaatttttaaaaagtaaaataaaagaataaaaagcttcatactcattaaacagatttaaaactacacccttttgtatgaattgataaaatccttatcttactgctgataatgtagtctactaactgccttggaaatttttctttttaataatggtctcctttcatgacactaacttccagggacatagtaagtagcactaacacagccacacaagctgtgcatgccccaactctagggcagctggagttggccatgtgtcaactagtggtaaatttccatgagtgttagctctccacttcttactgtttcacttatagtaatatttgcaaactcactctcatggtggatacaactccttgcctctgaggctcctttagcgtaatcatcaatatgcgcttcttgagttcccacccatacctcagttactttaacaggttcattataaagatataagcatgggtcttctcctttttgagatatcctcattttttttctcttgcatcttttcttagttaataattgattttacattggatataacttacattgacattttgaatttctgattatatatgtagtcagacttgttctaaaaagactttaaattttatacttatttttatattttcttacactttgtaacttattaaccaataacagtgaattattataccttcagtttttgaaagtgcatcagtgacttattggctcttgagaggcttgtcagcatataaatgaatgttctatggcagacgttaaggaaagacagatgaccaactttatgcttttggaaggcaaataaataagccatgttattgggagctaaaatgaagtcttacatatttctcaaattaattcagcatttggtcttttcactggtatctgagttttgaaaatctcccttctctaattgttgactctgctccctcttctggaaccttggttaaattgaatgggaaaactgtttacttgaaattgaataatgtcttttctgtgttggtcaataagtcccagattgaagtaaagacaaactttagctagaaaattattcccatagcataatttaaaagtgctaactatggcatggggaaatttttgtctctcatttttccaatgcacatcagtatgcataggattattttagtttaaagaaagggaatgtttaaaataaacacataggtcatcaaatacaattcaggggctatcttgtaatattttattcttttggagaattacatttctgtttttactcctttgttttgggtttaaaatgcttgaaagcattgcaaaaataacaagaactcgttaattatattctgggcacttcaaagaagctcagaatacactttaaaagcattacattcacattctccatatcactaaggtaagaaagtgaagattgttctatttcacgaaggacattttcactttaagaataagtttatgtgtctgtgcaggctcacatactattcaattgcgaatcagagtagaatctgtgtcctctcaatttgattttaaaatacaatcatatttctacatcttttacattcaacgggaaattaactaaaaaattaatacgttttattggcttccttttatttttttctatgagttgttcattaatgtctccttgataaatagataagcatttataatcatttttagaagtgcattttagctaactgtttaaaggaaacacaaggaagatacagtaatctttaacatccttaacctgcttgctgtactatcctcccaaacctacaaaaaacatgtttgttaaaaataagcctcctagaataagaaaggaagggaatagtgccagaggatgcagcatttattcagctggtcaatcaactggagtatttactgtgtttcaacaacgtgccaaatgctgttaaaagctggcgattcagcacccccttgcccttatggcattcaagaaagtaagtcagtaagtaatgaaagatgtgaccacaaacttttctaagtgaaaagaatggagaggagggaggcagggagaggcaggaagaagagcaaggaaaggacatattctttgagaggacatattctatattggaagatcaagaggacttatctgggggggtggggaaagatatttaagaatgaagaggagccagccattggaagggacggtggggtgcagatgagcattatgggcagaagttaatgtacagaaaaatccctgagaaaggaaagggcttggggtgtaggaggaacttcacagtggtgggtataacaaccaaggtaatggagggatggagggaccagtggctcaggatgaggatggagagttaggcactgttcaagcattcagggccctgtcaaccatgcttaggcatttgcattacatttaagaaagcacaggaatccattggagaattttaggtggtgccagggaattatctatttctgttttggaaatctaagtttggctgccatgtagaacaatctatagagcgggcaggagtggaagcagaaagtggccaaacacttaagaatgaggaaggaggctgggtgccgtagctaatgcctgtaatcccagcactttgggagaccaaggcgggcagatcacttgaggtcaggagttcgagaacagcctggccaacatgacgaaaccccgtctctactaaaaatacaaaaattacccggatgtggtggcttgtgcttgtaatcccagctgctcgggaggctgaggcagacacgcttgaacctgggaggtggagattgcagtgagccaagatcatgccactgcactccagcctagatgacagaatgagactctgtctcaaaaaaaaaaaaaaaaaagagaatgaggaacaagtgggatgaagcaggcaggccgggaggtgtgactagagagagttggtgaacgcttcctctggacagaaccttgtaccagacacttgacctgtagtgtctcaagtctgcacaaccccagcaaagcctgggagcagaagcccataggacaagcattctccagatcccttctcttgaagaaaaagtttactggaaatgtacttcttgtgtcaatccgaagggggaaaccttaggacccattgggagaataaaaggcagtctggtttgactggaatatagactctatggaaaggtttagagagaaataagcctaatccagtggattaggactggaccatggagacttcaaccaacagctgatgagatcctttcaagtatcagatgctgcactaagggcatttgcctacgttatctcatttaatcctcacatggtggcataaaataagtgttacagtacattagggcgttaaggccacaaaagcataaaagtgatcaaggtctaacaacaatagggtggcaaaactgtcatctgagaccctgttctctttcctaaatcagtaactcattttatctttcctcatacgatagctagataacaacatttaggctccattcttcagatcatgggcaaccagcaacggctttttgaacccatgaaatgggatgggatgacagataaaattgaccttttttctttttcatttattatactgtaagttccaggatacatgtgcagaacgtgcaggttacgtaggtatacatgtgccatggtggtttgctgcacctatcaaaccatcatataggttttaagccccacatgcattaggtatttgtcctgatgatatccctccccttacccccaaccccctgacaggccccagtgtgtgatgttcccctccctgtgtccatgtgttctcattgttcaattcccacttatgagtgagaacatgcagtgtttggttttctgatgttgtgatagtttgctgagaatgatggcttctagcttcatccatgtccctgcaaaagacatgaactcattcttttttatggctgcatagtattccatagtgtatatatgccacattttctttattcagtctatcattgatgggcatgtgggttggttccaagtctttgttattgtgaatagtgctgcaataaacatatgtgtgcgtgtgtctttatagtagaatgatttatactcagagcctttgcatgtgtttcaggatattcgatgaaatgtgggtggggaaaggaagatttcatcctgttggcatgaaagggtcccagggtcacacgatgttaactgcaagatatttcagtttattgattattgcacaaggtagggacaacaatgggagtttctgcctgagagaaatgaaatagacctcattattttaattaaaacttttagaagatttttttttgaaatgttgcctggggggtattttctgtataattattatggaaccattaggtgcagccacagctcagaattatttaacagacataacagacactcaatgacacaacaccagagtcacttcctagatgcagcgcatcactttagccttttggtctgctttttattttttcttttcattgtccaattataaagtaatgaaattatctgctaaaagagatttatggtataaaaggaaagtggggagggaaggtacttcagattccctcttttgaagggaaaaaaagtcattagaagtttactttttctttcatcaaaaaggcaaacctaatagttttctgtgtgaaattcatgtgtaccagtccagtgattctcaaccaactgtgatttgatcttaggggacatttatttggcaatgtatgtattagtttgctgggactgccataacaaagtaccacagactgggtggcttaaacaactaaaatttatttattttgtcacaattctggaggctggaattccaagattaaggtgttggcagggttagtttcctctgaaggctctctccttggcttgtagatggctctcttctctttgtgtctccacatggccttccctccacctgtctatgtccaaattttctccttataaggacaacagccatataaaattagagcccactctaatgaccttatttaaacttaaagacactatctacaaaaaaaaaagtcacattctgagttagtaggggttagaacttcaacatacaaattttgagggaacacaattcaccctataaaagcctagaaaagtatttattgtcacaactggaaggagggtgggtgttactggcacttagcgggtagagccagggaggctgctaaaccccccacaatctacaggacagcccccataacaaagagccatccatctcaaaatatcaatagtgtcaagactgggaaattctttcctacttccaaagccagtagtttgatattttttatgcataaagaagagcagaatatattattctagtgaatactcatatcatgaattatagcacagtcttcgttaggactctgcaaatatccatcttcatatatcacacacacaaacaatatttcttctccagatttcaaagcagcttcttgggaatatagtgtaaattgggttctgacattactgcacccctaagacaaatttgggaaaatttgtgggcatcaaagagccctgtaaactgtaaagttccaggcaaataagttactgttataagaaaaaaaaaggaaccaccatataaaatattagcacctttatccttaaagaaaaaaattaactccagatggattgcaaagagggaaagactgaggcgaagaagtccactaagatcccactgctattgcgtgtctactcccagaaaagtgggaaactcaggattccaactggagttgtggaatctggggctgggagagagatgaaccggtggagtcaagaaggacccaaaaactgagatccaaaggctaggtagaagcagagtagactgttcagagaaggggactgaataaggagtcactccaaagggactggcaaagaggaaagccagaaatgccacgaaggcatgagaaaccagaaaagtggagaggagactttttctggggtacctcctcatgtgtatggtacttcttaagagtgaaaatgatcacacaaagaacctgaattttaaactacagcagcaaaaaagtggaaattagaccatggatttcaatgtgcagcatagcagcaaaggggctggcctcacaagccttggagtcacacaactgggttcagactctgactctgctgcttactgccgtgtcaccttgggaaagctacttaagttctacatgcctctgtttctttacctttaaaatggactgttgtctgtagattaattaggttgcatgtgtgtgtttgtgtgtgtggtgtgtgtgtgtgtacgtgtatgtgaagtgcttagcataaataacatcagttatgactactgtggaaacatttcagagatataatcaataggactgatggccatttagatgagagtggggatgaatgataggatgatgtaaaccagaggtttctagcttgatcaatagagagtatggagatgtattaatcaaaatgagaaaacagaaagggaaaagctggtttggagaaaaaagagaaaataatgagtttaatttgagatgtgttaggtaactggtcagttaatcacctggagaagttccttcaggaacaggtaagaatctgtagctcagatgaaagttcaaggctagaaattgttcataatttcttgtgcttattgatgtcatgtggctaaataagatttcctaagaaaaacatgtagagagaaaaaacagaggcaggagaaatagaaccttagggtattcctggatgcttaagcttttctgatgattttaataacggtacagtcctttagagtttataaagcactacactatcttgggggaaagaaactggttgcccttgagagtttttgagatatgtagaactgttatgctaaacgatcaaacagctatatggttgatatcactattaatatttgagcttttaaatctgttttcccacattattgccagccctattgagtccacctcctactggtaattcactgctatggatttaaaaccgaaacaaacaccaagagcgcttaaataaggaatacttccctctgagtggggtcttttcctcttcaggaaggtgcataaacctttgtgcccaaggttacaggcttttgattctggatgttcacaaagggtttggtttgctgtcattattgttgttttctgtgtatgttttgctttggttttgttgtgttgactgcttgcttccttctctattttgggatgtgagctgagtacacacggttcctacgaaagtgacctctccacaaataactacatctacatctatcattttgttgttgacataatataaatagggcagaggaatgcccagtcacattaactatttctatctatggagattagaatgataatgtaaaaattttcaaacgagctttggtttaagtgtctcttcgaagttcccactaaaaaattaacatgctattaacataactatttaataagtgaccagtagaacctaagccagctagctctaaacattttttagaattatcctataatttaaaaacaaattttcaagataactataaacatcaatatgctagcattaccatactcttgatatatctgtataggcaagagttgtaatttgtaaaaacattaagggattctatgccagacagtaaatatctcaggtaaaaaagagaaagagagggaaagtctatgttattataatgataataatagcaaatatgtagtgtttataatgtactaggtattgttttaagtactttacatatattagctcaattatttctgttaaagaaaaatctgaaacacaataaaattttaaagagttcatttgtgtaagaagtaatttatgaattgaagaataccagaccaacagaaatttagtgttccaatgtcagaacatcagaagcaagcatttaatttaaaaaaatgaggaaataaaatgaagaaatttggggctaggtacagtggctcatgcctgtaatcccaggactttgggaggctgaggcaggaggatcacttgaggttacaagttcaagactagactgggcaacatattgagacgccatctctgcaaaaaataaaataaaatacaataaaaattagccaggtgtggtggcattcaccagtactcccagctactggagaggctgaggcagaaggattgctcaagcccaggagggtgaggctgctgtgaagcatgattgtgccactgcactccagcctgggcaacagagcaagaccctgtctcaaaaacaaaaaagaaatctgattggcttacacaattatcttttttttttttttttgagaggaagtctcactctgtctccaggctggactgcagtggtgcaatctcggctcactgcaacctctgcctcctgggttcaagtgattctcctgcctcagcctcccgagtagctgggattacaggtgtccgccaccacactcagctaattttttgtatttttagtagagacagggtttactatgttggctagggtggtctcgaactcctgaccttgtgatccgtccactttggcctcccaaagtgctgggattacaggcgtgagccagcacgccaggccaattaaggctgctttttaagatctagctggttttatttgttcaacaatttttcaggccttatctatattttaattttactttaataattccccctttttgctcatcctctcaacaagctgaaagcgtgaccaaatagcatactgttactctcagttgccactgttgacacagttactgggatataaagtcaggtagatgttgttatcatcattagagtcatatcgctgccatcaggaagtacatagtcagtgtcctcgagttgtctgagcccgacagcaatcgtttgacatgtgagtggctgttaaaaaatattaaaaacctgtgagaggataaaatgcaccaggggagtcaacatcatgactataaagaaaataaaaatcaaaggttgaaaaattcctctgagcaaaatttccaggagccatgattttaccaactgcatagatcaatggaggaggcagtgcttatctgatgtaaaatctggatttatttgttaatattctttacattttgggcaacaatatctgattcgtcaacataaaaacaactttttttgtcttttttaccatgtagggcacaattgtgttgtgctgtgttgagcagctaaaaatatcaagaacccgtttattttggagtgccactgaggtcaaattatttatctcagattgtactccttgaagagaatttaaagtatcattaaaacttctttaaaaagttgttgaaatactaataagttattttttcaattcggagacttctagctgagaaaaaaaaaaagaggggctcttacaatagaatggaatttgaaaacgcctttgtatgctcaggtttggaagaccacagagggctcctttatgagggccacttcatgtacaaatgaccctaagttaaggatttcactagcatttaaagagtcatatctggtcatttcgggtaagagatagcccaaaccacagtatccagaccatttaggtggaaaacctttatatattttgttgtcacacaagatgaacaacccagcattattgagagaaaaagtcaaaggggatcccatgactcaccagttgggagtaatataaatgtcatggttattttttgtcatctctacatttgtacattaccaggttgaatggttatggtttaaattagaataggaacaaaaataattttataaatgtgataaagtaacccatgcataccatcactaaacaaggatgattggctttcttttcaaacatgtctcaaatattgctctattcaataaacaaaagtattaattttatacagtgaaaccatgggggaatttcatttgtcttcagtgttttcactgaacagtacttttagtgatttttgtctgttttgttttgtttagagacagggtctcactctgtcacttaggctggaatgtagtggcataatcatagctcactgcggcctcaaactcctgggctcaagcaatcctcccacctcagcctcccaggtagctggagctataggcccatgccaccacacccggctcattttaaaattatttctgtacgaggtctcactttgttgcccaggctcatctctaactcctggcctcaagcgatcctcccaccttagcctccgagggattgtgttagtcaccacacctggctgaattttctaatgatatgttcaaggatatcatggtcatgttttcatgttgtatctgtgttattatacataggggtccagtcttcataatctgtgtcaaaccaaagggtttgattacagagggagtctagaatactccctagattgaacccaattctgtgaaggttttctatgcgtaaggataaattagcagtaataaaatcaacagtagttatacgccatccccttttctttaatagcttctttctaatgctagtctattataaataggaactgaactgccaagaggagggtaccaagcttttttagaaagccagtttcctgaattgctcacccaggtatgtgtgggagcaagttttaatattaactgtgttttttcctgttcatccagatgactatataggcagcaattgctttggttagtgagctatactttgaacagtagactttagaggatgttcagtttgaggagtgaaagtccccaactaagtaagagtacaagtttgaacattttgtattaaatgtaaaacaaaaacaagtctttagccaatggaaaatagtgacatgaagtcttgtttggtgatcttgggaaagctgtctactgtgtgatgccatctacttaagtcacctataggttgacaagcccaaaagtctaagggagctttctttagttgagagacatgacctaagtttcaagactctgaagttttgctgcagtgtgagtagtaagaagaaatagtatggtccctttcaatgaggctcaagggcagtttttctctggtgtcattttcaaaagacccagtttccacgttctaggccatggaaggtttgatcatcagcagatgggtcatgggaagctttcttcacctggtgaaaatatactttggcaaaatgcatcaatgttttgcagcattgatttatattagtaaataagtccaggagatacatgaggctctattttcaaagacacgggtctccttgttattattttataaggggccaatttgtaatttcccattggggttgatctaattgcaattaaggccagtggtaaaacttttggccaagttaatccaataaactttattaatttaggtaattttagtttcaagatgccattcatccttgtaacattttgaaaggactgaggatgataagggcaatggtaatgccattggatttgtaaaatcttatttaattgtttcataacctgtctagtaaagtgagttcccctatctttggaaatctgtccagggatgcccacagaggaaaaatgattttaaataaaattattattactgttgtgacatcagcttttctacaagggaaagccttaatccattctaaaaacagacacactatcacaataatatattgttatcccactaagggtggcaatcaaatgaaatccatttgtagatgtttaaatggcccagcaggtgatggaaatataccacttgaatctttaagggtctttctgggattactggtttgacaagccacacaatggttataaaacatttttgttgttttagaataaccatcccaccagtactttttaacaatttgaaccattttatccatacaatgatgagtaatggcgtacaggacttttaagagtggcattttcagggcctcaggaaggattaggcagctatccaagctcttggtgagtccttatttagcattaaatttgcatccttttagacaacatttttgttgttccaattcaggtgcacagcattgtttattgaacaaatgatcataagtaatttgatttgaattgattttatagagttcatacagattgcatattttaacaatttcagtggtagtcaacttggcatgaaagtcttctaatcccttccattaatatttaggtttagttttatgaatatgagcttcagttttagtaatagcaacccatcagggcagtagaagagccaaaagaaattaatctacctgtgacccttcttgatgggatttccactagaaatgagaaatactttttgtttcaataacactccaaaatcatggaccactccaaaagtgtatctattgtctgtgtaaatgttaacttaggccaggcatggtggctcacacctgcagtcccagcactttgggagactgaggtgggagtatcccttgagcccaggactttgagatcagcctgggcaacatagtgagaagccatctctgcagaaaaaagaagaagaagaagaagaaaattagacaggtcatggaatggtcgtcatcctcccaccacagcctccgaagtagctgggactataggaatggtggcacatgcctgttgtcccagctacttaggctgaggtgggagcatcacttgagctcaggatattgaggctttggtgagccatgatcacaccactatcctccagcctgggcaacagattgagacccagcctcaaaaaaaaaaaaaaccccataaaaatcaaatagtaactatttggttttggctatatgacaaggcctagttaagagaatataatgttgcaggttgtgctaacttaaactgtgaaagagttcccttttctgttagttcatactgagtggttacagcatattctgtttcgtatctcctttgtatattttttggcataagacccattaacaaaaagtattaattcaggactatctaatagaatctcccataaatcagtgtgaggggtcaatagttgtgataccacactcacacatttatggttttctccatcattaggcagagtgacagggctaatcagagattacaatattcgagatggagatttggagtttacaggagaaagatgtcataagatgttagtctgcttgggtctgactggaatctaataaatgtataacggtatgttgaactcgtaggtaaagtttcatttcctaacactaggtcagatgaggtttcttctaatttagctgctgctgcaactattttcagacaacttgaatatgctctggccactagatctaactggagactctaataagcaatcagtcgctttctttccctgtgttcctgagccaggactcccaaggcctaaccatcatgtttgtaaacaaacaatgtaaaacattttgtataattcagaaggcttaaagctgaaggctgttgtaaggccagttttatttgatgggaagtttgttcatgattaccttcccatagcaaagactttgatatggtttggctgtgtccccacccaaatctcatcttgaattgtagctcccataaaacccacatgtcatgagagggacctggtgggaggtaattgaatgatgggggtgggtttttccaatgctgttctcctgatagcgaataagagatctgatcgttttataaagggcagttcccctgcacatgctctcttgcctgccaccatgtaagacatgcctttgctcctcctttgccttctgctatgattatgaggcctccccagccatatggaactgtgtgagctcattaaacctctttttctttataaattacccagtcttgggtatttcttcatagcagtgtgaaaatgaactaatacagactttaagacagattttttgtaagtttatataagggggatgccaacagaaaaatgttgaagacccaagttttatagtatccccaaagtccaaggaatccttttaattatctcttagtcatgagtctagggaaaccttagattgactttttttttgttcaggtgagagggaaattctctttccagtcaaatcatgtcttaagtaatagaccttttctttagagaataaagtttttccatggaggctttatgtcccttgtaaggtaatggttataagaaagaagttgaatctatgacagagttttatctggtagaagaacataactataaattatttacatattaaatagtagtagaatttctaggaaattgtgagattgacaggtcttggtgtaatgcctgagaaaaataacatgaggcatcagtggacccctgtggcattacagtccaggtgtattgctgttttttccaaataaaggcaaacaagtattggctcttcttatcaagtgaaatgctaaagaagacagagcagacatctatcactgtgaatcatttggcagctgtaggcacactagataacaaagtgttaggatttggaaccacaggaaattttggaattataattgaatttgttgcacataagtcttgaacaaatctccaacctcatccattagctcttttggctaatagaattggagtattatagtgactagtacaagtaattacaaatatttgttttattaactcctctacaattggtgaaagtccttggattgcctctaactttaggggtaaatggggaaatttaggcaatggcttagaatggtctagttggatatttataggttcaggacttatcattttttctgtcagttgaggaggaagcccacagatattggggtactccagaaaggttggggttggtataagtttggctttcaacgttatcaactcccactcgtaagaacaaagcagtttaggttcaggaggatcagagacctctagggttacttttccttctgaagagagttttatgtgtcttcttaggttagaaagcaaatctcattccagtatctttactggagtggtgtcacatagtaagaaggcatgcttctctgaaactagttcagcatttcaactggtttagacataggaattctctgaatttgatttgaaacccccaccacagaaatattttttcactccaagagatgtgttggtttattagggtggggtttaaagtggataaggtggttccagtatccaccaacactgtgtatacatgactccccattgatcttgatctgagtttccttataaacataagggtattataggaagtaacttaccagagaatccctcagaaccccattcatgttaattattgtcttgagagtcaaaccgatgggaattttctctaacagaggaagttagggactgatactagagtggacaatcttttttccaatggcctgactgtttctaatgatggcagacatcttaaggtacaggtttctttgttcaggacctcttgattttgagttatgatatgcatgaagaggccctcttggactttgtccctgtagctgttgcagctgtaaacatagaagcctttgatattttttcttttagcgtttcacctttttcttgttctaaagttctctaaaaatgttcaaccatgatgactaattcagctgtatcagtaacttcccatccaatctttcattttttaatcaggtcaccaagctttggtcagagcccatgaatgaataagtctgtaagagctatttcagtttcagcagaaaattttccctgctgtattttaagaccagaatgtttaacaaatctagccttgtaatcagaaactaatttatttctttttatttgtatacatagttgaataacggaccaatcttttgtgggaagacaatagggatcgtttccagcagtttttcggctatttttctggcatcttttttaccatccctagaagtaactattgaagagtcagcagtcctttcctcaggcttatcccatcctgctctttttatccatttgtgtacgtctctgggtcttaatattatgtgtataaactgatataaatcaggaaacacagggtcatagactcctatgaggattctcaattcctcagaaaatttttgtgtattttctttgcaatttggaaaatattttgctatggctctgagttcagtttttgaccaaggaataaaattatttataggagccaaacctgggtattctgagggcctaactttatgaggcatttacttaacttccttcctctctttatgctccagataaaaatgtaattgagcaaaaggattagtaggcttaggagaaagagatggtttcacaaatgagtttgtggatttagaataattaggtagaggagaataaaggcaggaaacaaagtcacatcagttaccacataatttccttactgttgccctcaatttattgcttaagcttttcagttgtcttatttgattttagtaaataagcttttttttttttttttcgagacagggtcatgctctgtcgcctaagctggagtgcagtggtgccatcacagctcactgaagcggtgaccttctaggctcaggtgatcctcccatctcggcctatcaagtggctgggaccacaggcatgggccaccatgcccagctaattttttgattttttttttttttttttgagatggagtctcgctctgtcccccaggctggagtgtagtggcgtgatctcggctcactgcaagctctgcctcccgggttcacgccattctcctgcctcagcctcctgagtagctgggactacaggcacccgccaccatgcccggctaattttttatactttttttagtagagacagggtttcaccgtgttagccaggatggtcttgatctcctgacctcgtgatctgcccgcctcggcctcccaaagtgctgggattacaggcgtgagccactgcgcccggccttgatttttttttgtagagactaggtctcactatgttgcccaggcttgtcttgaactcctaggctaaagcaatcctcccactgagacctcccaaagtgttgagattacaagcatgaaccactgaaccactgcgcctggcttgagtaaagagtcttttagagaggcaattttggatcagctagttctttgtaagcctctgtatgccaatcaaaaaatgcatgccattgtttctgaggtatttaagatccattcttttccattatgccccataaataaacaattttatctagattaaaacttccccgttgtggccactgcaacttcaaattatttcttgtaggcacacccatttttctagaatggcacaagtttgtggtctataatttctaaataaaaaatttgctggtgttcccagcagaggagtcccaggctccttagatattgacaaacccataatatcctgtctttttaaaattctatctacctgaggcttccaactacaaactcagtctagttcctattgaatacccagtttaacctcgagatcccaatctggattccagatctattctggaaactagtgcactagactggacctagtctagtttatgtcaagcactcaaatttgatctctggttacaacagggaataaaatgattcagataaacttggagagctcaggacacaaattgtggagcttgaaatctgagagggacttaaccaggacctccagatgcagtgagaaagcagtgagctccatggactcagcaggtaccttttgcctggttccttgatacacccagtggcatggcccaaggatttggggcgtagtggggggggggtctcctttgaatcccacttctgacaccaaacttaaagaaaatctaaagcacagcaaaattttagagtttatttgagtaagaagtaattcatgagttggggaacaccagaccaacagagatttcgcattccagtgcagaacatcagaggcaagcatttatgggaagatgcaaaagtaaaacaaagaaatcagattgacttacagttacataattatccttttgggggtacttttttgggaagttcttagtcacataattatatcttagttggctgcttatgattgactagagttaagtttaatttctgttcaacataaacatttaccagaaacgtcccaagttaagtttagcttatatctgcagtgtgaccccagtcaggttccacctatatttgcaatttaagctagatgaaagctacttttaagccctagctggttttgcttgctcagaaatttttcaggcctggtctccattttaattttactttaacatttctcataacaattttatgaagtagttactattatctctatttcacagatgatgcagatgagggaactgaggtacaaagatgttaaataacttcctcaaggttactcaactctgaaatatcaaggccaggactcaaactaagacaaaatatctacagaatacacacttttaactattagactattaactctttcaaaagaattcctttgaaaccccaggagaagtaatattagaaaatgagagtaatattagaaaaagaaagattattagccctttccttacttatcagtgtatagtttcacttgttacagcaagtatgttttacttctaattcaaaggtcatcaaataagataaaatgttctgctggcactttgcaaaaaaagggtatcctgatggtcaaagtcacgtgaaaagatgctcagctctatgagacatgaggaaaatgcaaattataaccacgatgtgacatcactgtacatgccaaaatgactaaaataaaaaagagaaaaaagccaggcaaggtggctcacgcctgtaatcccagcactttgggaggccaaggcaggcagatcaccaggtcaggagatcaagaccatcctgcctaacatggtgaaactctgtctctaccaaaaatacaaaaaattagctggacgtggtggcacatgcctgtagtaccagatactcgggaggctgaggcagaagaatcacttgaacccaggaggtggaggttgcagtgagctgagatcacactgcactccagtctgggcaacagaggaagactccatctcaacaaaaaaaaaaaaaaaaaaaaaagagagagagagagaaatgataacaattttggtgacaacaaatggaaactactggatatgaaataattggtattcttataggctacttgtgggagtataaattgatataaccactttagaaaactatttggcagtatctattaaagcagacatatgcatacaccaatagtcagcaattctactcccagatatgtacctaacaaatatgtacacatatgaatgttcaataaatgtgtttaagaatacttatagcagtactgttcataatagtcacaaactaaaaacaatccaaatctccatcaacagttgagtgggtacataaattgtggtgtaatgataaaatgaaacactatgttgcattaagaaggaacaaactattgctatgcacaacataaggataaatctaacaaatataatgagtgaagaagctagacacaaaaatgtctataaatgatttcatttacagaaagattaaaaagaagcaaaactaatataaaatgttagatgtcaggagaatggttacttttggtggggagcaatgaatggaagggaacatgagggggttctgaggtgatgtcaatattctatttcttgatttgtgctagttaatgaggtgtgttcatattgtgaaaattcatcaggggccaggcgcagtggcatgcctgtaatcccagcactttgggaggccaaggtgggagaatcaactgagccaaggagttcaagaccagcctgggcaacatagtgagacctcatctctacgaaaaaaaaaattaattagccaagtatggtagtgcaaacctgtggttccagctatccggcaggctgaggtggggagataacttgggacttggaggttgtggctgcagtaagccatgatcatgccagtgcactccagcctgggtgacagagtgaaaccttagttgaaagaagaaaagaaagaaagagagaaagaggaaggaaggaagaaaggaaggaaggaaggaaagaaggaaggaagggagggatggagggagggaggaaggaaaatttatccggccggacacagaatttatgcattttcctgtatatgttatacttcaataaaaaaaattcttaaggatacagtgttttggagtttaaaatgataacatttttaaagtacctggaaataatactattcatactataataaaatgctactcaagcctgcaccttgccttttgagattcacaagaagtatattatctctagaagtatatgtgaaaagtgatcgattaaaaagtgctggaatggctccagccaagatccattgttgtcaaaggtatctggcagagagctaaatgctactggatctccaaagacaaatttaaaatgattatacttagaagaaataggaattgcactgtgctgctaaagatgtaaatatttgtcttcgactgtggcagagattaaagaaagagcattaattttttttgtttccttaattttttaaaatagtaacactgtaaaaaggacttccttgttcactgattcaaataccaaatctcaactatggctgaattttaagatgatgaacaaagtacctactttagtcatctccctcacaacaaatccatagaaatgataggaaacatacttcagaagaagaataagaagaaagagaaaagaaggagaaaagaaggggggagcagaaggaaaaagaggaggagaagcagcagttagtggcacttaggcatgggggtagaagggcacctttcaatgaatgagaatctttgaggaatccctaggaaagaaaacaaataggatcgactgaaaaggaaaatttaattacaagcaaaaacaatcactgtgaaaggtgagcaaaacacaaagagagtttgctcccaagagtattttatttcagaagagttctatacctcatgctcttagaggcagtatagccatttgtccaggctgctacaacaaattagcataaactgggtgtcttaaacaacaaaaacatatatctcacagttctagaggctgggaagtccaagatcaaggtaccagcagatccagtgtcctctgggggtcagctccctcagttttcagttgaccaacttcacattgtatccttaacatggttccatagtgtagtggttagcatttttgttttacacacattgtatccttaagtggcagacagtggagccctctcatgtctctttttgtaaggacactaatctcatcatgggggctcctctttcatgacctaattacctcccaaaggcaccatctccaaatatcaccactttagggattcagggtttagcatatgaatttgggggaacacaaaccttcagtttataacacacagtaatgtgctgtattatgctaaaggggaagggatccataaggaaggctaataaggaggaaggtatgggtatggtaagcaggggacaaaggagaacatccttggtggtccgaagaatcccagttatttccatgcagtaagaggacaggtgccccatgggcatgatgggagtggtcattgatgaagaggttcaaggcaagtggtaaaggctcgcagcagttcccatgggagtaagttgagcaacagcaaagcacagaattgggcactggtgttacaaacacacgaagaccgtgaatttatagtcaccgatctgcacatttatgaggttttttttattttctggtagcactcagtatcctgggataataacagagaagataaaggaatcatggtgtttttccagagctgaggtttttccaggaaagtaaaacaaaagacaggggctagggagttgagagtattggtgacatggtgatccaggagagcaacagcctaggttttggggctaagatgagctttgatacaggatatatcaaaggactggaggttgaaatagagaacaatgaagatggaaagataagaggttgtgtcataatggcaagggtctgttgaactagatcttgaatggccttggaagagatatgggggagtggtaatttggaaatggagaggataatgcattccagggaagagaaccacacatgtaaagacacatgcaaagggaaacggtaagaatttccatgtaactagatcacacattgcatggaggaaagtggcatgagatcaagatagaaacccacattaaaccagattgtgaagagcctaaggagtttgggcatcatttcctcccagaggcaggagccaacggaagttctcagatagtgctgtcctgtatggctaccgttggacaggttgtatcctgcacagagtctccttcatggggtctaaactctagatcgagctctgcttgccaagccattcatcctgcttgctctgtagctgttaccccaggaggaagagggtattttctttaattcttcagcccctcaagagagggagccctcttttaattcatctacctgaggggctgcattcctttttgggtagcagtggctctgtgtagagtgatgaccagacagacttctcagggcgacttttctggccgtggtgtagaagatgacccagaatgaggagacacagtaaacatggagagcagaacagttttcagcagtacaagggcttaaccaaaggcagccaagaagaaagaaaaggggccagatccggaagcgaactctgtagtacaattaacaccagggggcttatggacatagggatggtgggaaagggaaaagttaaagatgactcagatatattctccactgtgttcctagaataaaacctgaccacattaatgctcagttaacatctgtaaaatgaaaaaaaaaatagagcttcaagtaacaaaaacatttttaagggaaagatactgtctgctgggatggaacccataggaacccataagaaacagtacctttaattatcttaagcttcctcagtttcgagttgtagaggtcagataactggcctagaaatttagagttactccagacagttgttttcagccctggctgaacattcgagtcacctgaaaagcttttaaaaactccagtgcccacactggatcagttaactccaaaatcctggggatgaaacttagacatcaacattttttaagacagaggctcactctgtcacccagactgaagtacagtggtgtgaccatggctcactgcagcctcaacctcccaggctcaggtgatcctcccatctcagcctcctaagtagctgggactacaggcacacaccaccacatctagctaatttttatttatttatttatttttattttttatttttttgtagagatgaggtctccctgtgttgcccaggctggtctcaaactcttggccttaagaaatcctcccacctcagcctcccaaagtgctgggattacagatgtgagccactgtgccagtccagacatcaacattttttaaagctcctgggttggttcctatatataacaactgctctcatggaatttgcaatctctattctagatttctagacgtgatcagtaatatagcatagataagaggtggatcagagacagggcagaatggtttaacttatttgaccatcttgtcacaacggaaatcaatcatccatttcttacaaaatccttttacatagtgaccagttcttcaaaattaatttctacatcttgacaaaacatcaagaaattcattatgtggcttcattgatttttaggaaactgaattatgggcaagatatgttttaaaaaaacagagcattttaaaatcattacttaaagagtaaataatgcacaggcttggaaattattttaagaccccctcatttgctgctaaggttatgtgtgtaccaggtgtcaaaaagaccaaatgctatagaaaaataaaaggaatggtttaaaaataatttaagggtcagaatgaagatattttgcataaattagaaaggtggtacacaaaaataaagaaagcaaaacaaaacaaaaaaccctagggcctagacctcggttctaggcctggcctttccccctaaatattgcactgaaacttagaggccacctcacctcactgagcctcattttcctcacctataatgagcattctcaccctggtgagtttcagtcctctctaacagccaaacattctctaattctatcattggtaagtcaaagatgagcaggctaaaagtaatttaagcctcaccattcttgatatgaaggcaagaggagcatcgctcaccaaagagaagtcaaggacccaccccaggccacagctgtttttattgatccacaaaggataagaatttcagagtaaagtctggaaacttttgtagtcatttaactatttctgttaaatcacataataaaatattgagccttgtattttgtatatctttgtatttttatttcacctttttagtaatcaatttttattatagtttataatagtgtaagtccacagcaaattagaaatttaaaaaatttcatctttcaccgtggatagtttggaatacactgagctggagaaccataattacattttaacatcaatgtaaaagtgcacacagaagggaaaaaagcaaatgcaggcaaattaatttttaccttgtccattttgaattttattttagaggcccatttcatttggtcttagatcattgctattaaaagttattttctgctacaagtttatatgaactgctagaggctttttaaaagaaaacagcctgtattagaaaacaggtggtaaggggttggttttctagtactaggtcattatctaagaggaattacaatatgatatgtcaggtagcacagtaaagttattaattcctgttggaaaagataggtactttcctttttttttttttttttttttgagacagagtttcgctcttgctgcccaggctggagtgcaatggtacaacctcagctcactgcaacctctgcctcctgggttcaaacgattctcttgcctcagcctcccaagtagctaggattacaggtgcccaccaccatgcccggctaatttttgtatttttagtagagatggggtctcaccatgttagccaggctggtctcaaactcctgacctcgggtgacccacctgcctcagcctcccaaagtgctgggattacaggcgtgagccaccatgcccagccaggtactttcctttttaagaaaagaattaagtcactcccttttgattggaaatggctaatcatagggtctcaagctattaacatagagacacccttgtttaaaaataaggaaggctgcataatgaggttagttttcccacgattatgcagctaataaataggaaagtctaggttcccacccaagatgctcttctcaggcttgcctgtgctttctctgctgccctagtctcctccaccataaaaagtgttcaggtgggaaccagagagtgaatgcttgcataagcctcacttccaggtgcttgaaatagggtaacaaatattaaaaataatgtggagtgcttatgaatcaccttaatatgtaaatgactatgttctatttagaactttctgcagataaacaagatcaatgtttgttctgaagtgatttgcacatcacacagaaaaatatgagagaaaatctatgctctccacaccatatgtcttgatgtcgagactggtttgatctgtgttaccaatagacatgccccaaaatcaaaccaccttgatccttttaggaaataagtaggatatcaaattttaaaaagtgaatattcctgagaaatatcaagtctttgcagagattctataatcactgtgaggaatccagaaactgcattgatcagtttaaaacatggctgttcagtgaacttaatgactgtgctatttcacaggaatgtttgccaaaaaaaatgaaattgtttatcaattacttgacttttttatctagacaacgccagaaaaatccagatttttggaatatggacaatgcaaaaaaattttagtctatatttatggcattgtctagtcttagcttaagaacacagcatttacttggcttcattatttactgttcactaacagataataaaattaatagcaatttgggggtggtgccatactctgaaacaattaataaaatattttctcttctttgcacattattgtgattttttaaaggcaaagagtgaatgattcctcaattcttagcgtcattgatgtaaagtcaatatttgataaaagaaccaagttatattgtgaatgaaatcagctggttaggtgcaatggatgtgtccactttaataaaagcaataattcaggttgaaaagaacttcattatcttttctcaagataaattttaatggaggcctggtctgagaatacaatgccataagttctgaatcttcaggttcgtgcaacaagtcatttcttaagtgaccttcagctgactacataaaatctgaattggtcttgattagaatctgtccagctgtcagtcttttggcctctgagatacagagggcatatacccatgatgctgtggggttatgtaagagacagtaaagaaataggggggaaaaaaacagaataaaatgtaattacacagagtttcgtttaaaacaaaaattgattgagttctgcttaaagtggcttgttgtttcctgtgccaggaactactgtgcaggcccagcaggaagtgtgctacagagcaggatcaccttacaccctcgttttatggttcatttcacttatttaatgcaatctgagaacctgcaaaaggaacatgttagaaggagggaataggctttttgtcttgttttgttgttgttttttttttaaatttctttgaatcaaaacatttgtttttacaaggtgcttaaagtcccagagaaacaggacttctagagttgcacagtgaagacatttctctttgtcacacaatttaaagcaagacacaaagttgagttatgtctagagttgagttatgtctgtttcctttgctgtcctactcacataaatttaagcataaagaattacaaccatgcccatgaatggtctaaatcattttgaattccatgtaagttcctcctagggtctctaatttgatagagagcccatgatgttgtggggaatgttggagaaaaggaattaatatttaagatgtagaatagcaattcatttgtcaagcaggggaatgagttcattttactgtattgtttggaaatgtgtgaattgaacagctggatttccttgtggtggcatttgctgctcctcacacgctgtctgttttcccccccagagacctcagtatgaacaacatcagtcagctgctcccgaatcccctgcccagtctccgcttcctggaggagttgtaagtatcactgtagtcttgatgcatccagtcaacactgggcacattcttgtgtttgtctctcatacttactgtgggaaccagataaaacaaggcagaaaacctgtcagcaccaacaatttcagaacatgaggaaacacttagttgggagggggcaaaaatagaattgcttatgattctggaaatcaacttataaaagagtttaccataaggctacaactttctaaggtgagactgagccaaacaaattaaaattttaaaacaaagcctgtttaaaagagctggatagctctttggaaatagttaagcagcaggatattaaaagtttgaatactggttcatgtttattaaaatcgcaagtaaagctataatcaaaaccaaaaactgctgcttggttcggcttatgacagggagaattgagtccacattgcatagcaccaaaacttcttgtcctaatcacttttaattactatttccctacttttaaatttagcttccctcaaggcttcagtagaaaaatgtgaaatccacagaagatttaaaactgggctcttccaaacactaaaaataaaaactaaaaaaggaggaagctaaaattagttaatgatacacagaggaattttgattaagtctagtaaccacttttcagaagatgaaaaagaactgtataaatcaaaaatctgcatttaaaaattcatttgatcctcttacgcttttgaatgatggggataaggaggtgataccccatcacagccctagtgtagaacgtttggcaccatcagttgagtcaatcctctgactgttgattaaaggaattgtttaggtaatgacctcttttgaaaatattttctttataaatcctgaagtcagagtccaatttggggagtaatttaaattgttaatgcaccacagaatccaccatgggaggtggaaagaatgtttcatcataaccaaattacactacgttgaccattttctcaagagaataagaggataacattttgaaatttctcccctctggagttttatctatatttatttttgatggcattatattttatgaaatgctattgttttactaccaaaatcagttgcatgtgataaaattggtatcaagggttatggtagggaatcttagatttctagattgtatagaaggttttgtcattcatggaatagattttcactctaggtcccaggccttttttttccatcttctcttttgtctcaggacatttccattgctaagatttaaccttcataggagctggaacaatgtctgtcttagtcatggctggtacataataaataatctgtaaatttttaatgaataaactaatgagaaagcaaaatatgtaaaaggagtttcttacacatgtcaactccctaagaaaaagtaacagattttcattgacattagtcaacatttttaaaggttattttaaataattttcaaacatcagaattttaaaaaattacatccatcttgttctccctatatttccacaattaatatagaatagacagccctgtttacccccatatttctaaggtatgcccttcctatccttttccctttaattcccatataatatctcatggcaaaatgcttcccttctccctcaacacacacctcaactttagaccacaagctgaatcaataaataattcacttccccaaggactttgtttaatagatttcctccctcagtgacccaactcattcaaaataactcctctttcttcatgaggtgaatattaattctgttctaaggccagtttttaaaaagatagttgaaaaaaaatcacaaaaaaagcaatggtgtttgcggagagaactaccatttgaaaatgctactattaatacttttctgccttgtcttatttttatctctctggaaacttcatcaaatatcttgaccatagaatcacaaaatttcagaaatagaggagaccctttaaagactattcattccattgcctcattctgttctggaattctttctgctaagctggctgacttgctgaatttaaaatcaagactgcttttccatatataattctgtgctgcacctaactgatgtcttaaagacatcattattcatttagcggcaaaagaagttagtatttataaaacctggaaaaatgatcagctcttcttggtttattcctttgttcccaaagctaaatttaggggtttggggaggttctattttttttgtttaaaaaatatccctttaacagaacattttttttatgctgttgattgtttctgttagacatatgcttaagtctatattctcttttaggctatacaatcttcaaaaataataatataagtgtagtaacaacaataataggttactgtgtgccaatcactgttgaaagtgctttacacacatcatttcagtgaattataacaaccccaaaaagatagatattattattcccagttaacagataagaaaacttaaatacagagaaaataaggaacttacccaacataatggagttggtatgtatcagagccaagattcaaacctaggtcaaagctaagattcaaaatgactttcaaagccatgcttggaaagtggagggacggttggaattgtgcatggtttatttgcgctttttttttctccaatagcacctagcactgtgatttcacagtagtttgcatagttgaacacttttaaatgctctataaactgagttgtgtaatgatcagtgtgtatatatgtgtctgtgtctgtgcatgtgtctgggaatgtgaaagaaagcaatgaagagctgtcttcccaggaggaagagattggatattcaggttattaatctacgactatgatatactatctatgagaaaagtatcatcagaactttcaggtgtagaatttcaccaatctagcattgttcaataggtccaaaatagtcttcgataatattttttacatgtaagtacatatacttaagcaccatgtttatgcagtatatattttacttgaactaataaacgaccacccatacagctagaaatgttaactctctctttctctctctctctctctgggtgtgtgtgtttgtgtgtgtgttatgacaattaggacactatgaaagtgttaagtctttcattcagcttattcagctcatttttgtgctttatctctttatacgttaaataggaaactgccactgacactatcaataatattaagaaacctcccatcataaaactcagtctttaaaaatcactatcagctgggtgaaatggttcacacctgtaatcccagcactttcggaggccaaggcgggcagatcacgagttcaggagatcgagaccatcctggccaacatggtgaaacctgtctctactaaaatacaaaaaaaaaaaaaaaaattgttgggagtagtggtgggcacctgtagtcccagctactcgggaggctgaggcaagggaatcgcttgaacccaggaggcagaggttgcagtgagtcgagattgggccattgcactccagtctggtgacagtgcgagactccgtctcaaaaacaaacaaaaaaaatcactattaataaagccacattatcactcttccccttagctctaattaccggatatatcatttctctcatttaattcctttaactatgttataaactgtgtagatagccatggttcatctctcatccatggctaagccttaacaaaggtgtcaaagttcaaaatcctgtaagaatcaataaagcgctagagatatacactgacttaatgtttaaaaaagcaagtaactcagccgggcacaggggctcacacctgtaatcccagcactttgggaggccaaggtgggtggatcatgaggtcaagagatcgagaccatcctggccaatatggtgaaaccccgtctctactaaaaatacaaaaattagctgggtgttgtggcgcgcgcctgtagttccagctactcaggaggctgaggcagtagaatcgcttgaacctgggagacagagattgcagcgagccaagatggtgccactgcagtccagcctggtgatagagtgagactcagtctcaaaaaaaaaaaaaaaaaaaaaaaaagcattgtaactcttgattgaatgatgagttacagaaagtatttcagaagaacagctattacagaaaattgtcttcctctctccttcctgacattctagaacacttactacctatgccgcaagtttttgacacatttcagtcttgttttttatttgtttagtttagttttgctttgttttgttttgtttttgtgactctacaaggtgaccagatatgcagaggccaattgtccttctggtggcaatgtgcccgtgcatagagaaggggagtctttttcttttgcaaaaagaaagaaaagcaggtcgaaattagggaagctgtgctgtatagaaagaaaagctcagaatctagattcagaagcccaggattcccatcctggctctgccacttactagctgataatccacttaatgctcactaggcctcagaggagaatggtgctgtctgccttttaaggtgtttccaagaatcaaatgaaaggatgatgaaagaacgttggtaaactatattctgtatatacagttgtattagtaaaatgaaaacaccttcaaaaagattttaaccccctcttttcttttttcatgagcctgattttgcaggaatctcagggatcctggacttgaaaaactgtttccaattctgagctttaatggatataggcaacgattgcagatagttctttactattttaataacccgagaaatcattgcatttccctccagcagtatctctcctccttctatttactcagttctaggaacttccgttaacgcttgctatgtagacaaataaaagatcctacatttgggccatcagagtgtagtagagatgttgggagctaatggcagatggtgactattactggcgtctacaagttacattaaacttagcttggtagtctgactaaataaggaggggggaatgaattgttaccatttaaaattgtccaagttaaaggcctttatttccaagtagtattttaaaatcttcccagattctagtgctattggaatcaaatactcgatttagaaaagaaacatgagaagctctaggggggtctgtttttaagttactattgttccctggaaccgtttgctcatattatggttggacatgacgaatctctatataaatagtagatatctattattacagatgaaatttgtaatgagagatcactaaacttcctgaaagcataatctaggcttgttacttctacttccccagcatgttactgaaaatagcatctgtatagctgtcctgcctgtcttttgagatttttttcttcctgaggatcaaatgaaacaatgatcaaagaactttggtaaactataatccacatattgagttgtgttcataaaatgaaaacatcttcatgcccatgaataatcttcaggccccttggccttctcacagtgatcgtctcctgtcttcatagatctgcccattgattataaacactgcctccttgaaactcaagtgttatttcacggcagttattttgtatgggtagtcttccaaatgactatccatccagctagatatagacatttagatatcggtcattgtgtatatatatatgtttgtggtgtatatcttttgttatgacaatgaagccactgttttgaaagtgccctacctctctgcctcctttttctccttagcattccattctcccccaccacctataaaatgtagacatccctcatatatttccacttaactttattgtctcctttctctatacttcctccattcacatatttatgaagccactaagaacataagagcaaatacgacttgctgtgtttgttccattcattcattcagcaagcccctgccctcaggaagttgtcaattgagtggaggagacagataataagcaaggacacaactgcatatgatatttgctaattgtgacaagagcagtgaataacacaaacatggtatagataaggaacaaataacaaggagtgagaaggagggaaggcctaagaaggtgatgtctaaactgatgagaaggtggaggagggactgggagcctggagctgagatacagtatttcaagcaggagaacagtgtgagcagaggccttaggtgggaagaacgtgatgtgtttgtggagctgcaaaaaaaatcagtatggctggagcagagtaagagagagggaagtgaggtggatgcagctggagaggaaggaaaagaccagatcgtgcagggccagttaagccatgtatggaattcaaataagagcaatgggaagccattggaggattgtgtgcagctagtgaaccaacaggatttataaacctaaaagatttctctgatttctgcatgcaaaatagattggggaattatggaagccgaaggacctggtaggaggctacgataggtgtctgggcgagaaactcatatagatgacccccaaatctatgtttccagaccagatctcttttgcctttgattgctagaccaatggttctcaatatattgtccctggacagtggtgcactggcaccaccttgttatttattctttatctaaacttgttctttatgagttggcttttgagaaatacaattcatgtgcccccaccccaacctggtaaatcaggaactctgggggttaaactcagaaaactgcctttaacaagctctccaggtgattctgatgcatggtaaagcttgaggaccactactctaggctagtggttctcgaaatctagtgacatcaggatcacctgtagtgcttgtaaaaccacgcatctctgggccccatcacagaatttcagcaggccagggattgggaggagaaagtcaagtggctttataaaccacttccaggtgatgtcaatactgctcgtttagctaccacattttgaaaatccccaactacttaagtgacacctccaccaactatccatcaatacttcaaaactcaacatgtgcagaaccagattcattcatgtgtcacctgcccagccgcccacaagcattttctcctaccttgcctgcttgccaccagcattcttattatccagacttgtgcctgccctgtcattttcttctcttacctcctatattcagccagttttcaagtcttaaagctcataattccaccttgtctttcctgtttgttcactctattttgtcaccacctagttcaggttctcattgtctcatttgggtaactcgtttttggtttgtttgttttgtttgtttgtttgttttttagacaaagtctcactctgtcgcccaggctgcagtgcagtggcacgatgtcagctcattgctacttccaccccctggattcaagcaattctcttgcctcagcctcccaggtagctgggattacaggcacccgccatcatgcccagctaatttttgcattttagtagagatggggtttcaccatgttggccaggctggtctcgaactcctgatctcaaggatccacctgccttgacctcccaaaccgctgggattacgtgagtgagccaccgcgcctagcctgggtacctgttaaaatccattaacaaatcacctgtcctaattctgtcaacaattaatgaattaatcattgtttctggggatggagaccatgaaggtcttcaggtgatcttataaatattaaacagagagaactacttcaaagtatcccatccttgaatatgcattagaatcgcctagcacactttttaaagctactaatgaccaggggttgtccccagagattccgatttaatgggtctcactgggaacccagacatcttttatttcaaagctgtacaggtgggctgagaaccactggaatatatgaaagcaccccaacagacaaaggcagtcagggactcatcagttggttgaacatagggactaaaggggaggtctaaagatgagagatgactctgaatagggttatgaaatcgggtgtcaggagctggtgaaggacaaaaacagggaattcaagggaagaactgattttggaggcaagaggatgcccagttctggatatactaagtgcaaggaggcagcaggacatctaaatgggaatgtcagtaacgttgttggaatgtaagtgtgaagcatgatgggtctgttctagagataatgattggagagtggtttacaaagaggtgatggttgaaggtgctgggtggatgagaaccctgagagagaaacttgagagaggctctgtgtttcccagtgtagtttttcaatctacaataaaatcactggagctgcttattaaaaatgcagatttccaagtccttctcccagaatgtctggttccctgggtcaggattggggccttggggatctgaatttttatggcttctaaagtgatggcaatgcacactaaaatttgagtaccactaagcagagcagaaaaaaagaaaaggtgtgaggacagaaacttgaggaacatctatggttgagcaatgaagactaaaagagagcctagcaaaaggaagaagagatgaccagtcatagtggtaagagtagtaagattgtgccgaatctgaaaggcagtgagaggagtttaaataaaaagcaatgggcaatggttttctgatagccaatgcctcaagtgatacagccattgtgtccctgcattttcctgttttaggtcagggttgctcctgaccaacctaagcttaagaccagccttcctttaaccagagtaataattaaaaacccccaatttggggtcaaaatgctatatttgaaccaaactttcttctgtgaacttttctacatagtgtgagcaaataacctccctttggcccattctgccatctgtaaatggagatgatgccaattgtttaatgtgattgttataaacaaatagcatcatgcccataaagtactgaatattgtgccctagcatttatggactgtttgataaatggtagctactatttatatgtccaaaagcactatatgtggcatattgaaagtgctctaagaaattgctgaatttaagtttgatatgtaacaaagaaggaatattcctcagctgtttctagtctggttttgtgactagctatcttggaatagttatgccagatctgaagcaactgaggcagtatggccagctgcctttggaaacaagatcaaacgatcaataaatatcagttgagctccatactctgtgcatgcaataagactcttgagcttaggagtctataatcagactacttataaaagggtaccaaatgagctaggcagagtggtgcgtacctgtagtcccagctaccagagaggctgagttgggaggatggatcacttaagcccaggatcttaaaaaacaacaacaacaacaaaaacaaacaaacaaacaaaaataacacctttaaaagaaagggtagagggtagaaaatcaaccattataggctacattgtatagaatgtatcttataggagagctgttaaccgagatggataaggaagattccataaaggaattaaaattgaacttccttagtctggttaaagaaaccacaggggcagggcacggtggctcacgcctgtaatcccagcactttgggaggccgaggcaggtggatcacgaggtcaggagatcgagaccatcctggctaacacagtgaaaccccgtatctactaaaaacataaaaaattagccgggcgtggtggcgggcgcctgtagtcccagctactcaggaggctgaggcaggagaatggcgtgaacccggaaggcggagcttgcagtgagccgagatcgcgccactgcactccagcctgggcgaaagagcaagactccctctcaaaaaaaaaaaaaagaaagaaaaaaagaaaccacagggccctatgcacattaaagtatctccttattgacttgaaagagttcatttactcagtccagtggtcttagtccttaacaattcttagcccatgaaccttgaaatctgaatgtttttattatatcaaataatgaaagcaaaatgcacagctcatgaatacacagtttaagaaagaaagctttttggctggatttgacaaattggatatgcttaacacaatgacggcatcacttgaggcattggctagaacaatggaagggggtagatacagtttttgaaaattgcaatttttcaaggagtattaggaaagatattttttctcaaatggggagaaaattagttgatgaaatgtcatgattcttatatccaaggcactaaattggcttctgcaaatcttaccaaagatgaacacaagaaggttaagctcttacgtatctggtcccatctgaccagcaggggcaccttgtaaaagaaaacctaccatggtgggctcagtcaattgctgctgtcatgcattactgcaagttgaggcaaattacatcttactataagtttcatcatatttctaattcttgatatgactcagatacttggctcctgtattgataaaccaaagccaaacctataaatgtagttggccctaaaagcaacaaaagcaaattaattaattgaattgaatcatgaatatcaattttaatagactattatactggtttcatcacttatgtatcttttgagagtcactaattatattatcatagttttggctaactttatttaggacaatatttttccaaatgagaatattttgatactttataaaagaataaaagacttttcagaaattttacatttaaatgatagtttaacagcagttaattgttcaggtaaattacaactccaaagagtgggaaaattcagaaatagtcacagaactgctgaaatcaatattggaaaatcacagagaaggaaaacagtaccagaaaactggaaataggcaaatatcatccagatttttagaatggaaaaagagggaaaactattaccattaagcctgatagccctcatcaaatttctagaagaaattaatttaacatttatagactgtatgccctctcactctcgtgtgctttgtaaaagttagaaaataaagcggcaatttctaggagccagcatgaatttactaagtagtctgatgaaatgttttcttttaaatcacaagaattatcatgttcaagttcattctactccaattatttaagtagcactgctattacatggcttccatgctccataagaagactagactacatttaaataaataaggaaagcaacaatgtttttcactttccataaaaccttttggagctttggtgtcttcatctacaaaatgtggacaataataatccctgacctatctctatgatataaattatgagagagtgctttttacaatgttaatgacatgttataataaagtaatcttacaataaacaagaagaaaaagggaggaaaaggagaatgagggaggaaaaaataacagtaggaaatgcaagtgtaatttttttttaaatttgagcgtagaaaaagaccttcatgaaagaactgtttcattttttttaatttaagggaaataaggcccaggaaagttaagtaacttgtgttgtctcacagcaagttaatggtgagaagaaagaaaatcaaaaagggaaagaaaaaaataactaaattagaactcaagaagaaatttgtgcaagaactgacccaggaggtctggtagatctagccaggccccctcgcttaactctgaaaatgctactcagccaagtggacccctgtcggaccatggtttcctgcacaataatttcccaagggtctcaaatgcaaggtcaaatgcccgcttccatcctcagtactccccagatcttgtacacatacctctccctatgtttagagaggaaaaattagacctatatacaattgctttgctctcatacctccattttaaaaaggaagctacaaaatataaaataaaatcttttatattactttaaagattcaaattactttaacaattcaaagaaaattgtacattctccaaaatactgtagatggtttttacagcaccaaaacatctacctgtttgatttatcgaaaaaggaatgtgtctattttctcttgtaacttaatgggttttttcttttaatagcaattaagtcagtaaaactaacaatggtgggacaatatgagtcacatttggagcaattatttaagggataaaaactttttaaaatattttatgtagaaagacaagttttttttaatcgagttacatcttgttacagaagtgaagataatgaaagggacattgccatgaaataataattttagaaacagcattaaaaaaaaaaaaaaacttctgaccaaatgttatgttgctctctagggttggaaaatagttgtttagcaaactgttgtagttcaaatcatcacaacaaaggtgtgtgtgtttcttactatttgtgtattgtgaacacatttgaaagcctgttttattcctatgtttgtatgcatttcggtttcaaaagtactaaagccaccccacatggtaaagaaataaaaggggaatgatttccttaaattgttgtttttgtcaatgagacagatctgccactagcccagcaaacagccaatagcagatcataaattcctttgctttgagacagactgccctgataacacaggtcagtggttccacaggttagttctgaatacagactcaggggactgaaagtccctgcccaaaaaagaaaaccaatttgtgtgaagtgagtttcaggaaatgtaacagaaaggcattcatcctaacaataatttaaactaatttaaaaaaataaagtttttactttctcctcttcatttccaaagtcactgtttcaaaaaccatccagctacttgatgatactgtcacagcagtgagagctgataaacacctagttgaaggctatgttttagagctcacaaatgcactgttgaagtcctgactgtgaccagtatagttagggacattttgaccaaaataacagttatgagtcagttgagtctgatcaattaagctgtctatcatggtcaaccaaacttgaatctgtcttaattcaaaaagcaacttttttgtatcacatcatgcccatttcatttgcttcagtattatacattatacatcgcattttggataactaatcaaatgcatgtggattatacataatgtaaccataagtataaaacgttgctcctctttgactgcctacattccacctcgaccctagtggctcatcagcttggacttttcttccacaccaaatcccaccacttcatgccacctctgccactgctacactatcccaccatctcccatctggagactttagtccctcctgcgcttccactcttgaccccctggtctattctcccctttaaaagggtcccattgaaaattttggcaaactatgcatctaacaaagatctaatatccagcatctataagaaacttaaacaaatttacaagaaaaaaacaaaaaattaaaaagtgagcaaacagacacttttcaaaagaagacatacatgcagccaacaagtatatgaaaaaaaagctcagcattactgatcattagagaaatgcaaatcaaaaccacaatgagataccatctcacaccagtcagaatgcctgtaattaaaaagtcaaaacataacagttgctggcaagatcgtggagaaaaaggaatgcttatacacagttggtgggagtgaaaattagcgcaaccattgtgaagacagtgtggctattcctcaaagacctaaaaacagaactaccattcgacccagcaatacattactgggtatatacccaaaggaatataaatcattctattataaagacacatgaatgcatatgctcattgcagcacgattcgcaataccaaagacatgaaatcaacctaaatccccatcagaggtagactggataaagaaaatgtggtacatacacaccatggaatattattcagccataaaaaagaacaagatcatgtcctttgcagaaacatggatggaggccattatccttagtgaactaacacaggaacagaaaaccaggtaccacatagtcttataagtgggagctaaatgatgagaacacatggacacatagagaaaaacaacacacactggggcctatcagaggatgggaggaggcaaaggatccggaaaaataactaatgggtactaggcttgatacctgggtgatgaaataatctgtacaacaaacccccattacacaagtttacctatataacaaacctgcatatgtaccctggacttaaaagttaaataaatatataacaaaagggtcccatcagaaggacatttctaaaacacagatctgatcacattactctctgatctgaagtccttccaaagacctttatgggatgggcctggacacctctccaaccttacctcctgccatcctcctcctgttattccactccagccatgctcgcctccttgcagcttctggaccacaccaggcactctctacctcaggaattttgtcctactgttgtctttatatcgatacctgcatggtgcaggcatctgctgaaatgcctactcagcagagatttttctgaccatcttatctgaaataatagcacgtcaccgccacaaccaccacccattgctctctatccctttgccttgattttgcttttttcagagcatttttcatgttatattattcacttgagtttttatttaatgactatcttgtcacattagaataccagctccatgaggtcaggggctttatcctggtattcactgctgtatcactgtcacctaaagtggtactaacacaaagccgggcacggtggctcatgcctgtaatcctaacactttgggaggctgaggcggtgaatcgcttgagttcaggaatttgagaccagcctggacaacatggtgaaaccctgtctctaccaaaaaaaacaaaaaacaaaaaacaaaaaaaaccacaaaaattagccaggcatggtgtcatgtgcctgtagtcccagctacttgtggggctgaggcaggaagattgcttgagcttgggaggcaaggttgcagtgagccaagcttgagccactacactgtagcctgggtgacagagtgagaccctgtttcaaaaaaataataataataaataaatataaaaaataataataataataaagtggcaccagcacagagcaggccctcaataaataccatgggatattaaaaaaatagcttcagatgtggaggaattataaccctggtgcattattagtgggaatatataaaagtgtaatcatttttccaatggttatgcatagaaccaccatttgacccaagaattccactactagatatatacccaaaggaatggaatccagggacttgaacagatatttgtacactaatattcatagcatcactgttcacaagagccaaaagatggaaaaacacaactttcaattaacagatgaagggataaacaaaatgcagtatatacctacaatggtacattattctatcacaaaaaggaaagcaattttgatatatggtgtaacatggttggacactgaaaatattatgcttagtgaaataagtcagatacaaaaagaaaacattatatgattccactaatatgagatacctagaaaaagcaagttcatagacagaggatgtagaatagaaattaccaggggctggaaataaggggaatggagggatattgctaatcaggtatggagattttgttggggataatcaaaaatttgggtatagatagtggtgatggttagactacattgtgaatacatataatgctactgaatcagaatactacgcagccataaaaaaggatgagtttatgtcctttgcagggacatagatgaaactggaaaccatcattctcagcaaagtaacacaagaagagaaaatcaaacaacgcatgttctcactcataagtgggagttgaacagtgagaacagatggacacagggaggggaacatcacacaccggggcctgtcggggaatgggggacggggggagggatagcattaggagaaatacctaatgtaaataacgagttgatgagtgcagcaaaccaacacagcacatgtatacctgtgtaacaaacctgcacattgtgcacatgtaccccagaacttaaagtataataaaaaagaaaaatctctagacaggcaggctagtgtgggaggaaaattttaaaaatgctactgaatctacacatacaaatgtttaaaatagtaaatattgtttcacgtatattttaccacagtaaaaatatgcatagccaagaccagaaaaaaagatagcttgaaagaataacatttcttcccaacttacactgacttttaggaaaacagcaacatgcgatgtctgtgatagttcaggtgcaccaattgcaagctaacaataggaagacgaaagggaaataaagcagagagacagagaatattgtagattgaaacagctttgcaaacatggtgcattggggacaatatctaggcaagtatgataccatacctttctctcctgcagtggaggtttaccagcccagacagctaaataatccttcaatccttgactttcagaggaaaccgcgggggtccatcctgattcgattattcatccaaaacagacttcagggctttgggacagctcagttccacagggtcatccagcagcctgggttccttctggttttttgttgttcttgttttgccttctgtggaaggttctccaaaccagaattgttgatgttgtctcaccagtaccacttctgcaggaaggggaaattgaagaaattaagaacaagcaatgtctttttaaggaggtgatacaggtgtttcacatatcacttttgatcacagttgagtttagtcacttaatcaggtttagatgcaaggaagactggaaaatcggactgtagctgggtggccatgtaatctgctaaaattctgggtcgggaaattattctacaaggggagaatggatactgggggacagtcagtagtctctactcaactgattagtcaggcactactggggcaacctactttcagacagtattcaaggccctatacggataccaagagaatatccaggtttgagtagttcccagtctttcatgtgtcataagacaagtacacactataacacaaggtagactataaaattcatagtaagacacaaagtgctaccaaaggagttcaaagtagagacactgaccatcagaaactgagctgtccaaatgctttccaaactgatggtcaatctctctattttgaagtcctttggtagcactgaggttgctttgaaaaacagggagtgaaaggagagcattttaggtggaacaaagggctagaggggggaatgtggagggcatgtctaaaaaaagcaaacctcatagtctggttcagttctagcacccactagggatcagggaattctcggaaaagagtctgaggacttttcatttctatttacctggcatgaaaactgacagagagttttcgaatagggcagtaatatggtcagagttgtctttataaagaccatcagtgaatatggaaggggtgggagtaggtcgagactgaatatggggagacaagatggaaggtcagagttagtgtctaaagagagttttctgataagacagttttataggaaacaaagaaataaaatacctttgccctggtcaaatattatgctgaattacatgttaataacacatatttattaagtgccaacaccatgcttaggctagcagctctcaaacctttctgaccatgtataggaagaaacaaatttcctcccccaatccattttcacaaatatatttggaaacaaaggtttttataaaacaatacttcagccaattcactctgctgtttgtctactctatttttttttcttaattttagaccagccactaaattatttatcacttgaaaaaacacttctttaggtaccacgagataggtaggaggaatacaatacagtagctatccaagtcttttaaaagattatatctgtcaagagaaggaaaaacaggcacaaacacaaatgactacaagacaaggtagggaaatcgtggagttttggatctggaagggacccaagaagacattttatcttaacatttcttgtaatcagtgggaaagcaaagctcagcaatattaactaattcaacagcacaaagcaagttagtgctgcagacccaagataagcagagcctcttggagaggtcctaggaccttcttatgttgctaatttttttaagcataattttttaaagtgtgttgtattttaattttatttcatttgcattgagtaaataatgctttaaatacacataccacaaatactactcagaagttctattcatttgataagcgtagcatttctttaaatattcatttatagtatattatcagtggtgtgaagtggcaatgggacacacatttaaagttatataagaaatggcttatttcagtccagtcagtggatctctgtgactgaattctctctcctttaaagatagtatcaaaggtatacatttgaggctgttaggtccttcagaaataagcactagtcaactggaccaacaaaatccttatccccaaatccccatctccatcatagtacccagcagggggctgggtactatggcacacccctgtagttccagctactcaggagggtgacgcaggaggattgcttgagcctaggagttcaaggccagccttggcaataaaccatctctaaaaaagaaaaaaaagaaaaagaaaaaagggcaaaggtatattgagtcccagttctactcaccagtctcagatatgatcagctcctcaaaatactgtgctctttggagtcacattgttgtttttgcatttttcattttgtcctttagtatatgaggttatggctttgatgtggctgccaaaaaaatactgaatcacatgtttcaggtaccacatcttgttggtcttttgcacaatttttcaccttggctatcttctacttagaaaaatattataaagtaaacttctaaaattttaccagttaataatgtcagaattttccattaaataacccatgttaatgtccttcatactaatctctctttgttttcaatttttttaagcattgctctattaaatcatgttaaattaaggtactctatccttttctggtagagtttagaaaaaattgattgtgatagtctacattcttatttgacaaatttagtaagaaagttgggtattttgaggtatagttgcaacagaaatattctaatgtttatctaatctattttatcttacaaagaatagttgtaaaactcgtgacagtcacattttgacattacaattttttgcaaattatcatatggtgttagcatttgcttaaaaattgtttaaaggacagttttatatatatgtacatatggtataagctattaaattgtttattgtaaagtaggtaatttattacatttctttttaggcacttttgccaacattttaattagaaatttatagatattttttgcaaaatataacaaaacaaagttgtttacagttgcttttgatatttgtggtttaaacatagttgtattgcatttttttaacaactaaatgacttccacatgaagaggtatgctcactctctctcctctccattgaaacccacagacgtcttgcgggaaacgctctgacatacattcccaagggagcattcactggcctttacagtcttaaagttctgtaagtaaactgagtgttgttggatatatttctgattttagtgtcaaatggctgctaattaacttgtaaaagctgagtgtctctaatacactatttaaatccatgggataattcatctaaattcaagtttacttcattggtaccatacagccatatcacacttggctaaatttgtatgtgaaaaaaaattcatctctccttttctaattttaatatctaaaatttttgcctttaaataactaccttatcaactcagacttttaaaagagtatttccctttccctttgtgttatgaaattggggtgcgtgtcttcaaaagcattttgatgacaggatgaataaatcactgtgatgctgacataatgagaccacagcttcaaaccggtttcaaaggggagtgaataagcatcagctaaaaaaaccaagtttgtgttccacctgtgaatagatagggtaaagcctagtgtatagcagatacactgaacagttgtttatttgttaattcattgaaaattgtaaatatgaggtttctcattatttaatgtccaatttctcaatttgtttatcagaaaaatcattattattgaatacttccttcttctggtacccattgtttaattttcttttagtttgttctgtgtagaaaaaagaggcacttacgtagataaaacagataatgcaaggaaaagtttatctcagaaaaaaaatcctgattttctttctttgacataaaagttattaactttgatatatttctgcttattgaaaattacatttcagtgacctaaaagacacataggttaaaaaaacagtttattcaatttaatattttgttaaaagtgaaattcaacagcagaaccgttatttgatcgccttaggagattgggtttggtttcccttcctctctttgaatttttttcttttctttctttttttttttgctactaagaagaaatgcttttaagttgtcatgttgccaaatcctaatagtaattccttatgtggtaaaattcagagttgtagcaccagctccgatgcatatagtttcacaaaccccccaaaaaaatttggaaccattcaaaatgtatcgtgagagtcaagtttagataagacaactaaagtgattttttttcccatgttgagctatgtaccactaagtatttgggatacttgtgaaataaattttactagaatcaagtattttaattcacttaacaaagtgtatattggatatataagccagtgtgtgtgtatctccagacatcaaattatactttaattataaatgagtaaaatgaatacatttaaattaatatggatatatatgaattatatataagctagttattataattacatataattataattttaaatccttgaattcttaaatatgaattatacaagtcttatactaatttttctatcatatttttatattttatattaatagttataccattatatatttctaattgtattcactagtgcattactagagaatgtttgtttcccacaatgcactaaagatctatgaaattagagatgtcatctgtcttggtcactggtatatccccagctcctagaacacttccttacttagagtagacattcaataaatatttgttgaattaatgattcaggctgatgatctagagagaataagggagttctagatttttcaactttttcttcatttttgtatgatattgacccaatgctgtatgtttattaatggaatatctattgtgtattaaacaaaaaagttgtgccttcatatctgatatgtacttttacctacaaagaggctttttacccagaatgctcctgcacacactttgctgcttcttaaggtgcattttacctgaagactccagagtggagtggattaatatgattcaaaaatgagaagcatagattatttctcatgctaactattaaaatgtaccctttccatcagaaaaaaaaaaatggtatttagaccctctcttttatccactcctactaaccaatgtttcctgtctcctgtacagtcaagggttcagcaaagcctagtgcgtgtgatactcaaattagcattaaacaaattattactagaaatataaagatcaataaatattgttcatgcccttgaagagtttataatctagtgacagactgtgggaccaagatagtgggacgaagacagaaaaacagagatcacttctgatttttgtggaaagtgtatctagatatctgtgcagggtactgtgaaactacagaggttggggagttgatgtcgtcccatctggtggctcagatttggcttcctaggagagaggctttcccagagatgacccaggagctgaatcttgaagcacaactaggaattagccacccaaataagatggccgactgaggggacaatacgtacagcaacacagagtcagaaaggacctgggatgaacaggtagctccaagcaggttagtacttgagcattcaggagaagctacagagcatttggagaagagcttgtaaagacagaaggagtcccagttgcagggatcccatatgttaagtcatatgggtggacattatgaggaggcatgatgaggagtcaaggaaaagatgtacataagtgagggaaggccatgttcagactttgcactatagctgggtccctgtcagtgtgaggagagttcaagaggaacaagatcctgccagaaattgtgttcactcttctttttactttgctgacctaaagactaatattcaatgaatggactcaaattgtcaaatatttttaaagtattttggtttttgtcttaggttgtttgtgctatgataacggaataccgcaaactgggtaatttataaagaagagaagtttatttctcacagttctggaggctgggaagtccaagatcaaggtgctgacatctggtgagggctgctttctgcttccaagatggcatcttgagagccaaatcctctggaggataggaatgctgtgtcttcctatggcagaaggtggaaaggcaaaaaaggaataaacttcttccaacaaggctttttatgatggaattaatctatttcatatgattgtactccaaacatttttaaggcgataatacaaaatatttataaagcaaacttttgaggaaattcattgagatcaccatttcttatttttctgctaatttaattaaaacatctcccaaaggctctacccaacacctcccaaaggtccccacctcccaacactattgcattggggattaagtttcaacatgaatttttggagaggacaaaaacattcaaaccataacagcattagaataatttttctcagcaatgttggttctgcctgttacagagtgttttggaaatttgtgggagcatctttggttgtccagatgattggcgtgtagcaagctgtcctgcaatgtgctgcacagcccagcataaagaattctcccttattctggcttcttactgtccctccataccaactataaatcagtactttaatgtgtaattgtattgaaacgttttataagatgttctgcatatgcttaataatttgcacaggaaaaattaaatggaataaacagtttctctcaagataattaaataagtaacttagtttatacatcctgtctattcctgatattttaagatttctagccacacatttagtttaaaatcgtgttcgtagctgggcacggtggctcatgcctgtataatcctagcactttgggaggcagaggtgactgaattacttgagctcaggagttcaagaccagcctgggcagcatggcaaaaccccatctctacaaaaaatacaaaaattagcctggcatggtggcgaacacctgtggtcccagctactcaggaggctgaggtgggagggaggatttcatgagcctaggaggttggggctacagtgagccaagattgcaccactatactgtagcctgggcaacagagcaagacctgtctcaaaaaatatataaataaaataaaatagtgttagtgcagtagaagaattacctcaaaagccacaaaccaaattaaaaatatatagccatggaaatgtgcaacctttttaaaataactatcattaaattaccagagtaacaagaaacacaggatctcattgaatttcatcaacaaagtttgctttataaatattttgtattattgccttttaaagtttttagagcacaatcatatgaaatttatgttgtgataattatataatgatttatttatctgagggtggccagcttgttgcttttttaatcttactgttttactgcctagcaaagtctaccacccaacttctgagaaggcagttttgtgactatttctttgtccaattcagcctcaattctctgttgcctatggagggatctccagggccttttaaagtactggggaattaatgcttgcttcagaatgttatggaattttgagacaggataaatattctctgtgatatttccacactatcttaccctaacacatagagaattattttgacactattcatctgtaaggaacactcacttgggagaatattcatgctcaattgtgagtgtcacacttcctgattttctccactatgacgtttgtaatttgattggcatgttatatttattttaataaaggttatttccttctttcccttataatatataacaagtatgatctgttattacatatcgtattagtccattttcacactgctgtaaagaactacctgagactgggtaatttataaagaaaagagctttaattggctcacagttctgcatggctggggaggcctcgggaaacttacaatcatggcagaagcagcaaggtatgtcctacatggcatcaggagagagagagcgaggggggatctgccacacactcttaaaccatcagatctcgtgagaactcactcactatcatgagaacagcatggcagaaagcgcccccatgattcaatcacctcccaccaggtccctcccccgacctgtgaggattacaatttgacatgaaatttgggtggggacacaaagccaaaccatatcagtgtctcaactagtttttattctagtatccatctagatctctactctcatgttcccattctcatacagaatggcttttgatcacgttatttttctcacacccaaccttattctttaaaagtagaggcaaatggctgggtgtggtggctcacacctctaatcccagcactttggaaggctgagacagacagatcacctgaggtcaggagtttaagaccaacctggccaacatgctgaaacctcatctctactaaaaatacaaaaattagctaggtgtcatggtgcacccctgtaatcccagctacttgggaggctgaggcacaagaatctcttgaacctgggaggcagaggctgcagtgagccaaggtagtgctactgcactccagcctgtgcaatagagtgagattctgtctccaaaaaaaaaaaaaaaaagtagaagcaaacatctgattcattcataaaaatgtttcctgaggtagttgcatatgagcatcatgtatataatgacacttacatcatcttactataaattacttttcttatatttcttctttataatacatttagggcacaacaataaagtatattgattttttctttgaaataatgtgtgtaaataggctataattctatgaattttacttaagtataatagaagtggcattacaaaatatttgttattaaagggaacgttgaatccaatatagttgagaaccacagtgctagaggtaaaatgctgaacaagatagtcctgtcccctactctcatgaaaactctcttaactgttttataaagtccaaaagtggttggagaaaagaaataactaatggtattgtgatatggtgagaaagataatgtgagagtaatatttgtctggggccctgacctgagtaaggatggtaaagagggcatatggacaaagaagagaaaaataatcttgatccagtctattaagatggagaatgaagacagcagcagccatccttggctaggtctgttttacatttactgtgaatgctaaaacatcactaatatttaaagttatttttcctgtaaatattggccctaataaaaaaaataagtaattggttctgtatggcaaaatacccagtccgtggaattctgaaccaggctgtcctcaacaaaggttcattttctagtgtaagccattccatcaaagaatggctcatccttctgccactcaacaccaaaaccaaagccacatggaggtgatgggtaaaactaaccatagaaaagtcacaattaggcagaattcccctgttctcatgtagacccagaatagagccttgatggttacttgatatctacacagaggacaaataggccaagggaatacctaagaattgagccatcagttgtaaccaagttcccactcagcaggttatttaatctccctctccttcactgtacctgttcttacttagtcctgttgggaaaaaaaaaaaaaaaaaaagtgggggagggaccaaaaaattgtgtagagtagcatggggatgctgtatgaaatagtgattattttaaagctcctggggcaaagaaattaagaaaatatagaagtcatcttttgtctctagagaaagtattccatttgcttttcctaatcatatgtgaatgataaaaatgaagttttaagtgcctacacctatattcagtatctttatattgcatgtactcagtaaggagtattttcaaaagaaatcagcagccatgtgtaaatgttttgtttcaattgcaccccctagcactataaaccttgtaattgttttccctcccattggaatatcttaaacaaaaacagaatgttctaattaacccactggagacttataatgatataataaagataacttgctcttgttttgtcatttgaaagtaattaaacaaaagttccttatttagggagtgatcagggcttaaattgtttttttgttttttaagttatattcttggtgttttactggtagacgtagttgaaaatttaaatcattaggaggtaacgtgggggtagctttaaaagttatcattggtcaggtgcggtggctcatgcctgtaatcccagcactttggaaggccaaggtgggtagatcatttgaggtcaggagttcaagacaagcctggccaacatggtgaaaccccgttgctgctaaaaatataaaaattagccggcggtagtggcgcacgcctctaatcccagctactcaggagactgaggcaggagaatcgcttgaacccgggaggcggaggttgcagtgagccgagatcgcaccactgcactcccgtgtgggcgacagagtgagaccctgtcccccctccaaaaaaaagttatcatcactaaagttcatttaagttccattatctgaagaaagatatataaagcagcagagaaagttcgcaactattcaatgacaaaaagctatctgaaactctcatcttccacctcaatttttcagatattttagggaaatcatattttaagagttccactgtttggttagtaaggcaaaggacaatgcaatacataccttgtaccagtaatatattatttattaataaaaagtttagacatcaattaattctattatctttatcttatttaaatgtaacacaaaagtaaagaaatacttagaaaacatttttgtgaacttaaaattggatgatggattgaaactgcttgggaaaatgtaaaataacaaaaatgtaaaataacaataaaataacacagaaatccaaacttttaatattcagataaattatgcaaaacatagaattcaagtttcaattctcctaattccctaactggtaagtgaagtgtggggatcttcctaaaactcacctttattcctaaggaaccaatacatttgagactcttgatttatgaaattttaattgaatctaaatttaacataatgaaattagttgagtagaactattgtaatacaaacgtaattacgttccttagaaaaaactctcaggcatggtgttaaaggcataatttttatgatctccaaatatttttcaagtcttgtttgtatatgagcacgtatttatatacataaaagtactataaatactttcatattttaatcctccaacaccttttcaaccagatgatattattcccattatacagataaaagaccaagggtcaggaggttaaatgagtttcctctccaagactaaaagcttaggtcttgtctccaaacccagtgcagctcttcctcaagttcaaatgaagattttttttttttttgagacagggtctcattttgtccagagtaggtaggactataagtacatgcaaccactctcacttccccaagtgaaaatatcctattagaaatgtttagatagctaggtgtagtaactcacacctgtagaccaggctactctaaaggctgaggcgggaggatcccttgagctcaggagttcgagtccagtcctgggcaacaaagcaagattctcctacccttcgtttctaaataaataaatacataggctgggcgtggcggctcacacctgggattacagaatcccagaactttgggaggttgaggtgggaggatcacttgaggtcaggagtttgagaccagcctggccaacatggtgaaaccccatctctactaaaaatacaaaaattagccgggcacggtgatgcatgcctgtagtcccagctactcgggaggctgaggcaaaagaattgcttgaacccaggaggcagaggttgcagtgggccgagattgcgccactgcactccagcctggtgacagagtgagactccgtctcaaaataaataaataaataattaaataactaaatacataaatatttagcacagcatggggtagttctcagtgtgtggtgccctgctcagcagtattggcgtcacctgagagcttgttacaagtgtgaatttcctggcccttcctcagacctactaaaccagaaactttgggatggggcccagcattctgttttaacaaaccttccaatggcttctgatgaaccctaaagtttgacaaccaatggcatagagttttctttttctctggctcattaaattgtcaaacccagtacaaaaattattagtttcgagaaagggcctattaatgtacattaaaagggccaatttttactgaatgcttatcatgtagcaagcattgttctatgaaccttcactcattgaatcatcacaatgagccctgcaaggtaggtgttattactgatcgctgaggcatagagagatttggtgattttccaatctctagtggcagagaagaggtggtcagatttgagaatccatattcttaaccataccgttcacatgcaatctgagaatttacacagtcagcacatatgcctcaagagaatgctgcctggtgcactggaaaacacaccaagctttggagttagacacacctgggtggaattccagctagtcaagtagtgaacagaaagaaacttcctttgcagagatgaaagaaccaggcagattgtttctgaaacacaaatacaagtttgcaacttaataagtagaaatatttctttaaaacttctgctttcctaaaatagtcttctgcctcaggcttacatggactacaaaatactgggagaaaaaaaaatgtgctgcagaattcttgtgttataaacatttatgaataaggtagcaaaatataaggaatctcatgggaatttgtttccatgctatttcctcattagcaatgatatatttttatttcatagcttccaggcgtttccattctgtagtccccatattatgaaaaactgttcaagattttcaagtgcaagtgcaaaaacacaaatacttcacaaaaagaatttagcttatatcaaaataaagccatgcagagaagggagacaattttagcctcctaccattatccttatttccatttggtgtaacttatacaagtagcagatcctttaaaaaacatatataagagcatgtcattttcctacatatgcccttcaacagtggtttctcatcacacataaaataaagccttatggtggctggcaaagccctccatgagatggtctcaggctctctctcccaacctcgagtcctcactcattcctcagaaacagttggtcctttgctgctcctttaacaagtcaagcaagctccctccagcctccagcccttgtacttactcttctcttttccttggtaacttttcccaaatattcacaaggattttctccctgtattccttctggtctccagttaaatatcacctttcagagagaccttccctgaccacctttaaaataaaaatctcaccccctgataccatctatcccaaattcatagttttgttttttattcatagtacttatcacttgtctcatgttaatatattcatttgttcatctttaattatcttcactcttcacaggaatttcagctccccaaaagacaagactttgtctgatgctctgttgtttttctgacacctggaacagtgcctggccttgtttaggcctgttattgttcattttttttaacatttttctttatttcttttaacatacagtatgctgcagaataatcagctaagacacgtacccacagaagctctgcagaatttgcgaagccttcaatccctgtaagtatagtagacattgcaaaatatatttaagatcaatttgggaagaagcattgaaatgttcagttgaccattttagtatgttccttggttgggagtcatacctaaatgtattgtgaatgagagcccattagagtaacaactcttcatagcctcattgagcaatatgtatgggaggaaccagtgttggagtttggggttttagggtggacatttaattgcaacatctccagtccaaagcactacttccaagatcctgtcctacattcccttgtaatattcttgcttctgaattcgaataagaaatagtgctttccttttacctaaaaaaaaaaaatagatgctgtaatctagacattttgacatctttgatttattctgttttaggattatttgagttgccttgtaatcaagttttttcgagtcaaataaaggcttactattttagtactgcctatataatacattagggatcctcaagtcaggagcctaagatctactggtatatcctgaagcttccccatcacagaacacagatgtgcagacatggccataaacaatcccacagatacaaacataccttagattcacacaccacacacagacacatggactcacagaggtgttggtgttccctactctgaatccacaacttttccatcaggagtttcctacccccctacacacactgatttaaaacttctgaataaataaaattactcacaaaagaacattctcccagctaaatgttttggaacttgtattgtaagcagttgattgtagtgattacttggcaagtctataccactactatttagtcagtaaatcttcctcccattagaatgtataagtgtttacaatatattgcatgatgtccaatatatcacacgtgtgatatatgctgtaattttacttacaatggagatgcacatctgccaaacaaaatactgggttgtagttcgtgatgaggaagataaatgcattaaaagggcaaataaatattgataaatattgtggactccagctgaaaattgttgtaaagaatccttcggttaataattacatatagtttgcttaatgcgttttaccgaggtaacatagaaggaggactgtgagatttgaagatgatactttcgtcctttgatctttttttctttttaatgaaagaaaatctgtgcttgagatcatttcaagccttttactccagtcaaacaaagtgacttcctaggttttcaccagcctatagataaacaagcccacaagggcccctttgtggtatgagataggtctgttgtattttctggagctccttaatgtcatgacagtatcacttctcctttgttgcacaagcctttacctgaaggaaagaagaaacagctggagaagcaaaacagcctcaagttggggtatctgtgtggcaaaattgaaatggtgataatggcggtagccagtaggaactttaaacagctgcaaggcaggcagtagatagaaggataagagtttgtaaccaaaagccactatcagctgaaagaagatcacaaacagaacacaaacagaagtgaactctttgagaaaaagaaaaccatgaatcttttgttcactggaactggtggtgcctgcctgataaaggtgttcagatttagtttcttacagtctagatattcactgttcaccaggtgtctctacatttggtttctggttttgcaaaaagaataacattttgaaactttataactatgtgttccctgtgaaaaggtcaagggttaactttctggtttgacactgaccacatccaaactaaaggatctagatagatactcggcccccagttcacactggattgtatcagctgggttatgcaatgtttgtcaggggcccctttgtccagagcacagacagaccagtgtgagtgttgaatgttgacaatgtgtgccagtgtcccactttttctcactgatattttttgtgcagctttgatgcaagacttaagagttgtcaaaaaaaaaaaaaaaagcatgatatgttgggaggttaaagtgggaggatcacttggaggccaggagtttgagatcagcttgggcaacatagtgagacacccccactgccatctctacaaaataaaaattaaaaaacttagctaggtgtggtgacatgtgcccgcagtcccagctagtcgggaggctgaagcaggaggatcacttgggcccaggagtttgaggttacaggttacagtgagctatatcatgccactgcactccagcctgagctacagagcaccactccagagtaagaaaagaaaagaaaagaaaaaagaaaagagcatgataaacataggctgaaccaccaaccctgcagataccatattgtaccaacaaaaggagtgccctacccatacatacacaaggccagtttggaggtttagggtatattgtgcccctttaaagttctattgtcctggttttaaagtatttaattgtacttctccttcttcctttaagcacgtctaaaaataaaaacattagtttgaatttactgatcattacaaacatgcattccttatccattctccattcattttccaggccatacgttagcctctgtgcttccgtatcaataaagtaatgatgagagtaggactctgcctcatccacactgccaatgcctagaaagtctccactccattgccatctcttcttggactggagtcaacccttagatcttcacttagcctttttttctacatggtttccctttttttttcttttcactctcttgaattcactttatttttctccacgttattatttttcttggattatacattcactctttaagaagcactctacccttgataggggctgtgagctcattgtctttatacatgcctggccttgtataaagagtaatggcaaaaaccacatttacttttgtaccaactgaataacttctacagcaggccttctcaacactggctacaaataagattcttctggaaagacccaaagcctagactgcagcctagaacaattaaaatcagaatctctggccaggtatggtggctcatgcctgtaatctcagcgttttgggaggctgaagtgggaggatcacttgaacccaggagtttgagaccagcttggacaacatagtgagacccctgtctctctataaaaaattaaaaagttagctgggcatggtggcctgcgcctataatcccagctacacatgaggctgaggtgggaggatcacttgaactcaagaagaattcgagggtacagtgagccctgatcatgccactgcactctctgaggataggactcatgcatgcactagtgttttctaactggcttaattgcacagttaagtatttcctaagtgaaaattaggaaaactattgacctgacctggagcattccctcagatgatctgcaaagtattctccagaactcttttcaaacctgaaattacaagcttgagtaatgcagtgagatgctgtctctaaaaataattaagtaaataaataaaattggctgggcgtcatgtgcatgactgtagtcccacctatgctggaggctgaggtgggaggatcatttgagcccaggagtttgaggctgcagtgagctatgatcctgccactgcactccagcccgggcaatagagcaagaccgtgtctctgaaaaaaaggaaaagaaatacctgaaataataacaaaatccatactttgcactcttctatgagctaataatatacttaaaatataaaagtcaggcattgtcttatttgtgtttaattgaaaacagcttgcatgcctatgcattccactgataacccagggagataaagttaagaggccacatgctctatcaccctgctattcagatttgttctgtgggccagcagcatcagcactgcctaagaaatgcagaacacttggtctcagctctgtcttacttaaaaaaatcttcattttaacaaaatcctaggtgattcgtaggcaaaatgcatttgagaaattaaaattgttagtgttctataacactaacaaagtggtctacaaatcaaaaatggttgaaaacgactgacgtagatcatttgcattctttgctccacccatatacacttggcttccttgaataaagtttaggaaatttgatacactgaaattggtaacattgctgtcaggaagaaacaaattgtgctcatgtttcaaggaatgttaattttccacttattccacatatacaaaagatgttttgttcataatggaaacacataggtacacttgtggtttttttgttttgttttgttttttgagttggagtctcactctgttgcccaggctggagtacagtggtgcgatctcagctcgctgcaacctccacctcccaggttcaagcgatttttctgcctcagcctcctaagtagctggaattacaggcacctgccaccacggctggctaattttttgtatttttgtagagacagggtttcactatgttggtcaggctggtctcgaatgcctgagctcaagtaatctgcctgccttggcctcccaaagtgccgggattacaggagtgagccacagtacccaggccacttgtgttcttttaactcttctgatgctaacaaattgctgggctaaggaataagagtgcaggcccacaagccagagcccagaagcccagagcctgcccctgtacagtatgtacatttggcttctgacatggcaatgacttcccagacaccaattagattttttgtaatgtaatcaaatataacctaatttcctttctgttttttggaagggaataggaaatgtaatcagaattcacagtaagctgtattttaccaaaaaacttttgggagtatagacatttgaggactagaatcagattacagtgatttgatggaaactcaaaacttaaccctcccataccctcacacttttatattaatagttaagaaatcaatctatttaaaaaattgcttcatttgtgattgtcattaatgaattttaagcaactcactgtcactagtgaagttcaagatgaccaaagagagttgcatattcatgtttgtccagataaccagagtactatttaatgcctgttggtttttattccaagtgtgcacaagtgaagctaactgtggaatttgcataatcgcaaaggtaataggttggcaaatagaaaatgaaagaagaattaaacatatctttattattgtctctattctccaattaactaatattcatcttcagaatatgactatattttaaaactcaagaataatgtataattcctgcctggcacaccagctgcccatacatcttattatgatatcatcttcagggctatagaacccacccctggactctataaaatgtcaataacttcatcggattctgcatggtaatcttttccttacagtagtcaaaaaagagagagaaaataagtgagaggaatgggtgaggaggaagacatggggctcactgtgctgagcaggaggtaagacaagcctagaaccaggagcagttttctcccattaatatccaggaggctattgggcttcagacatgggatatagaatgggaaggaagtaacagaagacaaggaagtgtaagcagaccaaaagaaagaagatgaggtagccaaaagaataagattaaaggatcaaaggggttaaaaaaacagtggttttagtattggtgatattccttccactaaaatagtctccagaaacagaaatcacaagcctatacaataaaaatgaaccgtgactttagtttgttttgctttcttcacaaaagtgccagggtattaggtacgtattgggatggaggtgaacttagaagttctagaggccaaagcatttgtctattgcacagtgaagcgttcacttcacggaaccatatgcagatcagcacccagtgaattcttatgaggaggaaaagttttgcccggactcttctccaatttaaacattggggagaattattttaacaggaaaagctccttctacataatgtttacaagaagagagagctaaaattggagcattgtccacagaatcatataaggagggaaaagtgaatactttatgcaatagccatgcatgaaagattcttatatcaggttacctgccagtcctgtgataaattgcatgcatggcagtcatatcagagaaataaagagaatatgggtattatggaatgagaagtaaaataaatttttttaaagcttgtggtgtaaaatgaaggttaactttggaaagtagattgaactcttggttacagagatgactaccatataagtgaggcacagtctttctgccttttcaggataaacacggtctgtgatcagttgtgaaaagacacataaggaaagcagcagagaatgtgaatattgcaaagacaaaatcagaatgtggaattgaatgcacttccatggttatcaaagcagcagcctcccatatttactaaacagttttacttccatcatcatgctttatcctcacagaaacctcatgaagtaggtgctgagattattccctccttagtactgaggaagcaaagagtgcagagaggtcagctgatcttcccaaggtcacatgatttgtaacggagtcaggctagaggtgagtctgggataagaaccctagtttgccaccagattccagaatctgaccatttcaccaccacattatcttacctccctcagagaatcctctgcagaaaatgggcactgatgaaaagaaggaaaggcttaacagaaacacatattatacctgtagacatataattgtgaatgtttataaaaagaaagggaagttggaatgctggaaaacagaaagaaataaatgaaagaagggaaggcaacaatatcaaagcgtgagccagtcagccttttcaagtgtttctctgtgcatttagttgtctggtccctcactacctatgaggtagaaactgtctccacttttctgatgaggaaaccgtaggtgagaaagtgaaaggcatcctactgctaatgcaaaagtaaggattgattagacaaagacaagaaagaagaacattccagacagagggaactatgtgtgcaactccttatattggtgggggaagcctggtatatcaagaaacagaaggtcagtgcagctgaagcagaagtgaggtggagagacgtgcaagaagagcacatctagtgaggcaggtggaggccagaccccttgaaagatatttgggacatgtcaaggatttcagtctttactgtaaaagcaatgggaatctgttggagggttttaaggctggcaggtgggggtactcagatctgtgtcattgcaatagtctaggagagaaaggagaacttcatcaggttagggacggtggagatgaagaaagggagatggattcgagaaatatctaggagatgaaattaccagtgtttggtaatgaattggctatgaagaatgaagcagaaagaagtgtggagaataatttctaagtttctgatttatacagccatgtgcttactgaagccagtcactgggcaagacacactgggagacggctatacatatttggggagtgtgtggttccaggataatgagtttggtcttgagcacttgtgtttgaggaggaacaactaagtagagatgtcacatagtttgaaatccagatctggatggaaagaaaaaaaaaaagtaaaatctagtttaggttccccaaccatgcattcctcttcacctaacacttcattataatgattgatttgtctgactaccctttagaaaacatgctccataatggctgggaccatgcctccctggtttactgctaaatcttcagcaccaggtagagtagctaggacaaagaaagcactaggacatacgtatcagactgaactgaaacctcaaactcttaagtgttgatctagacagctgctcagacaagatcgggcacattcaaggtgatagggccataggctagacagccactcaagatcagttcatctcccctagtttaactgtaacctgcattcattcatctccctggctccaaactcttacctctgtaccctggctttcccacatgcctttcctgggctgggagttggacccagtggttcctgcagagattttagagttgatctatctgccagaattagttttcccattgtctcaactgaggactccccattccaagagtaagacacaggaaagaaccatgatattaagtcttggaaggttaatgagattcagataggcagtgggtaggggatgctcatgaacaaaaggcccagaagtactgtgggaaagagccagaaaagagacttgactgggacagagaaatgaggtaaaagtttggccagataaggtaagtagagagctttgaatatcagaatggaaagttagggtttaaaaggaatgataatgtggaagaactgtagatttctaacagggaaattatttaaggtgtaacttcagggagattaatctggcagcagcctacaggattaattgaagagataagagatcaaaggcaaaaggaccagctcagaggctgttgcagtaatgcaggtgtgaagagataagagaattaactagacagtggaaatggaaagtctcggagatgaagataaatggaaagaacttagtgaatgattggctggaaggcaatggaagattcaaaaatgacccctagattttaaaccctggtgatacctggaagactaatagtgcccctgatagaaaaagggtcttcgttttctatgaagaaaaataaaactgaagaagttattgctcacattacattggctgtagatcatctccttgctacagtattcacagcagtggtgatctctgagctcaccaagcaacttttaatgtgatttgactttaaaatatattccttattggagtcttgcactcctcaaagacgccagagagacagaggtttggttcctttagacatttcatctggctgctagtcaagacagctgattagtctctaaattactgcacttcaatgaacctgtagactttatctctccccaacctggagagggagaaaggggaaattcttttttttttttctttgtcttttttttttcttcgtctttttttttttcttcttctttttttttttttttgttaaccatttcagaggtaagtctaaagcaataatttttcttcctactggcctcattaagtttaccagtaaataagatggtgattagaaagacaaaagcacaaatttcccatataagcaatcatgttatttaatatcttcctagataggcttaatatctccctggatattaatttggaatcacacattatggtctccataaatattaaaaaaaaaaaaaccaccaccacaacaaaagtgaccctggtgttattgcaaagaattaatataaatcaatatggattcaagctgtaagagtacatatagattaaataataggccgatagtattataatagttctgtgacaaatttagctccaatgatccactgattccagggcaataaaatttcaatgcagtaaaattttatcacaacaaaaaatgtatgtactttgttaaactgtaatatatgcagatacagaaccacacgattttcactttattgaaaaagtaaaataataatcaagaatgcttttatttcttaaaatttataaatgaactatattgctgtggttttttggctttcctgacttgttcaaagtggtctcacaaaatgtacaatgtactgtttaagagggttggtcacctctttaaaacttatttttttaaaatgctcatccaggccaggagccgtggctcacacctgtaaacccagcactttgggaagccgaggcaggaggattgcttgagcccaggagttcaagaccagcctaggcaacatggcaagaccccatctctacaaaagtaacaaaataaaaataaaaataaatctttttataatgctcatccagccgggcacagtggctcacccctgtagtcctaacactttcggaggccaaggcgggaggatcacttgagatcaggagtttgagaccaacctggccaacatggtgaaaccctgtctctaccaaaaaatacaaaaaattagctgggcatggtggtgtacacctgtggtcccagctgctctgctggggaggctgaggtggaagaatcacttgaacccaagagcagaggttgcagtgagctgagatcctgccactgcactccagcgtgagtgacagagtgagaccctgtctcaaaaaaataaataaataaaatgctcatccaaatataaaatagcagtatcagtcataaaaatgcattgcttcataactctgtttattacaagaatccctataaaccgtattatgcagctgcaagattcttcacacttttggcttttttttttctccaagtcatccatgttaataattgacattattacagtcatctcagatatggaattaaccaagatcaatggcttatcttttgactaacactttacttcttatagttaatggctcatcaaagacattcttaaacaaagatacagatttgtgtgatacattgacaaggtgtcatatacgagatatgtataaagggccattttctggaacaacaatagcaataatgatctgatacattctctaatctttacaataacaccatttataagtggaaagttttttcagggagtatggagcagattggcaaaatgtttcttgtaaaagagaaaatttgcattattaaccttttcacatagaaatattaggaagaaaactttaaacacaaagaaaacgagcttattttatttggtggcaggggcaggtggggttgcctgaacataaaagattaattgtttgaggcctagcactttgggaggccaaggcaggcagatcacctgaggtcaggagttcaagaccagcctggcaaacatggggaaaccctgtctctactaaaaatacaaaaaaattagctgggtgtggtggcatgcacctataataccagctactcaggaggctgaggcaggagaattgcttgaacccaggaggtggaggttgcagtgagccaagattggaccactgcactccagcctgggagacagagtgagactcagtctcaaaatatatatatatatatatattaactgtttgcctgttaccttctagctctttgccacatagaacacattgatatgacagaaccgcattcacagtgaacatggagttatgttttatttttattttacctaatactgggtgacattcatctctgttctcgcatccatccagttgcccaggccagaatgctgaatcaccatagcttcctcaccttcctctctggccacatctggggagtcaccaagttctgccaggcccacatacttaacatctctcatagtaggcccttcctcaccattttcacacttccttcaggcactgatctttctcaccctgatgactgcaactgccttggtaatgtactttcccactaggccctcctacacactgctattagagtgacctttctacagcacatgtattatgagggcctccagtcagaaagcctacaacacccccatttcagagaaacactttcatgcaaaccttgaagactgctgggagaggataagtcatttcttgtaggcaggtagcccagaaacctgggagtgatgtcatccagactccacttactttggatactcaaagttattgaggcccctcagggtgaacttgatggttttgaccaggtccagtggtgggagaggcaaccactgggaccgtaagagacagtccccttggccaagcagcttgagcagcagcgcctcttcagtaattgcggagtcttcaacctcaagccctccctccagagaaggagtgatttcaacacacacccgaaagtcataccatgacccttcctcatcagttgtagccctctaagtaacattgcaaagactcatacttaataaaaactccgttcttgcaccaggtgttataatatttttcctcagccattttagccttttggacaccaactattctattgctggcctaacacagaagatgtgcatcctcttttctctgtgatggaaaccttgctataatactaattaaaacatgcagtgtagctgctgaacatagattaaagaatgtatggtaaatagagaaacaccagcccatatggcaagaaaatggcaatctcccatagacagatgtgaaatgacaaagggttaagaaacttcaggaagaataaaataaatttttaaagggaaaaatatgataccacttcctaaatttgaaggttttcctcaaataataaagtctgtcattaaacagtagaatgcttactgtttacaaaacacattcgtattttctcacttaattcccaaagcaattctgtgacatgtgattctgccttatacatgtgaacattgacccacaaagagagatatcaatatgccctcaaatcttggaattaaatgacagtatcttgacttaaatctgtgtctcaagtctcctgattcagtgcactttccagtttaccacatggtaataggtgcatgccaccacacccagctaatttttttgtatttttagtagagacagggtttccccatgtttgccaggctggtcttgaactcctgacctcaggtgatctgcctgccttggcctcccaaagtgctaggcctcaattatgtaggtggctgtagatggcataagatgtagggaaaatttttgttttacctataaattatatatactatatactataaactatatgtaacagaccccccccaaaaggaccataaagtgggtgctatttccgatatagtgatcacttttcagatggcatttcaagatcacaattaagagcttttatctgaatgaaggcaaggccactcattattgaaagtgttttactttgctgcacataactgcagacaggtttggggctgcctctgtcacaatttcaatggatgcgtaaatggccaagatgccaagatcattgctagaaactttctctgaaaatgccatcacttctttgaccttcaaaatgcagatattataatcagtggtgtatcaggaacaaaactatttgccttgttgcactgtgtgtgtgtgtgtgtgtgtgtgtgtgtgtgtatgtgcgtagatacatatacacatgcatagcaataatagtaaaggctgaaaaaataagggtgacttctataagtctaattgcaggcacctctaagttatttctattatgagggttgaaagaaatagcctgcatttctcagaactgaaattcactgacaatccagcactcattttggccacttttgcttaagcaaaatttgaatttacctttatttttctgaatggtttcaatggtcaaaagacaaaaatacaaagtgttaaccagcttcacataataatatttaaaatcattaaggtactttagatttacaaagtcctgttgtgttatttccttaatcagaaagcaaccctataagatgggagttatccctgttttacagatgtgaaagctgaggtctgttgatttggccaaggtcatacagcttctagaattggctggaacctggtacttcccattccaaatctctgcactaatttatggattctaaggtgcctacacacacacacacacacacacacacaccctctgtgacttgcacaaaatggaaataacaaagacatacttaaaagcagaactatatagtgtagttatttttgttgctactgataataagtctattatggaaccatattttatatgtgtatgtcttcttgtaccagatagtgatgtttatcttatacccgactgttaaaatattgcatttttcaagcatatgaatagagaatgttcagctgcctgaaaagaccagattgacgtaatatgaactctttgtttacttgctgaatggacacagcttctgccctgtcagctgctttgtccacagtcttaaccttgttgtggaagaaccacctgtgtgagtgactggatagttaattctatactcctgtttacccttggggtcttctgttaagagtaaatcacatatagaagcagagtgtagaatagtggtcgccaggggctgggagtgggagtggttgagtggggagatgttggagaaggggtacaaagcttcagttagacaggatgaataacttctgaagagccattgtatggcatggtgactacagttaataataatatattgtatacttgaaaattgctaatagattagatcttaaatgttgtcaccacaaaaaaatgttaagtatgtgaggtgatggatatgttaattagcttgatttaatcattttacaatgtatacatatatcaaaacatcacattgtacaccataaatatatgcaatttttatttgtcaattattccttaacaaagctggaggaggaaattaaatcagataatgcctttgagtgtgaacaatatacctgaattaggtttagaccactgaggccaggtggatatgaactctaaaacactgcatttagaaggagtatcatttattgagagcttcttatatgaagaaactgtttagtagagagatgtgttaatgcttcactcaggacatctgaaggtctatgctgttgagcattaaatctgggaatattagtatttagagtgttcgatctctgaagaattctcctgtcttactcatttcatttcagatagcaaattggtataagataatagtgtggaggccagattatatccttttttctggggggaaaagaaacgtgattcataaaagatatttgtccagagaaatggctatattaacgttgggaactgatacctgggtcacttcaagatacagcagaaactttggtaggaacataaaataccaaagaagacaatcctatgacttcatgctgaaagagccttttccataaatgcatcccagtgtttgcaatgaacttttttgtcattttcaagacttttatttttttattttttttttattttctgttggccaggctggaatacagtggcaagatctcggctcactgcaacctccacctcctgggttcaagcaattctcgtgcctcagcctcccaagtagctgggattacaggcatgcaccaccacacccacctaatttttgtatttttggtagagatggggtttcaccgtgttggctgggctggtcttgatctcctgacctctgtctccctaagttctgggattacaggcatgaaccactgcgcgcagcccaagacttttagaaaccactcatactttcttttttttttttttttaagacagagtctcactctgttggccaggctggagtgcagtggcatgatctcggctcactgcagcgtctgcctcctgggttcaagcgattctcctgcctcagcctcccaagtagctgggactacagatgtgcatcaccacacccagctaattttttttgtattttttatagaaatggggtttctccatgttggccaggctggtctggaactcctgacctcaggtgatctgcccccctcagcttttcaaagtgctgggattacaggtgtgagccaacgggcccagccaccactcatactttcaatgcataaacgactggcaatgatcagtcaacatatcaacaaaaacatagaagctcatattattaagtctctatcctttaatcagtgcaatagttaaggagagtttacatgtgtgctttacttctagtcaaacaaaagcaatcacctctttatctcctgatgaaattataccttatttgagcataagccaggcacattgttgctagagaaaggaaagagagatggtgttgaattttctaaacatttgtggctccatttgttgacaaaaccttaagatgtttgaaagctgtgtttctgttgctgacaatgatagttgttctattggaaatttaatcgtaaatggggtatgacacccaactcttaaaatttgctccaagtgacgttatctcagctattatcaaaatgtggcccaaggagggcctttgaggcatcgcttgttccttcccattcagtctgtagaagcaggaatcagaagatgattgaagtggcatagtggccaaaagtgaggaagctgctttctatagaaatgagcttcctcccaacaaagaatttcatttctaaattgtttaattttggtttgcaggagattattttgtgatcctggtgtgcttcctgcatctgtttagtcttaaatgcttccaaaaacatttttcaaaatccacttctgattttctactccttcctaatacgtggaccactaaaatacaactcttcttttttttaatcctacctttgaaaatgcaaatgtgtgcgtcttaaaagcagattgggaaaaaaaacaagtgagagctgttggaagcatagtttgagtgatgttggttctagtattcatgcatcttacagaacattgcaaacgatgtgagttttgtcacttccatacgaaaagttaggacctttaaattatagccactgtttatgttggactggggcaaaataaatgtattgcactccctctgctggcttttaggtggcaacagctcattaaccagacttatttttagatgtatttccccattttaaaacagataaaaatggagtgtgggaaaaggaagcaaaagctggaaagttgttaattttattattcatttaaaatgtcagaaaaacaaacatctgcttcatacaaatggttaggataagcaagaaagccagcagttttcaggcctttcagtgttgtcctaagaaaaaggatagggccccttctctgttttccctgaggcatgtctctaacagtctttaaaaatgtactcagttccagtgagaacacgtggacacagagaggggaacatcatacatgggggcctgtcggcaggtggggggcaaggggagggagagcattaggacaaatacctaatgcatgtggggcttaaaacctagatgatgtgttgataggtgcaacaaaccaccatggcacatgtatacctatgtaacaaacctgcatgttctgcacgtgtatcccagaacttaaagtaaaataaaaaaattaaaaattaaaaaaaaattactcggccaggtgcggtggctcacacctgtaatcccagtactttgggaggccgaggtgggcagatcgcatgaggtcaggagttcgagaccaacctggccaacatggtgaaaccctgtctctactaaaaatgcaaaaattagccaggtgtggtggcagacgcctgtaatcccagctactcgagaggctgaagcaggaaaatcgcttgaacccgggaggtggaggttgcagtgagccgagatcgcgccattgcactccagcctgggcgacaagagcgagagacttcgtctcaaaaaaaaaaaaaaaattacgcagttccttcaaatactgaaatgaaataatcttttcccagagcttactgaacagcttattagactagtatgtttagtatgttcaaaacagtcagggaaagcaaaaacattcctttggcttagggtgggaggaggaaaaggatatctctatgctagtgtcagaaagaaactaaaagatcatcacactgaaactccatacctcaggggaggccacttccatccatgagagaacattacctacaagcctggaagagaattatagcaccatggaattttagagccagaggacctaggaagcaacagtctacacatgaatgagaaggagagatcatctggagaggaaaatgctccagatgtcagggctctcggggaccccaggccctgttccactcttgttcatcatgcatggggagggttttcctgcaaagttgaccttctgcttgggctttgctctcttttccattcttgctttctttcttccacaggcgtctggatgctaaccacatcagctatgtgcccccaagctgtttcagtggcctgcattccctgaggcacctgtggctggatgacaatgcgttaacagaaatccccgtccaggcttttagaagtttatcggcattgcaagccatgaccttggccctgaacaaaatacaccacataccagactatgcctttggaaacctctccagcttggtagttctgtaagttttattgattttgctctcttttaacagtttctaatgtcactggaagaccttggccttaaaatgctggctcttcaaagctcaaatggggacattttaagagaggaaaacctcctgagcccctccccaaaatgacttataaatgctccaattgtgtaaatgacttaaacaatacttatcaattacctgctagatgccaagcacagcagggcatacaaagataatgaaatatgacctgtgccttagagaagcccattgcatgttgcacaaggagtcaccgcactgtacagttagtacagtaacctaagttaaacattccttattttaaaaaataattgataattcaggtcaaattgaaagatgctcttcttattatctaataagaactttgtgaacccttaccaaggaaagagaagtgagaacaaatgatgtaactgctcaatgagttctttttgcccactgcccaaatagagccaatttattaagacaagagaattgcaataaagagtaacacacaaggccggcacagtggctcatacctgtaatcccagcactttgcgaagccaaggcgggtgtatcacttgaggtcaggagttcgaggccagcctggtcaacatggtgaaaccccacctctactaaaagtacaaaaattagctgggcgtagtggcacatgcttgtaatcccagctactagggaggctgaggccggaggatcaattgaacccaggttgcagtgagccaagattgtgccactgcactccaccctggggaagagagtgagactctgtctcaaaaaaaaagaaaaaatagtttagcacacatacagccagctcaatggaagactagagttttattattactcaaatcagcctccctgaaaattcagaggcaagagttttttaaagatagtttggctagcagggagctagggaatggggaatgctgatttgttgggtcagggatgaaatcataagggattgaagttgtcctcttgctctgagtcagtcctggatgagggccttaagaccacatgggccagtttacccatctgggtggttccagctgatctatcagaatgcacggtctgaaaaatatcttgaacaccaatcttatgttttacaatagcgatgttatctataggagcaactggggaggttaggagtcttgtggcctctggctgcctgactcctaaaccataatttctaatctgtggctaatttgttacttctacaaaggtagcctggtcccaaggcaaggagggagtttgtttcagaaaaagactgttatcattttgtttcaaagataaactataaactaaattcctcccaaagttagttcagcctatgcccaggaatagacaagggcagcttggaggttaaaggcaagatggagtcggttaggtcagatctctttcattgtcatatttttctcactgttgtatttttgcagaagtggtttaattgacagcatgttatgcatttgcacagttttttcccaccatatgtctagatttcattattttagtaaatccaaaatgattctcaaacaagtaatagtttgaaaaataatcagttttctttaaaaatgtagcagtatgacccccacatgtataatataataaccaatcaatgaggaaggcttcttctcactatttctctctttgcttcatgcccacccactggcccaccgctctcttcaatcattccacttgatgacatgtctgtcccttgcactgtagtatatactcctttgagggctggccaatatcttatttattgttttaggttcccctcaatctccttccttatatgctgcatgtagaatatcctcaatgaatattacataaatctcacctaaaaccaaaatttatttattagaaaaaaaatcttagtatggaaggaaaagaattttttgtgatattaaaaaatttctacactgaatttcacatataaagatgatgctactgacccaccagaagctgggtatgtgctttaatttcttttcctccactagaggaaatggatttacacagatccagctgtactttttcaccctatcctccttaagcccattttctaaaatccttttgagagttggtccagttttcagttgtgcacagctgttctcactggctctgacctaactgacttaccaattgaaccaaagatgataattatatacactaatactgtgtcaagataactaatctccttgggcagcagaaaaatctgattaccattgcctgtgactgaaatcattgtttcctgttgacctgtgctcccgccctgggaaggtagccattataggccttcatctttattagaaaatgtgcttgctacatctatcctccaggtgtcaatgatggtcagtatctctgcttaacatcctatatcccaaagccatgctgaacaaactatgcttacaaatatgccttgagaatgtaaattagttcaaccattgtggaagacagtgtggcaactcctcaaagacctaaagacagaactaccatttgacccagcaatcccattactgggtatatacccaaaggaatagaaatcattctattataaagacacatgcatgtgtatgttcactgcagccctattcacaatagcaaagatgtggaatcagctgaaatgcccatcaatgatagactggataaagaaaatatggtacatatacaccatggaatactatgcagccataaaaaagaacaagatcatgtcctttgcaggaacatggatggaggccattatccttagcaaactaacacaggaacagaaaaccaaatactgaatgttctcacttagaagtgggagttaaatgatgggagcacacatggacacacagaggggaacaacacacgctggggcctctcagagggtggagggtgggaggagggagaagatcaggaaaataactaatgggtactaggcttaatacctgggtgatgaaataatctttacaatagacccccatgacacaagtttacctacataacaaacctgcacatgcacccctgaacttaaaaattaaaaaaaaaaacagccttgaaacccaaagttacttatatcaattatgttcctcatattattatacacaccctgatgtcctgaagctaaaaggtaaaaaactgtgactgtcttttaaattctgtggtatagaatcatctgtggtatgagtgaatgcagcatatagccattttttacattggcttcttataagtagtgcattcttcagtatatgtttctttggatttaagctatcaaaatgttaagtgtggtctgtgcagtgtgccttcctaactatctgtaatgttctactgcagacatctccataacaatagaatccactccctgggaaagaaatgctttgatgggctccacagcctagagactttgtgagttgaccttttatttgtttcccttttttcagtattttcatgaatattctgaagaatcaaaatagccttaaagccagactttgtttggtttggttaattgcctaagctttcaacagatatttacagtggcattatcttacacacacaacccccacagagctaaacaataaaactgggattttattttaatctaatgagagtgataaattagttagaatcattataaattaaatgagatgttctctactaagcagtgactatttgcttagaaatgtgtagtctctgtcaaggatcactcaggctcactgttcatgagtctggtactccctgctgaatgagaggatgcaggccaggccaatgcctgcgtcttcaatctcagatgaacaggcatctctttaggaaacagtgatggctcatgctaaagcaattcaaaagatgaaaaagggactgggcgtggtgactcatgcctgtaatcctaacacttgggaagccaatgcgggaggatcgcttgagcccaggaatttgaggctgcagtgagctgtgaccatgccactgcactccaacctgggtgacagagcaagaccttgtctcaaaaaaagaaaaaagagtgaaaagtaatagtagctactatttattgaatatatctataatcaaatattgcactgagcatttggcatacattgttttaattacttcttacagccatcctatgagagcagatattactatcccattttaggctctagtgaggtaaagttattacatatctagtcagtagcagaactgagatttgctttctcctctagtctgattctgaaatccatgtttactactacatactacttccaaagaataagtcaaaagttcagttcttaattggtacctatagtaaaaatagagtcaagccagcggaccatatcctagacactctcacagagccaaggtagaggttcttgtgggccacaccagggccccaggcttttcccaggggaggagctgctcttcattgccctgttgagaaaggtgtgatgagactgaggtgataggcagggagggtcctgagtgtgctgggagaggagggtagttgcagccatgacaccatccctaccctcacatttttaatgctcaaatgcaataaaccacacaggtcactgaatctgcagtgctggctctgaccagaactgcaaaaggaaaagaccaaagaccacttctcctgtgcccttggggcccactgttcatttgcacacagagcttaggaatttgttcatgatcaattcagcttctaaccagatctgggttactaatttcctgagggaccctgtgttggtggtattcttctagcctatgagcactaacagctctttccagggttaagtcaccctgtgtttcttcttacgtggcaaagatggacttgtccagggaggacctttatgtcaacttaatggcatagacaagcagttcccatcagctgctaggaaaaattagaactcttatctacaaaacgctgggctcagaaatctcagcaatggaaatcaccttccagcccttttgaacaataacaggaatgaaaaacaagatgggctttgatgggtatttccataaatagtctttttttttccctcaatgtttggggtaaggacccaggattgcatgtaaataacatagagcaaaacatgtcagggaaaagttcatgtgagtcttattgtctccccttcctctaccttgcccagggctacagaggataagcaatttggttattcccagcctcttcctttccctactagaaatccaagtaatttataagggtccaatccttgtttaatcaaaacagagcatctggagagatttacaaacaggaagaaaatttatgtctacaaaagacatgcatttcctgcctgcagtatagcttaaggatggtttgtgccagacaagtaggaaccttgattcatgtttaactcagtcaaattatctctctctttaaattaaatagcaattctccacagaggaggatctaaccacatctgattgcctgacgaaaaggtttttctgcgtcatctgggaaatctgccattcccagagaccaggaggcaattactttttcatacgaagatcttgatataaggtagagtaagtctgtaaagcacttgtgagtaatgaaattgaaaagccaattgtgctataacagatacagaaactaatgatttgagataatttgaccacttcatctctggccttgagggataacatagagctttgctgcacagatcaaggaaaacatcctatttctgaattatttgtgactccttgaagaaattctagaccaaatgtcctttctgagattaccctgtctcacataaacctctccagaagcaaggttcatcctggacttcaggctaggagggatgtgggaaccctgtgaaagtcaaggacaaagcagccctgcaagatttcatgtcacaagggagtgaaggagggaacaagaaaagggatgtgatccaggagccctgaggagtgcaaattcacgctggccaattagtgagcccggttcagttgaagagctccatccgccagccgtcaacacctggccaaagagacatctctcctacttagaagttaatactcctgcacactccctttcttttttagacgccccagtgccattgagtcctgactctcaaatttctcatgattagtcaaatgaccattttaacgcagatacttatagaatgttggtagtcagcaagccaagaaaatctctttccataaagaaaagcagtgagaacttccattagtcatatgggttccttggaatagcatgttaactttccttgtaaatagagtatatatgaagttttaaataaaaaactgaaaatactatgtactcattttcagagatttaaattacaataaccttgatgaattccccactgcaattaggacactctccaaccttaaagaactgtaagtatttaggacaattttaatgggagaactttatccttttgtgaatttatttaaaaatacatgtgattgttttacataatatgacttgctagaaaattttaagtttatataaataatgataaagtacacttgaaatatattttaattgattctatctctagcaaataccagataatattttttatttatgcggggtttttctaacatatatattaaaaaaacatatatttctgtaagtcatattcttttctctttttctaagccatacatactctcccaccatttatgtactttatagatttgtagatttttagtagtagaactaaaatggaatttaattgctgagcatttctgagaacttgaacatttctgggttgcataagtctagaaataaatgaatcaaactgtctgtgcctagtaaagtatgagatgcattcacatacattgcagctgacccttgaacaactaggggttagggacaacaacccttgcacagtagaaaatccatgtataacttttgacttcttaaaaacttaactactaatagtctaatgttggccagaagccttatcaataatataaacagtctattaacacatattttgtatatgtattttgaactatattcttataataaagtaagctagagaaaagaaaatgttatttaaaaaattctaagaaacagaaaatatatttactatttattaagtggaagtatatcatcataaaggtcttcatccctgtcatcttcacattgtggaggctgaggaggaagaggaagaggagatgtttgtctcgttatcccaggggtggcaaaggcagaagaaaccccacatataagtggagccatgcaggccagctcaatgggtcatgcctgtaatccccgtgctttgggaggccgaggcaggcagattactcgaggccaggagttcgagaccagcctggccaacatggtgaaaccccgtctctactaaaaatacaaaaattggctgggcctcgtggcacatgcctataatcccagcttcttggaaggctgaggcacgagaattgctttgaaccagaggggcggtgattgcagtgagccgagattgcaccactgcactccagcctgggagacagaacaagattctgtctcaacaacaacaaagaaaagtggatccaggcagtttaaatccattttgtgcaagggtcagctgtatttcatttgtaaatgttcaatgaatcttatttaattctaaaaccccacaattttactaaagaaaagctgactttcagccattggtttgcatatactgccttttagatgataaaatttaattagctttttcatatctaaaaagataaataatctatgttagtaatgttctaacacttggaaaggaaaataaacactgaacctcattcccctagcagtgagaaataagacatacagctaaaggagacacagaggagcttgtttataagaaaaacccttagggtgttctgacttaggaaaccccatgtgtggcttagctgggcagtggcttcatggcatggggtcacctcatacagccacaggcccaaataagctccaaagatcattgaacctgcttctcagccattcagacaacatcaacaacaacagatgacaatcagcttataactacagattcactgagccagggcacctttcttcaagtcagaaaattttgtcctcataaggagactacttaaatctttacttcactgcagcttaagtcaattttctcttctagcttcaaatggggtcagtaggagtgatcataatctctccaaaaatggtttccactctctcaggcttttatacaatgatgctctattggatattaacagattttcttcttataacattagattgtaagtttccatgaagtgcagttattattttcagattctttatttctcttttaagatgacagcacatgactttttttatcccctagagagtaaataacggcacctaagtttcaagatgcatagaggaatttaatattgtcctctggttactaaaggttctgattattgccactgtggtcagggtgggggcctctattaaataattttaccccacacaggattttttataattttttttctctttctagaggatttcatagcaacaatatcaggtcgatacctgagaaagcatttgtaggcaacccttctcttattacaatgtaagtgaccataatgcttttcggtttctccatcctgaaatatagcatatattatactttgaaatacaatgaatattctatatttgcctgagttttgtcttagtcaatctaagagttcatacagaaaggtatatacacatgcattttgccaggttctagctgaacactgaaataatataaaagatttttttaaagatcacattatgattggtatctccagatgtgctaggtatctttaaaataatcttgtaaaatgcttttgattacctctattttctaagaaataaaactgatttttagagcattaatgtcaagtctgcatagtcattctgaacttaaacccgagtatactagaaatataaattattatatacaaatgggtgtcttttacagcaatagactccagcctaaattgatggtaggggttttatactgttttgtgctaagcctctatctccattcattattatgcccaaacattcacatttatacaaactaggatgtaattctagaatgataaataacattttagaaaggtgtgtatgaggatttatatgccataaaagaataaaatcggccaggcactgtggctcatgcctgtaattctaacacttgggaggccaatgcaggaggatcacttgagctcaagagttggaggttacagtgaactatgatcatgcctctgaagtctatcatgggcaacagagccctgtctccaacaaaaggataaaatagagttacaactacaaagtataactaattttatgtttcatatttaatacagtagaatgatgatatacagttctgagtatgaggctggctcttagacaaaaggctcctctcggaggcagatttgggacaccatcaaacctgaggttgtgaatgagaagcctgaatatagaggaggagagtaaggacaactgttaaacatgactctaggggcacttctcagcagatgttggtcctgtgccaactggagtgacgggctttctgggaccatgtggtatttgtcacaaatgagcaggagtcccaattagccttgacaaccagaagaaaaaaactattcattgtttctgaaatgttctggcaatattttggcaaactaagagttttaaagtacattgacaataaacattagccctcattagagcgtatttgtgtattaagaggttggcaaattacattgcctttgctcctccttctgcagccacagtactggtttttcatcactcttttgatatgctaatactccctgaggaactagcggcgccaacccccactctatatatattagacctcctatccactatttgacagtggtgaccactttctcctgtaaactctcctctccttgctcctgcatctgtttccatctcttcaaagcccgcatttctgtgaatgctttccaggtccagttggctacccactcctcatttccacctctgtagtccccatcctatccatacctcctgacctccactgcaccagcctctctgccagccatgacaaccagattttcaccagtctgcgtgaggctggcctccctcccttcaccgttggcagcactcatcttccttgaagcacggcaaccatcttgttactgctgctgtgaaatgtgcgttcaggatgtctatttacactaaatgcaaactcctcaccctgacattcacagcctaaggccacacatggcctaagctaaccctgtcaaccagttccccaaagctctccccattcaccctaattcataaaccagactgactaagttatgttcacggaacaaagctcttttcttacttcctttgctcctacgatcccattccctcactatgcttcttgaaattctttcagggcccatttcaaaagccatttcttgaagttttttataatctctcccgaacatatgagagagttccctcctgagaaccctaaaactccttatgtgtgtttatgatacttctgccttatgcacacaagcatgtatattcatacctgcccagtgtgtgtgtgtgtgtgtgtgtatatatagtgtgtatatatatactgtgtgtatacatatacatatatacatatatatgtacacacacaccatgtatatatgcatatatacgtatctgtacacacgcaccgtgtatatatgcatatatacgtatctgtacacacgcaccgtgtatatatgcatatatacgtatctgtacacacgcaccgtgtatatatgcatatatacgtatctgtacacacgcaccgtgtatatatgcatatatacgtatctgtacacacgcaccgtgtatatatgcatatatacgtatctgtacacacgcaccgtgtatatatgcatatatacgtatctgtacacacgcaccgtgtatatatgcatatatacgtatctgtacacacgcactgtgtatatatacatatatgtacacacactgtatatatacatacatacatatatgtacacatactgtatatatatacatatatacatatatgtacacactgtatatatacatatatacatatatgtacacacactgtatatagatacacatatatgtacacacacactgtgtatatatacacatatatgtacacacactgtatatatacatatataaatatatgtatacccgcacactatatatacatatatgtgtatatatacatacgtatgtgtatatatacgtatgtgtgtatatatacgtgtgtatatatatatacgtacatgtatgtgaacacaattatatgcatacaagtacatggtatagctaagagctgataagatattaagaggaaagctccatttttcatcataaggcccatattccagctctagctctttctcttactgattaatcccaagagaaaagaagagctcagtgggtaggacagaagaggatttaggtttgttgggtagcaactgtatcccaggttctatttcaaatgttacacatgcattaggtcttttaattcttatccaaaccctaccactaagcattattatctcagcttaacaaattagaaaattgaggctctaggaggtaatgagcttgccaaggtgtctgagcctcaattttctcttccaaaagtgaagaaaatagtatctacactatgaatctcataaagttgttgcatggatcaattgagatatatatatatatctcatatatagacatatatacatatacatatatatatatataacacatacatatatgcaagagctttgttaagtagaaagtgatatgctgttatttatttgctttatcccaactgaatccaggctcctttaccacaggaacatcttatcattcttcttcaaacccccagcatctagtataatgccaagtccaaagtagttacccaatgacagctttttaatgaatcaatctttaaatcctcacatacctaccctcatactttaaacgtggtagacattagtgaatatttgttgagtttaattggactagaagaatgactcagctaaaaagtatatggcactccattgaccaggcagttcaaataccattacattgaaaacatctgtaaaacaaaatattttttaatctctaataatgtctcaccttttaaaacaataattaattcaagaaaattctaattttagacatatgccagaatagctcatttcctctccaataatctgatgagtctcttgtgtatgttatggtgaccagcagatataataaccttcagttgatatcgatagatagacttcgtctttcattaagtaatgatctgattgccagtactttgaattacctttttgccactcaatggatattctacagatgttggagggagaggaaactgttaagtattcaatttacttgcttttctccttagtaactatcactcatatctcccttgttgtcagaaatcttcaattttatatagtacagattccttaccaaaagtctcatactgtgagtcaaaacacttttgaggcttgcctgaaaccaaggaattgggaatgttatgtaatacagtataattaaaattacataagtacatttactgtatttgttcaaattttgaacagatattcatctttcaaattttatactaagatattaattgctgtttgggtttcttttagacatttctatgacaatcccatccaatttgttgggagatctgcttttcaacatttacctgaactaagaacactgtaagtttctatgtctcttatggatcactttccctctacagggttgctgtgaaaaaccaaatgaatattatagattgaagtgctttgaaaatggcaataaaaattacccctgtctagaatcttctaccagtaatacttatatactcctctttctaggactctgaatggtgcctcacaaataactgaatttcctgatttaactggaactgcaaacctggagagtctgtaagtactgagtagactcttgactttgcccagaacatacactgccattagaacttgatcagtcttaacatcagtgagtcaaaatatgtcactgtgtgatgcccgaatgaaagaattatgtctggtttgtgttttaacaggactttaactggagcacagatctcatctcttcctcaaaccgtctgcaatcagttacctaatctccaagtgctgtgcgtatcagtaaggcaataatgttgtgtaaacaggcaacttccatttaggggtgaaatggcagacatgatttcaataatctctttaaaagaggagaaagtttttcctttcaggtctgcaggaggtcaagcctcctttgccctctttggtccaggctctctgacatgatcctggtaacaaatggtaatgtaccctttgttttctaagtcccaaacaagctcccactagactttcagttggcacatgttttctttcagaaaagatatgaagaggccaaaatcactttatttccccctctaaaggctttgcagagcagaacaaaataacataatggatcaaccacccaatatggatgccaaaatcaaaaactgagatctcagatccacacaatccttgataaaggtgatcaaacatccttccagtatagttgtcaatgccatgttctaatgtttcctgtaatggttaaacagcttgcatatgttatttctattgacttgggacttttttcctctgcctttcccatgtgttatgaaaaaaagtagtttacatggattcaaggagacttgttttgaccttccatttttcagccttctccctcaacttccactcaacacaatcattgttctctcaagcatgttgggacttaataaaaggactcttaatcttttgccatggctctgcactcacatagaaggcacctgtggcaattgagcgcctgcaatttcactataagctttacttagcagcactcagaatgttaagtagataaacgggaatggctgcctctgtgattctgcctttccccagccccagcctgccgtgtcacttcagactccagttgctcaatgatatgtgggtgcagtgacaccacatggtagccttggagtcagtgattcacatctgaaggaagggagtatagagcaaatctttcttcgccctaccccaccccaccccatgaagtgcagctacagataagaaagcagtattagagaatttaatttgtaaaaatcacaaagcaagaaagaagcgagtttgaattcaaatacaatcaatttgattgaataactgggagaaagtgtgtgtatatcaggtggtagaaatttggggggccatgttagaattctgcctaccacacccagaacaggtataatcatccccatttctccagaaaactggcgcagttatatgattaggattttacatactggagctagtaagtaaggaaccagtgtttaaactgcatctctctctgctatgtcacacaatgagtggtaaccactcaggtctagaactgcatgaatggaggctcactggcaaaatgactttaaaagcaaaggctgtggagccaacttttctggttcaaatccaggctctctatatgccagcacaggatcttgagcacattattattcctcctggagctcagtttcccagtctataaaaggagatgtagccacttccttcagagggttctcatgaggactgattaaatgactacatgtcaaacagttacagcagcacctgggacactgtaactctcagtcagtgttaacttttatcatctttctcacttccctggaaccattattctttccttgagttggaacttgaaaagccgggaggaatacacataacattcatagtagatcttgccattttcaaagcattttcacctataatattcatttgttcttcccaatgaccctgcaaaatggtgtcttctcatttaggagaactgagaaagataccaatgcttagctagtgtatcaaccgagtagaattagctgaagttgagactagaaccccggagcctctcccctagtacaaggtgctttatgttctcctgggggtatagatctgagagctctcccctttggctaactcatccactgagtacttgttacatgaggaaatttcactgtacatgactagttttgcgtcatgtgcatgggaattatttagcccattctgtaggctatgtgtaactttccccacttactagctggtcagcttaggcaagtcatttcatattgtatgggtagaattatggtgtctccctcataaggtggccacaggaattaaaccagataattcaagtaaagctataaacatggtacctttatataagaagtgcttggcaatgggcaaaggattccctgtttaataaatggtgctgagagaactggctagccatatgcagaaaattgaaactggatcccttccttacaccttatacaaaaattaactcaagatggattaagacttaaatgtaaaacttaaaatataaaaaccctagaagaaaatctagtcaatatcattcaggacataggcatgagccaagattttatgatgaaatcgcctaaagcaattgcaacaaaagcaaaaattgacaaatgggatctaattaaactaaagagcttctgcacagcaaatgaaactatcatcagagcaaacagacaacctacagaataggagaaaatttttgcaatctatccatctgccaaggggctaatatccagaatctacaaggaacttaagcaaatttacaagaaaaagacaaccccattaaaacgtgggcaaaggatatgaacagacacttctcaaaaaaaagacatacatgcagccaacaaacacatgaaaaatagttcaacatcactgatcattagagaaatgcaagtcaaaaccacaatgagataccatctcacaccagtcagaatggcaattattaaaaagtcaagaaacaacaaatgctggcaaggttgcagagaaataggaatgcttttacactgttggtgggaatataaattagttcaaccattgtggaagacagtatggcaattccttaaatatttagaaccagaaataccatttgacccagcaatcccataactgggtatatacccaagggaatagaaatcattgtattataaagatatatgcccatgtatgttcattgaagcactattcacagtagcaaagacatggaatcaacccaaatgcccaccaatgatagactggataaagaaaatgtgctacatatacaccatggaatactatgcagccataagaagaaatcagatcatgtcctttgcagggacatggatgaagccggaagtcattattctcagcaaactaatgcaggaacagaaaccaaacattgcaagttctcacttgcaagtgggagctgagcaatgagaacacatggacacagggagagaaaccacacttaactgggccttgccgggggagggtgggaaggggaaagcattaaggaaaaaagctaatgcgtccggggcttaatacctaggtgatgggctgataggtgcagtagaccaccatggcacacgtttacctacgtaacaaacctgtacattctgcacatgtaccccagaattttaaaaaaataaaataattttttttaaagtgcttggtcagtgttagccctgaaaatcattaggtagaaggcaacactatgcctttatgtagaaggtcttttgttccctctattaagaggtagacaatgaaggagtatcccctttgcagcctgcagagatgagtaaaccaattatcagctttgataatatgtgtgtccattttattatattcgctatttttcaaaaatacataccatattaataatcaggtatatttgtgcataggtgtgagattttggaggtattgggtgggggggtatctttcaaaccttcagaaagttacaaatttggatttacaagcagcttcatttgtactatttatgcggagtaaatggactttattcctttataaatcccatttattcaataaatgtaggataaagtgatcaattataagactaatttgaagccccttagaaaaagtatgatttttcccattgcatagtggtgatctggttttaagaattagaatcaggcatgaaaatgtgttagttgattagctgataacttttaaaacatgaaacaaaattgttcttatatatctatgttacgttatctaccaactttcttttctttcaagctttcgcaaattatgatggcttgctttagattagttatattatactataaatatgtccagatgtttttgttattctgtaatttgttgaattttggctgaagattttcttagattccgttcccccacctccttcttgtagtgattgatttcaaagctcctgctatgttttgaattgttaggtttttttaaagagttgattagaaaagaaacaacaatgatttgtctgagctgtagagatgtagcagctcttagagacagaggcacaattatttaatttaatttgttctcattgcagtaagataatagctagagcatttagagaagtactaacaaaatataaatgaattcattaagtaaactatttaaatcaattaaagaagtataacagttacatttcagtaaacatttgaatctactggttaatccaataatggctgtgactacctgctccatgtcagggctatgaaaatgttcagagtctgcctttgggagatataacatcttggagggaaaaggagagcaaagcatgtttctttatgatttatttgtaacagattttccctttttgcaccttctgtttttcagagatctgtcttacaacctattagaagatttacccagtttttcagtctgccaaaagcttcagaaaatgtaagtctagaagtctctaagtcacctagcaaaaatcaagaatcaaaactcacatttctcagggtcactggttcatttaccctgtggttcactggggagacatgtgatccttttccttcttacacacacaaggtgtgactgtgcagtgtgcttagaaagttgagaaacatagataatattattttttcatgcactgtaccatattagtaaaacatttattatatatccgcttttttctccccctaactcagggtactagtgaattgggtgtgtttgggctttgaaatttttcttattttagaagtacaaccaaacttacatatccaatgagtggtgttattttttaatatgtggggacttgggtttgttggtgtgtttgtttcacaatagtcaactttaggggaaggccatatttgtcatatttaaagtgctacagatggtacttatgcatgaaactctttagaattcctctcttaacattgcctcccctacaaaacatcagcctttttttttttttttctcaagatggagtctcgctctgtcgcccaggccagagtgcatggcgtgatctcggctcactgccacctctgccttgtgggttcaagcaattctcctgcctcagcctcccgagtagctgggattacaggcacccatcaccatgcctggctaattttttgcatttttactagagacgaggtttcatcatgttggccaggctgctctcgaactcctgacctcatgacctgcccatctcagcctcccaaagtgctgcgattacaggcgtgagccaccgcgcccggccaaacttgttgttttatagtcacacttcagttttgatcaaaacaatattcaccatctatcccttcacatttagtttttctctcaatgcctttgggtgcttaagggaaaaaaacaaagcaaatccatctgtaaaaggtaaagaatttaccctcctgaagaccctcaaagaatccaaggaaggctcagaaggcagcactagaagagtcctccagtgttttgaatgatgattgcatgtttggaatatggttttacgtcctcccaagcaaactagctcctttgaaagagacaatacttgagtgtgtaaatggtaatgttcttttttaaacaaacaaaaatcagtcacttgatagatacacttcatgtgttcctttgattaagggcaggtagtccctctataaaagttatctgaagtctgtagtctttgaaaccagtaactttgaaatcaatctttggaaccctgtcatttcagtgacctaagacataatgaaatctacgaaattaaagttgacactttccagcagttgcttagcctccgatcgctgtgagtatcacctcccagtgcgttccccagcacagagcattttctttctctttggggccttcccctaatgttttcttttcattgtgtactattgtggtgggacttttgtgcatatatttgctatgaaacatcaagtattttgcttctggtaatttccaggaataaatctaaaagtagtaaatttgcaattatgctctctaccagtcagcaggcaggaagttttaatgaagaggaaggaagctaagctgttgactagcctactgtgttttctgtccacaacctggaatcgacaagaaacattttacatgcaaaaatgggatgatcacataattctatctgcctgctttttttcctggttaagcatttttttcaacgtgtgtctcaaagtgcttaataatcacctcgaggaaactaaaaaatacagactccagaaccttatctgcctcatgagttagaatctctggagtggggactgggaatctgcattttaacaagtacactaaggtttgaacacagctgttctagaatcacttctgttgctcaggcaactaagatttgtaaatacttgtatttaattccattttatgattgaaatgttatatattaaattttttaaaaaaacttactagcagattgttttatgaaataacagttaaaacttttctatactgaaactggatttcaatatgattttgatgaacggtgatgataggtaatgtttaaactatagtacgtttgttaaaaacctttctcttttgctgacttctaaagtattttttttgtacttaagagactatacctttggtaaaataatactattcctcaaaagactttaaatttacttttaagagtcactttctcccaaaagtttaccttaataaccttaataatttcctcccaaaagtttaccagaataacatcttgttctgaatttcgttgtgttgcccttctctcacttttggttgaaatctacttgtggagtgcttttacttaaaaaaaaaaaaagtgtaaaaggaaaatacttttattttccttttactaagggttactattttcctaaccctaaaccttattcaggtaagtgaataagacttacctgtcttattcacccggtttgatgtctggctgccccaagtcagttctatattaaaaggcaggcggatcacgaggtcaggagttcgagaccagcctggccaacatggtgaaaccccatctctactaaaaatacaaaatattagccgggcatggtggcatgtgcctgtagtcccagctactcaggaggctgaggcaggagaattgcttgaacccagcaggcggaggttgcagtgagccgagatcacgccattgcatccagcctgagtgacagagcaagactctgtctcaaaaaaaaaaaaaaaaaaaaaaaaaggctgatctctatagataccaaaagaatgtgacacagactctgaagaataaatgtctgaatccccctgaattccttcttcccctgtgacctcacattcagtcactcaccaaactgtgccaactccaattcatcctctccactcctctaccgcaggcccattaatgattcgtttggatcaccatcatcctcccaaccagtccttctatcatctctctacccattcatcttattctttcttaaataaatatctaatcatgttatttccctgcttcaaaaactttctaattatttccctgttgtcttcaagatcagaccaaacttcccagcaacactcttcaaaatctgattccagcctcctggtacagtgtcatctctcctcagcacactccaggtccctgacacacgagccagtgtttctcctattcccattgcctataggattcctccccacccatgacttgtccccctgcccatttcacaagaacaagatcttctatctttgggcccacttcactcagatgcgctttgcacattttctactgtagaacttaatacttagcactgtcatcaggtagactatgccatacctgaaaacaataagaactttttcaggttcccataaattaaaatttcagtaaaacttctagcccagggtctagtgcagtggctttttcattatttgcttaagaatttaaacatgttctgagcacaagatcagggactgtgaagtcagtgtgcctgcgtttgaattgcagcgcctgagattactctgtaatttattactcaagtgacttgtcacacagtttctatttttcctcatgagtataatgaaggtaatgataatacctacctcttagggttgtggtgagggttatgagactaaaacctgtaaaaaacaaaacaaaacaaacaaacaaaaacctcataactatacctggcacattgtaactatgcaaccttattattattatgaaaataagtatatagcttttgagggttctagcaagaaacagaagtcatttaagatggttgaaatgcagaaataccatttgacccagcaattctattactgggtatataccccccaaaatgtaaatcataatgttgggtgtgatggttcacacctgtaatcccagcactttgggaggctgaagtgggcagaacacttgaggtcaggagttcgagatcagtgtggccaacatggtgaaaccctgtctctactaaaaatacaaaaaaattagctgggcatagtggtgggcacctgtaatcccagctactcgggaggctgaggcaggagaatcgcttgaacctgggaggcagggtttgcagtgagctgagatcgcactaccgccctccaacctgggcgacagagtgagactccatctcaaaaaatatatatatgtgtgtgtgtgtgtgtgtgtgtgtgtgtgtgtgtatcattctattataaagatacatgcacacatatgttcattgcagcactattcacaatagcaaagacatggaatcaacccaaatgcccaccaatgatagactggataaagaaaatgtggtatatatacaccatggaatactacgcagccataagaagggataagatcatgtcctttacaggcacatgggtggagctggaagccattattctcagcaaactaacacaggaacagaaaaccaaacactgcatgttctcacttataagtgggagctgaacaataagaacacatggacacagggagagagataccacacaccagggcctatcagggtggcagggggagggaaagcatcaggataaatagttaatgcatgcagggcttaatacctaggtgatgggttgataggtgcagcaaacctaccatggcacatgtttacctatgtaacaaacctgcatgtcctgcacgtgtatcctggaacttaaaattaaattaaatttttttaaaagatggttcaaatgaaaagacacttacataggtgttggcagggagcaagcaaaggatgggtgtgcagaaaccagtaacatctggggctagagtcacagggaggaaatgatgtttccaggacaaagaaagagcttaagcatggagaagtgttgcagcccttgagaagtctgtagctgccatgaaagacatgattccaaaacagggaagagaagaccatgagggccctgacctccctttccttctggggcttctcctgagaaaacaactgaggccattagggagctctggggatgcagcctgcaggatcagccccaggcacaaagcagaaaatgactcctctggggctgctgggaggattccagcgcacgggctcatgaattgaaaaggaattacaggcctttgaacatataaattctcacatatttacttaaaccccagccaaatcactctaagcaccatggcaggacttggcctacattccagatattctgctctgtgaagctctcccagggcaccatgatctacttaaagctgccaaaaagactctgacagatggtattacttgctcacctcagtgacacgtatttcttgagcagctcaacagaagacagtcttctcactcaattacccaaagcccagccgccatttgtagcttttctaccttccatacgtttcctccccttgttagctgcaattttcttctgttctgggatcaaggaaaagacttccagtttcctccaggaaaggaggacaggtccctaaggaacctttcaaatgagaatgtaaatattctgtgaataccatttattaaggtaaccctggagcccaatatcataaacttttctacacttaagaaaagttgactttgtttactttcagttctctcaaatgcctacatcttagttaccattgttagtcatttacaaaaattaaaaatcttaaattcatccttcctttttaaaaatgtagttcttattcctgataaattatctacagaagtttttgcaaaatgctttactcctacttaattatctgcagttcattacttgtccatgggaagtgaattttatttccccataaactgtactttttctttactatcaaagaattttatttctaacatatgttggcccctattttattcatatcctggctaataatttacttgtcagtatccttcctggaaattttcttgaaagcatctttgtgtttctttcaaggcctaacatatatgagtgatgtgcccaaatttttttgagtttcattacatatccaaggacattttataatttaacacttacttgtcagaagaagagactcagaagtttctgtcccttcccacagtgctacaaccactcattttagaaaggccctaataaaattttacaaccatgttaaagtcaaccttttagcaagagtaaaaccaaaatatccacctgaacgatgtttccttgattggttttaacaagcttgatttaaagttctctcattagtcattttataccactaatatgataatctgaagggcagtttgataagttaattgtttctgatctgaatggaaattaaattaattttggtagaagactaaatgcatatgataaaacttcacatgttctttattctatataattctctcatttgcctttttttacaataggaatttggcttggaacaaaattgctattattcaccccaatgcattttccactttgccatccctaataaagctgtgagtattccacaacttgtttatggtatgtctcttaataattgaggaccatctagttaattttaaaagttggttttgttgaagaagctggatatgcacagattacctgcctctgtgttctccatgcctagagcttgtcagagccagggaggagttctgctcctccagggccacatgggccattaagtggataattgaagatttgggtgacacctggttctcattattcagctgaagttttttatttgtgctttgtaatcaggtggaatggaataagatgtcaattcaggtctgaagggcttccattttattttatgccattttgactgatagagaatcttcctgtcccttccccccacgccaacttcccacctcttgctccttcctctccccatctcttatctaacaaagaaagaagaaattggttagacagaagttaggagaagaggaaggggagtaaatacaccccctacactttttacctctcactcctaatctagtcagcatcacttttcaaattaaatatagcaccttccccttgattttagatgtccccacctgacaaaatgaagctgaatatagaacaatttgaatacaattaaaaccttttctcccctacaatcctgattgtgaatagaaaagttatcaagagctaaaccaaaatggttacttttaccattaagagtaaggaccctgcttagaagtttttattgagtagtttaacgatctttaggttgttgttttttttaacataaacgttttatgctaacatagactaaaagccaattgttgtttgatgttttgcagggacctatcgtccaacctcctgtcgtcttttcctataactgggttacatggtttaactcacttaaaattaacaggaaatcatgccttacagagcttgatatcatctgaaaactttccagaactcaagtgagtttgtcattaaaactaataagatacatttgtggtcatgtgaaataatagatgtattatagtggtgttctaaatttatgaggtcgtgagacacttttgaattgcatttcatgccctcaagtctcctaaccctggagcattgttaggacaagccctgaagtgggaaaatgtgtcctcctgaccatatttcctttccttctcaaagatgcctcccagaatcatagagttcataggaggagtttgaaaacaattgatccatggaatatatataaaaataaactagggcatgtaattaaataacattataacattattctactcttgtttacaatttttaatttagcttgtatgtatctaataaaatgtactaaattaatatttgtttgaggaagtaatgctgcttaaaatctgttatgcttattattgacaaagaagtatcttgaaagattatgtattttttaacccacggtagtttttacatacttttaaaattatgaaaataataaaaccccaaaagagagttgggaaagcataagagagaacaaaaatcttttttttaatttttaatgtttttattttttatggttacatagttggtgtttatatttatggggtacatgaaatgttttgatacaggcatgcaatatgtaataagcacatcatggaaaatggggtattcatcccctcaagcatttatcctttgagttacaaacaatccaattacactctttattttaaaatgcccaattaaattattattgactacagtcaccctgttgtgctattgaatagtcggtgttatttattctttctattttttgtacccattaaccatccccacttccccccaagtccacccttcccagtctctattaagcatccaggaacaaaaatcttaaaaatgccactctaaacaacatggttaagttacttctttccaagctttgtttccagtgcattttttattgttagactcaaaatgtgcatagaaatatatgtcatattgtagtcacttattctgccataagcactttttcatgttgctacaatttttcttagcagccttttttttaacctttttattttggaaattttccatcatttgagtaatggaagttgcatcactcagcttcagcaattaacatttcatagtgatcatttttaataacttcattgtttttataaatagcactgtaatgaacacctttatgtgcataacttatactttggattatttatttaggctaaaatccaaaggtagaataattgggtgaaagaacatgaacactatatttaattatccgtttctttaagtgttttttgtttgggttttgttcatttaaagggttatagaaatgccttatgcttaccagtgctgtgcatttggagtgtgtgagaatgcctataagatttctaatcaatggaataaaggtgacaacagcagtatggacgaccttcataagaaagatgctggaatgtttcaggctcaaggtaggacttgctatgccatggtaatgaaattgtgttgtgttcagtggaacacatggaaatgaattatgtttgatgaaaagtcatcgaacaggccgggtgtggtggcacacacctgtaatcccaacagtttgggaggccgaggcagatggatcacttgaggtcagcagttcaagaccagcctggccaacatggtgaaacccctatctctgctaaaaatacaaaaaagtagccaggcatggtggcacatgccagtaatcccaggtacttgggaggctgaggtatgagaatcgcttcaacccgggaggcaggttgattccaaagcaagctgagctgagatcacgccactgcactccagcctgggcaacagagcaagactgtctcaaaaaaaaaggaaaaaaaattatcaaacagattatctgaacttcagacaagtccttgtacctcagcaaattgtgaataaatcccactttttaaagactacttgagaaagagaaaactagctcaggatttatcctaaaatttcatctgttctgtaggtgaattcttatatttatatgtataattagattcccccttagcatatactgtcctcaggggtgattactgacatgatgtttccatcagctttttaaagggtctgtttctgaggatgtctttttcatacgtacttcagaaactttttctccagaagacaaaatccattttcattcttatggcctggaaggattgaaagatataaacattttagattccttcatatttcagcagaagggctaaagaatcctgctttttgtccaactaattctaaatcattctcctcacctaccccaccccggggtatctgtctggaaggtgaaatgagataatgtctgtaaagcttggctttccttgaattaagacgttacctaaacagacaacaatgcctctcaaaccacacctgtggtaatgaggaggtgctttgggcaccaccccctgccttccctgccaaccctgcgagtttgcacaaagtctaaacagactaaacagaaggatggcttctcatgctttgggccttaatgatttgttgattccaaagcaagtatgattcagtctgtctgcagataaccttaccagtttttcctgcatgtgtatctgtttaaggaactgatatcttggtccttgccttttttgttttaggccacagcatgtgtcttgttcttgttcttgcttcagtttttgctcttcctgcctcacccactctaatttctctccaaaattattcactcaaaacataaaaacacaagcaaaaagttattagagagcctactttgtgccaggcactgttctaggccttgaaagtacacaatgaacaacacagagagaaggtcattcatggagtttattttcaaaggcagtgattctcaaccctggaccacatattacactcacatagcaacttttaaaaaatattggtccccaattcccacatgagaccaattaaatctgtatctttggggaaatatgttagatcacaaaactcctatttcatggatagctaaaccaagcaccaagtagttatttgttttgtcctctgttacacagaattccccagggaagactgaaacttactgtgtctgattctctggtgttcagagaacacagcctagaacatttgcagtatagcttttatagtgttagaaatttggataaagcggttcctactctgaacgaagaggcccatagcctcctctaatttagctctgcaatgtggggacatcatgagctgcagggaacacgagcagaatgagagtttagatgttacacccggcgtcttgggtcactctccctcacccccagttgtactagaatagtatgtcatagcagcttgagtcaaacatccaaaggcaactttataataacttgcaagaaagctagagcacaaggaatttgtgacagttcatgtctccagaataacccaggactctccactctgggatttggtcccttgaaaagagagtcagaactaatcattccaggacttcttgtgctgcagatgaacgtgaccttgaagatttcctgcttgactttgaggaagacctgaaagcccttcattcagtgcagtgttcaccttccccaggtgagaaaggcatcaaaaattcctcaacggcagtatccaccactgattctgagtccatgaaaaacaatacagctatactttaaaagccgaatctgtgccaactttgcagctcatcagtaaccctccccatagtggcctgtcaaatacaaatgttcattccctggagttgtttttcacttgccaataggattgaggtgggaggacttttgatttaacttaatgtaaacgaaagaatcaagtatgttgttagaggcatatgtaatttttaaaatgatattagcaatttaccctgaaatagtatgctataatcttgttttgtgtaatcaccgacatttgaaagtgacttaggtttttcttataaataactatttggtaaaagcaaataatagtttgtacagataagaggaaggaaggaaggaaggaagaaaggaaggaaggaaggagaaggggaagggaggggaggggagggaagggaagggaaggaaagaggaaggggaggggaagagatgggaagggaggggaggaaagtgaagttgaattcttaatagtttgtctcattccaaaaaacaggatgagccagttgaaaaaaagatagctaggaagagttgatattttatttttaacgaatagattgtcccttgctccctaacctcaaattttaatctaaaactaagatgagattttcatgaaattcacattcataatattacggagtatttccctaggattctccttgtctgcctatggaaacttatggaaatattctgaaaacttatataatgaaaagtccaggagatctggctttttacctggctccaacacagctgtatcttagagacttcaattaagtgatcgaaattctccattctcatttctccatcaataccctggaacaggagcaccgggtgtactcacccagccagtgctgcagaagatccagggtgacagtggcttgagatagtggagcatgcacatgggcactgtgtgttattaggctgtttttgaccattatctcttggcatcctaaataaagagacaaaagggtaattcagcaaaagttgtaaaccctaatttgatactcaatctttgccttccttggacttctaggccccttcaaaccctgtgaacacctgcttgatggctggctgatcagaattggagtgtggaccatagcagttctggcacttacttgtaatgctttggtgacttcaacagttttcagatcccctctgtacatttcccccattaaactgttaattggggtcatcgcagcagtgaacatgctcacgggagtctccagtgccgtgctggctggtgtggatgcgttcacttttggcagctttgcacgacatggtgcctggtgggagaatggggttggttgccatgtcattggttttttgtccatttttgcttcagaatcatctgttttcctgcttactctggcagccctggagcgtgggttctctgtgaaatattctgcaaaatttgaaacgaaagctccattttctagcctgaaagtaatcattttgctctgtgccctgctggccttgaccatggccgcagttcccctgctgggtggcagcaagtatggcgcctcccctctctgcctgcctttgccttttggggagcccagcaccatgggctacatggtcgctctcatcttgctcaattccctttgcttcctcatgatgaccattgcctacaccaagctctactgcaatttggacaagggagacctggagaatatttgggactgctctatggtaaaacacattgccctgttgctcttcaccaactgcatcctaaactgccctgtggctttcttgtccttctcctctttaataaaccttacatttatcagtcctgaagtaattaagtttatccttctggtggtagtcccacttcctgcatgtctcaatccccttctctacatcttgttcaatcctcactttaaggaggatctggtgagcctgagaaagcaaacctacgtctggacaagatcaaaacacccaagcttgatgtcaattaactctgatgatgtcgaaaaacagtcctgtgactcaactcaagccttggtaacctttaccagctccagcatcacttatgacctgcctcccagttccgtgccatcaccagcttatccagtgactgagagctgccatctttcctctgtggcatttgtcccatgtctctaattaatatgtgaaggaaaatgttttcaaaggttgagaacctgaaaatgtgagattgagtatatcagagcagtaattaataagaagagctgaggtgaaactcggtttaaaaaccaaaaaagaatctctcagttagtaagaaaaggctgaaaacctcttgatacttgagagtgaatataagtctaaatgctgctttgtataatttgttcagctaagggatagatcgatcacactatttaagtgagcccagatcaaaaaagcagattgaaattttctttagaaaagattctccatgatttgaattgcattctctttaaactcaccaatgtaatcattttgggaggagggagaacccacttgctttccaaatgggtttatttaaacccacaaactcaagaggttgttgggggaattaggaaaataagggttttcaatgacctacattgctaggtagaggctgtgatccatgggatttcattctaatgaccatgtgaagatgtttgagtcctcctttgcctttcctcagaaagaatccttctaaggcacaaatcccttagatggataatgtaaggtattgttaactcactcatattgagatcatttttagagataccaggttttatgtatcagcactagatggttccaccctcatgggataaaactgcttacaagtattttgaaagaaaaactgaccaaaattcttaaattgttactaaggcaatcatgcacaggtgacgtatgtcttatctgatttgtttttaactccttggtgcccaaagctcagaagggaattccactgccagcaatgaacatacctggaaaagaaagtaagcaatctgggattttttttctgggttagtaaagaatttttgcaataagttttatcagttgattcaaactgatgtgcatcttaatgatcaaatgtgcacattacataaattaagtccactgatacaacttcttacacatgtatctctagtagctctggcaaacccaatatctgacaccactttggactcaagagactcagtaacgtattatcctgtttatttagcttggttttagctgtgttctctctggataacccacttgatgttaggaacattacttctctgcttattccatattaatactgtgttaggtattttaagaagcaagttattaaataagaaaagtcaaagtattaattcttaccttctattatcctatattagcttcaatacatccaaaccaaatggctgttaggtagatttatttttatataagcatgtttattttgatcagatgttttaacttggatttgaaaaaatacatttatgagatgttttataagatgtgtaaatatagaactgtatttattactatagtaaaggttcagtaacattaaggaccatgataatgataataaaccttgtacagtggcatattctttgatttatattgtgtttctctgcccattttctttaaattcattaactgtatatatgtaaatatatagtacttgtaaatagattccaaatttgcttttctattgggtaaaaaataaatttgtaataaaatgtgtgactat

SEQ ID NO: 54 - DNA, 4571 bp, Homo Sapiens
ccacaccgctcaggccgcgagcagcagcaaggcgcaccgccactgtcgccgctgcagccagggctgctccgaaggccggcgtggcggcaaccggcacctctgtccccgccgcgcttctcctcgccgcccacgccgtggggtcaggaacgcggcgtctggcgctgcagacgcccgctgagttgcagaagcccacggagcggcgcccggcgcgccacggcccgtagcagtccggtgctgctctccgcccgcgtccggctcgtggccccctacttcgggcaccatggacacctcccggctcggtgtgctcctgtccttgcctgtgctgctgcagctggcgaccgggggcagctctcccaggtctggtgtgttgctgaggggctgccccacacactgtcattgcgagcccgacggcaggatgttgctcagggtggactgctccgacctggggctctcggagctgccttccaacctcagcgtcttcacctcctacctagacctcagtatgaacaacatcagtcagctgctcccgaatcccctgcccagtctccgcttcctggaggagttacgtcttgcgggaaacgctctgacatacattcccaagggagcattcactggcctttacagtcttaaagttcttatgctgcagaataatcagctaagacacgtacccacagaagctctgcagaatttgcgaagccttcaatccctgcgtctggatgctaaccacatcagctatgtgcccccaagctgtttcagtggcctgcattccctgaggcacctgtggctggatgacaatgcgttaacagaaatccccgtccaggcttttagaagtttatcggcattgcaagccatgaccttggccctgaacaaaatacaccacataccagactatgcctttggaaacctctccagcttggtagttctacatctccataacaatagaatccactccctgggaaagaaatgctttgatgggctccacagcctagagactttagatttaaattacaataaccttgatgaattccccactgcaattaggacactctccaaccttaaagaactaggatttcatagcaacaatatcaggtcgatacctgagaaagcatttgtaggcaacccttctcttattacaatacatttctatgacaatcccatccaatttgttgggagatctgcttttcaacatttacctgaactaagaacactgactctgaatggtgcctcacaaataactgaatttcctgatttaactggaactgcaaacctggagagtctgactttaactggagcacagatctcatctcttcctcaaaccgtctgcaatcagttacctaatctccaagtgctagatctgtcttacaacctattagaagatttacccagtttttcagtctgccaaaagcttcagaaaattgacctaagacataatgaaatctacgaaattaaagttgacactttccagcagttgcttagcctccgatcgctgaatttggcttggaacaaaattgctattattcaccccaatgcattttccactttgccatccctaataaagctggacctatcgtccaacctcctgtcgtcttttcctataactgggttacatggtttaactcacttaaaattaacaggaaatcatgccttacagagcttgatatcatctgaaaactttccagaactcaaggttatagaaatgccttatgcttaccagtgctgtgcatttggagtgtgtgagaatgcctataagatttctaatcaatggaataaaggtgacaacagcagtatggacgaccttcataagaaagatgctggaatgtttcaggctcaagatgaacgtgaccttgaagatttcctgcttgactttgaggaagacctgaaagcccttcattcagtgcagtgttcaccttccccaggccccttcaaaccctgtgaacacctgcttgatggctggctgatcagaattggagtgtggaccatagcagttctggcacttacttgtaatgctttggtgacttcaacagttttcagatcccctctgtacatttcccccattaaactgttaattggggtcatcgcagcagtgaacatgctcacgggagtctccagtgccgtgctggctggtgtggatgcgttcacttttggcagctttgcacgacatggtgcctggtgggagaatggggttggttgccatgtcattggttttttgtccatttttgcttcagaatcatctgttttcctgcttactctggcagccctggagcgtgggttctctgtgaaatattctgcaaaatttgaaacgaaagctccattttctagcctgaaagtaatcattttgctctgtgccctgctggccttgaccatggccgcagttcccctgctgggtggcagcaagtatggcgcctcccctctctgcctgcctttgccttttggggagcccagcaccatgggctacatggtcgctctcatcttgctcaattccctttgcttcctcatgatgaccattgcctacaccaagctctactgcaatttggacaagggagacctggagaatatttgggactgctctatggtaaaacacattgccctgttgctcttcaccaactgcatcctaaactgccctgtggctttcttgtccttctcctctttaataaaccttacatttatcagtcctgaagtaattaagtttatccttctggtggtagtcccacttcctgcatgtctcaatccccttctctacatcttgttcaatcctcactttaaggaggatctggtgagcctgagaaagcaaacctacgtctggacaagatcaaaacacccaagcttgatgtcaattaactctgatgatgtcgaaaaacagtcctgtgactcaactcaagccttggtaacctttaccagctccagcatcacttatgacctgcctcccagttccgtgccatcaccagcttatccagtgactgagagctgccatctttcctctgtggcatttgtcccatgtctctaattaatatgtgaaggaaaatgttttcaaaggttgagaacctgaaaatgtgagattgagtatatcagagcagtaattaataagaagagctgaggtgaaactcggtttaaaaaccaaaaaagaatctctcagttagtaagaaaaggctgaaaacctcttgatacttgagagtgaatataagtctaaatgctgctttgtataatttgttcagctaagggatagatcgatcacactatttaagtgagcccagatcaaaaaagcagattgaaattttctttagaaaagattctccatgatttgaattgcattctctttaaactcaccaatgtaatcattttgggaggagggagaacccacttgctttccaaatgggtttatttaaacccacaaactcaagaggttgttgggggaattaggaaaataagggttttcaatgacctacattgctaggtagaggctgtgatccatgggatttcattctaatgaccatgtgaagatgtttgagtcctcctttgcctttcctcagaaagaatccttctaaggcacaaatcccttagatggataatgtaaggtattgttaactcactcatattgagatcatttttagagataccaggttttatgtatcagcactagatggttccaccctcatgggataaaactgcttacaagtattttgaaagaaaaactgaccaaaattcttaaattgttactaaggcaatcatgcacaggtgacgtatgtcttatctgatttgtttttaactccttggtgcccaaagctcagaagggaattccactgccagcaatgaacatacctggaaaagaaagtaagcaatctgggattttttttctgggttagtaaagaatttttgcaataagttttatcagttgattcaaactgatgtgcatcttaatgatcaaatgtgcacattacataaattaagtccactgatacaacttcttacacatgtatctctagtagctctggcaaacccaatatctgacaccactttggactcaagagactcagtaacgtattatcctgtttatttagcttggttttagctgtgttctctctggataacccacttgatgttaggaacattacttctctgcttattccatattaatactgtgttaggtattttaagaagcaagttattaaataagaaaagtcaaagtattaattcttaccttctattatcctatattagcttcaatacatccaaaccaaatggctgttaggtagatttatttttatataagcatgtttattttgatcagatgttttaacttggatttgaaaaaatacatttatgagatgttttataagatgtgtaaatatagaactgtatttattactatagtaaaggttcagtaacattaaggaccatgataatgataataaaccttgtacagtggcatattctttgatttatattgtgtttctctgcccattttctttaaattcattaactgtatatatgtaaatatatagtacttgtaaatagattccaaatttgcttttctattgggtaaaaaataaatttgtaataaaatgtgtgactat

SEQ ID NO: 55 - protein, 907 aa, Homo Sapiens
MDTSRLGVLLSLPVLLQLATGGSSPRSGVLLRGCPTHCHCEPDGRMLLRVDCSDLGLSELPSNLSVFTSYLDLSMNNISQLLPNPLPSLRFLEELRLAGNALTYIPKGAFTGLYSLKVLMLQNNQLRHVPTEALQNLRSLQSLRLDANHISYVPPSCFSGLHSLRHLWLDDNALTEIPVQAFRSLSALQAMTLALNKIHHIPDYAFGNLSSLVVLHLHNNRIHSLGKKCFDGLHSLETLDLNYNNLDEFPTAIRTLSNLKELGFHSNNIRSIPEKAFVGNPSLITIHFYDNPIQFVGRSAFQHLPELRTLTLNGASQITEFPDLTGTANLESLTLTGAQISSLPQTVCNQLPNLQVLDLSYNLLEDLPSFSVCQKLQKIDLRHNEIYEIKVDTFQQLLSLRSLNLAWNKIAIIHPNAFSTLPSLIKLDLSSNLLSSFPITGLHGLTHLKLTGNHALQSLISSENFPELKVIEMPYAYQCCAFGVCENAYKISNQWNKGDNSSMDDLHKKDAGMFQAQDERDLEDFLLDFEEDLKALHSVQCSPSPGPFKPCEHLLDGWLIRIGVWTIAVLALTCNALVTSTVFRSPLYISPIKLLIGVIAAVNMLTGVSSAVLAGVDAFTFGSFARHGAWWENGVGCHVIGFLSIFASESSVFLLTLAALERGFSVKYSAKFETKAPFSSLKVIILLCALLALTMAAVPLLGGSKYGASPLCLPLPFGEPSTMGYMVALILLNSLCFLMMTIAYTKLYCNLDKGDLENIWDCSMVKHIALLLFTNCILNCPVAFLSFSSLINLTFISPEVIKFILLVVVPLPACLNPLLYILFNPHFKEDLVSLRKQTYVWTRSKHPSLMSINSDDVEKQSCDSTQALVTFTSSSITYDLPPSSVPSPAYPVTESCHLSSVAFVPCL

SEQ ID NO: 56 - DNA, 40180 bp, Mus Musculus
  misc_feature (1)...(40180): n = A,T,C or G
gaacagtgcagggcggcgcgggggcgcgcacgcgcctgagcgcgcgcccggaggggcgggctgggactttcggctgccgggagcccgagttcccttccgcttccgacgcactgtccgccagccggtggatgtgcggcaacaacatgtccgctccgatgcccgccgttgtgccggccgcccggaaggccaccgccgcggtgagtggcggcgcccgggcctggggcaccagcgagacccaggccgccgcgcgtggatgcgtccgcgccgccccgcgggctctccggggtcgggcggggaatcggagccggcggggcgccgcctgcctgcctagcactctcacccccacccctgaagcaaattccgaggtccagtgctgaaacagccgacctgcagcgggagtgtctgtcctgccgcaggagctcagattaacttttgctcccggaaacttttgtgatgaaaaaaattcgactttcgtgacttgactttagagacagctgtcttttatccgactgtgtgagacctctgagtgctaaaacgaaggggtatagaaattaaatagcttgtggaatagtgttctgttgtaagtttttaggtccttcattgggttttataacttaacaaaatctgtaacagtccagtgtgtgcttattttgtcttattctcttttaggttattttccttcacggattgggagatacagggtaggtgccattgttagtacctaaggagatggggtcgtgcagctacttactggtcaaagggttgtatgctgaagaaggctgacattgtaggaacaagtattttctcaaggagatcagcttttctgcttacaaacacccacaatttcccccttatcttgagtttctcgtctttgagattgtctctggaacatgttaaaattgttaactgctctttggatgtgaattggataccagaggagtggaatgtttgcaaaggcagtgtgcagttttggagcaggttgagaaagaccggttgattctgttgagagaaatagcaataacatgaagcataagtcccagatcagagtgcagatgatcccttaaaagagaaaaatcaaagaaggtggggccacagctcaaagattaatttggtggcttatcaaacccattttgcttttgtggttctggagaagaaacttgaggtcagtgtgtgccgtgtggacacttcaccagtccctgaccggactatgcagcactaactttagcttaggattttctgttattaatccttgggttgccttctgtttaattgagtgattatctggctgaaacttgtgttgtataagattgtcaaacttttacaatgaaactggggagatggtttaatggttcagggcataggctgcacttaaccagcctgcgggttcagttccaagcacccacttagtggcttccagctcgctgtaactccagtctcaacagatctgaccccttttctgggctccacaggagtcgcatatatgtggtgtataggcatacatgcaggcaaagcatttgtacacataaaataaatataaaggttaaatttttagaacttgattttatttttttttttgtttgtttgtttgtttgttttttttttttttttggtttttcgagacagggtttctctgtgtagccctggctgtcctggaactcactttgtagaccaggctggcctcgaactcagaaatccgcctgcctctgcctcccgagtgctgggattaaaggcgtgcgccatcacgcctggcagaacttgattttaaaaaagtaaatttttataaaatagccaagacattaagtgatttttttcagtgagttattaacgcccgttgctaaatactcaggaggttgagacaggcagttttcttgaccccctagagtttgagactgatggggcaacagtgagatcttgcttatgaatgaatgaatgaatggagacattggactagactaattgtccctttcaggtactaaccatatctcactcactttcctaactttggagattatgccaggtaatatggtattaggtgatggctaggttttgttttgttttgtttttaactacatttgttttgtgtgtgtgtgtgtgtgtgtgtgtgtgtgtgtgtgtgtggacactttagaggagttcgttttctcctcccatcacatgggtccccggggattgaattcattgaattcaggtttaattgagtgattatctggctgaaacttgtgttatataagactgtcaaacttttacaatgaaactggggagatggtttaatggttcaggtattaggctgcacttaaccagcctgcaggttcagttccaagctgaaagttccttaaaccactgagccatctcaccaccccagttattatcttactttatttttattattatgatttcattgatgtatccaacggtggcacagaattaacagatatcttgcagcctccacctttgataaccttcaaattaaccttctagttctaacctgatgttcaactaagttttccttttagtgggtaatttctttttccctttctttctccctcccttgccttgacatgcacagctttgtttgtttgagattgtctgtgcttgcctgagctcactgtaaaccggcttgatcctaacttgtgatcctctgacctctgcattcccaaagctgtgtttccaggtgtttgccaccatgacgttcagtctatgggagcaagagttcttttgtgtgtgagtgcacatgtacaggtacatgtggaggctggagaataactccgagtgttgtacactgttaacctttaaaatttgtttttgtttttgaggcagggttggtcgaacattagccaggattttggctttggttttaaagctgtattgatttatattatgcattagtgcttagtctacattatgtaggtgcttgtgtgtgtgcacacacacgcacttgtgcgtgcatatacgtgcacacacatgcatgcatgctcacttgagcacctgcttcaaatactcacatgtatttatgttgctttcataagccaaagagggcatctgattcgagttgtggacatttgtcagccaatgtgtgtgtgcttccaacccaggttctgtgaaagaacaagaaccacaagtgctcctaaccactgagccatcagtccagcccctgtgttggtgttttctccttctccttctccttctccttctccttctccttctccttctccttctccttctccttctccttctccttctccttctccttctccttctccttctccttctccttctccttctccttctccttctccttctccttctccttctccttctccttctccttctccttctccttctcctcctnnnnnnnnnnnnnnnnnnnnnnnnnnnnnnnnnnnnnnnnnnnnnnnnnnnnnnnnnnnnnnnnnnnnnnnnnnnnnnnnnnnnnnnnnnnnnnnnnnnnnnnnnnnnnnnnnnnnnnnnnnnnnnnnnnnnnnnnnnnnnnnnnnnnnnnnnnnnnnnnnnnnnnnnnnnnnnnnnnnnnnnnnnnnnnnnnnnnnnnnnnnnnnnnnnnnnnnnnnnnnnnnnnnnnnnnnnnnnnnnnnnnnnnnnnnnnnnnnnnnnnnnnnnnnnnnnnnnnnnnnnnnnnnnnnnnnnnnnnnnnnnnnnnnnnnnnnnnnnnnnnnnnnnnnnnnnnnnnnnnnnnnnnnnnnnnnnnnnnnnnnnnnnnnnnnnnnnnnnnnnnnnnnnnnnnnnnnnnnnnnnnnnnnnnnnnnnnnnnnnnnnnnnnnnnnnnnnnnnnnnnnnnnnnnnnnnnnnnnnnnnnnnnnnnnnnnnnnnnnnnnnnnnnnnnnnnnnnnnnnnnnnnnnnnnnnnnnnnnnnnnnnnnnnnnnnnnnnnnnnnnnnnnnnnnnnnnnnnnnnnnnnnnnnnnnnnnnnnnnnnnnnnnnnnnnnnnnnnnnnnnnnnnnnnnnnnnnnnnnnnnnnnnnnnnnnnnnnnnnnnnnnnnnnnnnnnnnnnnnnnnnnnnnnnnnnnnnnnnnnnnnnnnnnnnnnagagagagagagagagagagagagagagtcctttgctccccaggaactcctagggtagagaaggagaaccttccttcaacatcaagagatttgcctcatagagagctggaattgaagccttgttcccccatgcccgccaactaaaaggattttaaatggcagaacttccctgggaaggtgctttttgttttgttttgtcttgtttatttattttgttcaccgcttggttttgtagaccaaacaaggcaaaacaagaacaaaactttagtacaagtaggtcctctgcagatttagtgtggccagattcttcaaactaaagagtgaaaacatgaagaagaaaaaatcagtttcgaaatggtagaggctcctgggataagagataagttgttgttttcatgttccagttgcttatataaaaactcagaagtacccagatatgaaaataccacacaaactacgagtaaagaagtggtgacatggttaatttcatgaatatatagtggaactcagagctaatggtctaacaggtagcaatttagtgtttaaaatcttttttttcttcttctttgagacagggtttctctgtatagccctggctgtcctggaagtcactttgtagagccattaaaggcgtgtgccaccaccatccggcaccaccgcctggtttaaaatctttaacccaagtcatcttgcatgtttatatttatgatgtgcattaaattaaagtgaaatggaggatatgatgttctgtattgcacgaaatcagttttccttctaatgtaaaaatagcttttgtgatttgaaaatgttaaaattgaatggcaaaaaattcagaatatgtttaaaaagggagtaaaatttgttgaaatttcacaacccagatattttctatttttatagcatttaaaaacttgaaatatttctagagttgttaaattttcaagaataatgcagattcctgaattactttgtctatatttcgtaatctcttcctttactgacatacatatgcttgccatacctgtgagggtgagttgcaaatatgatagtgacagttatatgtctcatatgccatatgactcttacaacgtataagctgagtgctttttctgtataagtacatcttctataaccatggaacgattaaccgattcagggcatgtaatattatcaaatgcagcatgaccacagattttgccagttcccctcaccaatgtagtgcaattcattgtcacgcctgtttttagttgccacatctgagtctatgtgacagaatgtttctgtttttgaagagtgccgttgtcctgtaagtcgttttgttttgttgatttttgttgttgttgtttgtttttttgtctttttttttttgacatagagtcttgccctggctgtcctggatctcactttgtagaccagtgtggccttggactcacagagatccgcttgcctctacttcccaagtgatgaaattaaaggtgtgggccactgtgtctggccctgtcccattattcttcgcaggtcacttgccaaggtggtctttttcacgtttccttactgcatttattttttctttttaattagaaagcaagtcatggccttgggtggagatgcacgattgcaggattgtactgcattctgcattggtagcagcttgggttatccacgggactccattaaagtacaacagaagagctggggatctgtgtgatggcacgtgagaagactttaagaccacgaggtggttcttcaagactctcaccaagtatttttagcagttagttaaatagttagcagttagactaatttagaacatatgacataatgagtttgaagaatttgaggtcagcctagcctatgtgagatttatcacaaagaacaaaaaaattagagaaaaagggaaaagctagccaggcctgataaaataacacacaacttgaatcccaggattggaaggtagagacagtggatctctgattggggccagcctggtttacgaagtgagttcagagactatacagagaaactgcgaaaccatgtctaatcaagagaaagaggctgctgccgtgctgcctcattagtcctttatacttaagtgtgttttttaaaaattgagcagcatccttttgctttgagacttggttctttccctctaccgtgtgagcccagggtcaagctcagctcatcaggcttggtggcctgaggtggtctgaggtatcttgctggtcagcattcccactcactaataacatagccgtcaattctgtctgatgtcaccatctcagctctcagctccattcctgcttctgtcagttcgtctgtgaagtccaggactatagcttacactgatacgtctccccaggctttatcttgtctcttgtgagcttggagagatggctcagtggttaagagcaccgactgctctgccagaagtcctgagttcaaaacctagcaaccacatggtggctcgcaaccatctgtaatgggatctgatgccctcttttggtgtctgaagacagctacagtgtactcacatacataaaataaataaataagtctttttttaaaaaaaaaaaaaaaagaataccgagtaatttgtcgactgcccctctggtggttgtttgcctttgacagtttcaggctggcctcagtttatcagatgattaactggtgctgtttgtctcaggtacatatgatttctatccttgttcctgtaccagtgatactatattttaccagttggttaagatgatgcctagcagccaggcgtggtggcgcacacacagcacttgggaggcagaggcaggcagatttctgagttcgaggccagcctggtctacagagtgagttccaggacagccagggctatacagagaaaccctgtctcgaaaaaaaaaaagatgatggatgcctagtgattatgagtaaattgaatttaaatttaaaatgttaaatgctgccgggcgtgttagtgcacacctttaatcccagcacttgggaggcagagacaggtgaatttctgagtttgtgccagcctggtctacagagtgagatccaggacagctggggctacacagaaaaaccctgtctcacaaaaaaaaaaaaaaaaaaaaaaaaagttaagtgcttaccttatttaatgttttaaatatttaaaagtattttgtaagaaggtatttggcattagaagataatattttcctcagcacatttttaatttatgggtttagcactaaccgtcccctaaggttatctataccactttcctctggccccttggtttctcagttttgcttcttttggtatagttgcagagtagtctctggccattccacaggtctagctttatgtccactctcaagagtccaacctatgttaagtccttttgcctttggccagcgggcaagactttggatgtgttgagaggttagatgggattagggatatttcgtgcgttgatctgggcagaatcactgttgttatgaccgaatagggaatacaatcaaagtatgctttactttgtagtctcttctaaaagataagcagatgggagtgaatgtgtaggatttattctttcccctaggtgatgatgtcatagttcactctagcacgtagaggctgaagcaggaggtttggaagttccattccagcctaggctatacaaagctgaaaacagccagaccagaacagctctggcagaaccctttcttaagttttatattatctttagtttatgtgtagaaatttttttccctcatgcgtgtgtgtgtgtgtgtgtgtgtgtgtgtgtaccatgtatgtgcctattggatcccctagaaccgagattacaatgttggtgctgggtatctaatgtggtcttctgaaagagcagaaatactcttaaccattgagtcatatctccagactggccagaccattccaaacaaaagcaaattccaaatcaagcaatgccctagaaacttgcattatataggtttattaggcattttctttctctctccctcctccatcctcccccaacatttattcatttggggatgcttgtctgtgcatggaggtcatagaacaactctaatcaggttttgaatattggtttgtggttaatattggtttgttcttaaagcctctaaggcttttttttttttttttggtttttcaagacagggtttctctgtatagccctggctgtcctggaactcactttgtagaccaggctggcctcgaactcagaaatccgcctggctctgcctcccaagtgctgggattaaaggcgtgcgccaccacgcccggctcctctaaggcttttatatctatgaaaaataatgatacaaatagatgtagacaaggctggccctgaaactcagatatcccctgcctctgcctctgaagtgctaggattaaaggcactcaggaggcagaagcaggtggaccttagggagtttaagactagccaggtctatagaaccaggtgcaggatagccagagctacacagagaaactttcttgaaaaactcagaaaagacaaagaaaaggagtgctgagattaaaggcatgtaccactacagcccagctccttttgctattcttatgttcagaatttttattattttgtgactgggacagagattgggaaataatgacctaaatttaattgtggcttactgtttattgttgttttgtttttgttttttgtttttgcatttgttttttgttttggggtttttgtttgtttttgttttgttttgttttgttttttgtatttttttttttttttgagacagggtttctctctgtagctctagctgtcctggaactcactctgtagaccaggctggccttgaactcagaaatacacctgcctctgcctcccaagtgctgggattaaaggcatgcgtctccactgcccggctgcttgttgttaattgagatataagccatataatataaaattctcatctttaaaatatgggattgggtgaatagaaaccctgactaagacaaattggtaccagcatagtggggtattcctgtgacaacctgaccaggttttggggaggactgtggaaggactttggaactttgggccagaagatacattctgtgttaagagctctgtcgaatgttgtgtaggagcttggaagataatgttgagaacagtgcagaagatggaggcctggcttgtgaaatttcagagggaaaattaaagacttttttcagggccactgctagtctcattgtgaagattctgtggttctggttagctggggctgaagaatcagctgtgattaacaagataccagaactactatggtgaaacctttgcattactgggactattgatgctgcttagctggagctaagaaattagcggtgattaagaagagaccagcatcattgaggtgacatcttctgggaagtgttttttgagagcacagcggctgtgttcctgagataaccaaggttgtacctcgtgctacagtgggacttggtaatgtgtaagagtcacccaggtggtactggttttgaaggcatgaaggggccacgcagagcagctgagggtcagcactgtgagaggccatagaaggccattggtgaaggtgcagcttcagttgcaattgatgacccgggacccatgaccccatgaaggggtcatgcaaaggatttgaagcttagcaccatgaagagagcctatgggaggctattgttaaagccaagttacagtggaagacggcagcattttggagatgccagtaccatgagatgaccaccaagaacagcagcagcagtggagtacaggcagctagagcctagaagacaagctgtgtgctacaaaggacagggctggagaagtgacccaagtctttggaggagcccagaagatcgtgagttggatcccagacattggacagttggagtttaatttttgcttttgattgtgactgtgccctgatatttttccctcttgaaggtagaaactattttagtggaacccacagttcagagacttttaattgtaaaaagactttgggttttaaaagagatagatattttaaagagattgaaattttaagaatatgtaaagactgtgggacttttaaagttatttagatcttggggatgaataagaatgtaagggttgaggcatactagttgacaaggggtcaattgtactggctggttgtgtgtcaacttgacacagctggagttattacagagaaaggagcttcagttgagtaaatgcctccaagagatccaactgtaaggcattttctcaattagtgatcaagggggaaaggccccttgtgggtggtgccatctctgggctggtaatcttggttctataagagagcaggctgagcaagccaggggaggcaagccagtaaagagcatccctccatggcttctgcatcagctcctgcttcctgacctgcttgagttccagtcctgacttccttggtgatgaagagcagtgtggaagtataagctgaataaaccctttcctccccaacttgcttcttggtcatgatgtgtgtgcaggaatagaaaccccgactaagacaggtgatttttagtttgtttgcaaagtaggttgcaaaaatcatcatctccttagttgcagagtattttcagcatcccacaaaagacagtctcttcactcctctctcaagcatttcttagtcgttcattttctttggatttgattattctgaatgtttcatataaatagaacccactcgtatggtctttggcgtcgggcttctttcatttggcatgtttttcaggatcatttgtgtttgacatagaaaaatattgcatttgcctttgtgggtggcatgcatacactccagtgttaagatactcatgcccatgtgggaccagaacaggacactgtgtcctcctctattgcactccatcctactgacttaagaaaggttctctcactgtactagaagctcacagtcttccctaggcggagtggtaagctcttggaatctgtctccatcttccaaggttaggactatagtcgtgtgcagccattgtgtgctttctacatgggtgctgggattcaaattcaggtcttcatactgcagaacaagtgtgttatgccctgaaccatccttgcaatcctgagtactgtactcttttattaccaaatagtccattgcatggctatgcaattctagaactaatgactatttgggttatttctacctttgggcctctatgaatggtgttactctgaacacgcatgtacaggcttttgcatggacataggtgtttagttctctgtgttgttggctgggatagaagtgatgagtcagtattctaccctttgaagaactcccaaggtattgtcacagggattgtgccattttacattttttagggggaagggattacacatatgtgcatggagaccagagtacaacctcttgcatcattccttggaacccaccgaactttgtttttctgaatcagggtttctcattggcctgcctggagcttaccaagtaggctaaaattggctagatagtgagaccccggatcctacctttctttaccttgagtgtactggaatactcaactctttttatttttaatgtgtattctggggatttaactcgggttttcatgcttagaaggcaaggtgttttttttttgtttgtttgtttgtttgtttgttttgttttttaattttggtttttccagacagggtttctctgtgtagccctggctgtcctggaactcactctgtagcacaagctggccttgaattcacaaatccgcctccgcctcctgaatgctgggattaaaggcgtgtgccaccacacctggcttgaaggcaagcattttaattaccagaactgtctccacacacccaggtttgcattcagcagtgagatggttctgatttctcttcgttctcattgacacttgttattctttcctcccactcttcctccgtctccattccgcctgctttgtgtggtgctggagttcacagggtgtcatgcagactacaaaagcaacctgctaatcatgctatagtcctggtctcagtactccattttttttattcatcattgaatataaataaatatacaagccacagaaagccttaagaagtataaaagccttcaccatagaccatttgatatgaaaaaaagattttatatattaaaaagcattgtaaacctaacatgtttttggtctgaatcttatttttctagttgccatacatttaagtcactacttctcaatcaaatatgattacagggaggtgaggctggctagcattttagttaatcacattaacaagctttattatatatgatgattttccccttacgagactgtctgctagctctctaaaatgactttaattcactgtggaggtagaccttaaggtcagcaatcctcttgtcctagccatccgattgctggccttctcatcacgtgtgtgtgaccagccaggcttgcagtaatactctgagcaagataattgaacctgtgttccacttggactcttaataattggtggacaattgttttacaaatgtggtttttggtgactgtccgttcccagagctctaattagctgaaatcttctcatggttttatggcttatttagttatccccgaggtcattagcacaaatcccaaaacagaatacattaatgagtttagaaagaaatggaaacagcattggcagtgagcaaggaatgaactatttctaatgtggctgggatgttggcttttacaggtgtgtgtgtgtgtgtgtggtttaagttttatgtatttaattacaatgtttatttttttgatttttgtttttaaaacaacctgtagccctggttggctgtaactcagtaacctctgacttaagctgagtgcttgagagtacccagaaggttttgtattttattttgttttagatttattttatgtgtatgagtgttttatcaaagtatatgtgcatacctagtgcctgtagagaacagaagagcgtgtccagttcttttgaactaaagttaaggacagttttgagccaccatgtcagtactaggaacaaaaccaagacttctgtaaaagcaagcaagtactgtctctccatccctacattatgtattttaaatgcttttttggtcacatggcttaaaaggcctctctgtgtactgctcagaggcaaggattgccttgattgcttgataatttctggtttggtctggtgatctagaagtgcaggcatatatcaacactgtagaaagtgtcttactgtgtgcattgtgacacatgcctgtgtaaaacagtactcagaaagctgaggaaggcagatggccatgagtttgaggccaagttgagctacttacagaatactaagctatccagttacgaagtgagaccctgcctcagcatacaaatagcaaccacagttttatagccatcctagtggaatctcactgtgtgtttgcatatgtgggggttttgagacagcgtctaactgggcaggcagcacaggctacccttgaactcaatctccaactgcctcagtctcctggaatgataactgtgtgtactatcaggcctgaagttgattttgatttgtatttttttttaatgactaatgatgatgagttcttatgtttagtgacaatttggatgtttttctttgtagaatgtcctctgcccatttgtaaattgggtggtcaatttgtttgttataggtgttatgcatatattatgagtggctactgtcttctaagggttgcattgctgtgaagaaacaccaaaaccaacacaatttttagaaaggaaaacatttaattggggctggcttagtttcagaagtgtagtccattatcatcctggctggaagcatggcagtttgcaggcagacatggtgctagagaagctgagaatcttcatcttgatctaaaggcaaccaggaggaaatttgattccacactcagtggagcttaaggacaggcaatctcacagcctgcctacagtgatacacttcctccaacaaggccatatctctagtagtgctattccctgtagaccaagtgaatcgatgggggccaaacatattcaaaccaccacaggtactattaaatatatgacttgcacacactttattcttctttagattgttatactttcttcatagtctccttgaagcacaagttttaaattttgttgatttttagtttattttttatagccatttgctaagttctagatttgtttgctatatttaataatttaatagtttaatttgacccaactacagttgtttaaaagacttttttgaagaggcttatggtaattattaattgatagcagggtggttgtttatttctggattcctagttgatttataggtctatcctttccctggtcttacattcgttcttactattatatttgttgtaactttatgttagtcctcctactttgtccttttgcgtgtttgtttgtttttttctggttctcttgttcccctgtgaatttaagaattgggatcaatttctgcacgatcatctgggactctggttaaggtgctgtttcctgtggattgagttagggagtcctgccacttaaacacaaggtcgagtctataagcatgggcatttgattccatttctctagctctttgtttaaacatgttcaatagttttccaagtaaatcttaacacatgcacacacacacatttactttttaatcattcatcaggcagtgggacctgggagaatggagccaataagtggaatgaactagaatctcatgcaacagtcaactttattcagagcatcagataagttatactctgaaggctaagaagagtcacatgagtaaaatatgcaatcacaaagacaagcaacacgtggcagacaaaccaaacatggcagactatgttcttccttagaggcatataaacaaataacaataaccagttgtagtgagtaatcggaagaaaactgattcctgtcctctccacctgggaggatcgtggaagcgcattactagaacaactccatgttataggtgtgtgggtatattgtacatgcctataattccaacacttggaaagctaaagcagacagttatagtaagaatgaggccagccttagaaacctagtaagattaacaacagaaatgggttgtttctgggtagaaggactgtgagatttggggggggggggatttttgtcttctattttaaacatctgcttatatgtttaaaatgtttattctttgacaccttcatacagtttatttttatcatatgtctcttccctttcccccaactcctcccagatgtcctcttctctaacccatccaacttcatggtcttaagtaaaataaaaaaaatacagggtccaatttgtgttggccaactattcctgaacacgggatctgctagagtgtggttcacatactcagtgtcattggttaaggagaactggtttttcccccagcagctatcagttgtgaatagcttcttggctaggagtgggacttggtgcctccttgctctcctctgtgctagaattgtgtctgacttgaactatcagtctctgggctctatgtgcatctgtcctgttgtgtcttgaaatgctgtttccttaaagtcattcattacctctggctcttacagtcgtccatctcctcttctctataaatccctgagctttgaggtgggaggggtttgataaaagatattccaatccaggctaagcactcaaaagtatttcactttgcatagtgtcaagttgtggttatttgtagtaattaccttctagaggaagaaggtggttttctttttcttttttttttttggtttttcgagacagggtttctctgtatagccctggctgtcctggaactcactttgtagaccaggctggcctcgaactcagaaatccgcctgcctctgcctcctgagtgctgggattaaaggtgtgcgccaccatgcccggcttgaaggtggttttctgatggtgattgagcaatacactgaattaggaacatagcaatgtggaggtttgaatgagaatgcctctcacagagtcatatattttaatgtttgttccatttggaatatttaggaaagattaggaggttttgactttttaaatgcccatgttaggtcccgtttgtccatttgtctggtcttgtctgtctctcctccgtgtctgtctgtctgtctgtctgtctgtgtatgtgtggattagatgtaagctctcagtttctgccctagtgccatgcctacctgcctgctgcctgattccctgccataattgtcatagactttaactctctggaacctcgagtccccaattaagaagtatataattgggggctggagagatggctcagcgtttaagagcactgactgctcttccagaggtcctgcgttcaattctcagcagcctcatggtggctcacaaccatctgtaatgagatcagatgccctcttttggtgtgtctgaataataaatttttaaaaaaagtatataatttgcttttttatgttacaggctgttagaattaagaaagtatcttgagtttcaaaagaaattggaattgggactttggatttttaaacactgtagaaactaaaggattatggagatgtgaagttggactgaatgcattttgcattatgatatgttttcaagcctatgtggatcagagagtagaatgtagtcctttgaatgagattgtcactcccccctcccccccatatattggaatgttttggtttcaactgtttaggaaggattatgaagtatatcactgagggtgggctttgaggtttcaaaagcctatgccaggtctagttccagtctgtgtgcctcctgcttgtggtcagatgtaacctctcagctaccatgtctctcagctctcagtgccatgcctgctgccacactccccgacatgtctctgaaaatacaagcaaaccccccagttaaatgccttttaatgtgttaccttgttcatggtatcttcacagcaacagaactataacaaagcaaacagtatgccattaggagtatttttttaaaccatatggcggtatggatttattaattggtcccacttaatcattccacattgtaaataaacatcaaatactacacagtactccataaagatatacagtcaatagacaattaaaagaactaaaattgacctaatccggagacaaatgtgttgtagtgatatttgaatttattgtaaacaaaacatataattcttctctaaagttagtagcatattaatataaggtaaaaataagattcctaatttcttttttttcctcaattttttattagatattatcttcatttacatttcaaatactattctgaaattctcctataccctccccctgccctgctcccctacccacccactccctggcgttcccctgtactggggcatataaagtttgcgagaccaaggggcctctcttcccaatgatggccaactaggccatcttctgctacatatgcagctagagacacgagctctgggggtaactggttagttcatattgttgttccaggagttgttttattaaggtattaatttactagactaacgagtttttacccaaagcctcatttacagtatcagttatgggttctattttttggagtagaccttaaatccaaattttaaaaaagtggttggttacccctaacattcatgacattattataccagtgagtagtcaggttgctattattgataggagagttcatagctgggtgagattgatgatttaccttttttctctagtatggtgtatagagccttctatcactatgaccattaaccactaggagggaaacttccaactgggcaccagctcgatttcgccatgtttgatgctataagtatgctgtgtcttcaacaatagggtcttacccggttgtagagactatccaatagcactgccaatgacctttaatgtttgagagtggggcggggcagcctatcggactgacccctttggccaacaactcaaattaagaagatgtgacccatttctgttactggaggtttcctttggtagcatataatgactagttgtggtattcgttcccctccattatatggtgaatcactttaaattccttttatatatgtactgttttaggaagcattccaatagcagcaggtcttcatctggctttcaaaagctgttcgtgttagttgtcccactacatagtccctctaccctgcctcacttaatactcctgctctaatttccttttacccctttataactctgtattttatatccccttccttggaagacctccaccccgaccgcttggtattctaaatgacgtacacatatctgaaacataaaagcaaacatccccatgtaaaagaaaactggcgatatgtgcctttctgggtctcagttacctcctgcaggttgattgtttccagatctatccatttaccggaaagtcctacgataacatgtttttatcagctgaattgtgtagtgtaccattgtataaatgtaccacgttttcctttaaattcatttgttgatggccatccaggttgcttcctgtttctggctattagaatagagtgaatatggacaagcagatgtctttggagaaggatgtaaagtcctttgggtatgtgccaagaatggtatagctggatcttgacatagattcagcttctttttttttttttttggttttccgaggcagggtttctctgtgtagccctggctgtcctggtactcactctgtagaccaggctggcctggaactcagaaatccacctgcctctgcctcccgagtgctgggattaaaggcgtgcgccaccacgcccgacatagattcagcttcttgaggcactcccactcacagaaagtgtttccttccctacatcctcaccaacatatactgtcctttgctttcttattaatcttggacattctgagttaggctaagatgaaatctgaaaatctatcttttcctgattgctaagaatgtcaaacatttctttaaatgattctcaatcattaatattttatcttttgttatacagtcttatatcccatttaaatgaggttattatttccttgatgttccagtattgtggaatttcgttttcgcttcttttatattctcattactaccccctctttcagatgtatgattgataaagttttttttcccctattctgttggttgtctctttgtttaaatgatggtgtcctttgttgtactttttattttcatgaggtctcatttattgttagtttgaaagtcctatcctgtgctaatgagtttctctttttttctttgaaacttctttttattattagatattttcttcatttacatttcaaatgctatcccaaaagtctcctataccctcccctccgccctgctccccaacctactcactcctgcttcctggccctggcattcccctgtactggaccaagggcctctcctcccactgatgactgattaggccatcttctgctacatatgcagctagagacacagctctggggtactgtttagttcatattgttgatcctcttatagggttgcaagccacttcagctccttgggtactttttctagctcctccactggaggccctgtgttccatccaatagatgactgtgagctaatgagtttcatattttctctttcattaattcaagatatcaagtcttaggttaatatccttgatccacctggagttaaattttgtgtagagtgagacatgaggcttgagtttcattcttctgtatgtagctatccagtcatttgtagagatgtgtattgttggcctgtcagaatcaggttgctgaaggagttcgggcttttatctgatttttccattatcttctatttatcagtgtgtctgtttttatgtcaatgccatgtggttattactaaagctctagagaaggcagggatgatgatacttccagcagtgttttagctatcacaggtcatgtttatttccatataagttttgagttattttcaactcctgtgaataattgtgttgggattttgatgggaattgcatttaatttggaggttgcttttgataggatgtctatttcattgttttaatcctaccgactcatgagcttgggggattattttatcttctattgtcttccatttctttattaccttaaagtttttattatacagatcttccatttgtttggctctaagacatttatatctgtatttgttttagaataactatattttgaatatatacttttaaaaatatatattagaacatttatatgtgtatatatgtgtatgtatgtactatgtatgtaagtctgtatgtatataatctgagactgttgtgaaaagtattgtttctctttttcctcaatgtcatttgtatataggcaggctatagattttagtgttaattttgtattctgttacattgctaaaagtttaccagctctagaattttcctgatgattttaaaggtcttttatgtatcaagccgtatgatctaacagcagtgactgttgacagaactcaggcgagagcatctttctctctttaggcagacattagaaaatgacccttgcttccaggtctgcaatgcgctcactagcacactctccttatgctcgggtactaggtggagctaacatctgttcttatagaagttttaagtactgttctataccagtttactagagtgtaaaacagtagttaatagcatgcttttcatacttttctaccaggcatggatgggcagaagcctttgcaggtatcaaaagtccccacatcaaatacatctgtccacatgcgtgagtatttctaatatttagcttttttttcttcagaacctataacaaaattgtgatagctttgcttttccagaaaaatacttgaatataattgtttcccttttaaataaaagaagactaatagcattccttaaaactaaaatcttctcttggttaaactggggtggagggaagattgctattttgaaatttaagatattcttctagggcttgtgagatggctcagtgggtaagatcactgactgctcttccaaaggtcctgagttcaaatcccagcaaccacatggtggctcataaccacccataatgagatctgatgccctcttctggcgaatctgaagaaagttagtatacttatgtataataataaataaatctttaaaaaaaaattccctgggcgtggtggcacacacctttaatcccagcactcgggaggcagaggcaggtggatttctgagttcgaggccagcctggtctacagagtgagttccaggacagccagagctacacaaagaaacactgtcttgaaaaaccaaaaaaaaaattcttctagagctcaagagaacttaaagccagaacaattcttttagatatgtaagtgcctatgaagctccaatctttattaaattgaagacactcagcttttattagaggcagtgtgatatgctgttgtagatacggttgtagaacctggttcagaaaaatgtttgctggttcagtaagaagctagcaagttttaagcaaactcagaaaatcaattggctttgctaacttgaggtgaaaggttactaagtgaagccatgggggacgttagaggcgctggagcagtgccagtgggctagtgcttacgcctcagaaatggcagcaggacgactgagaagagtatcaaagaggagtgaacctgagggttccttgtcctgcagcagagggtctaattacctctgtaggctgcagctgagtgctttggctagcgtggcgtggccagcccaaacaagagacagaattcttcactatatttgcccctaaattgaattactctaagactgtttcctaacctggggaagtttatgttttcatagaatgttgaatgggtttgttgtatgaatcaggatgatagtggctctggtaattaagagtatattcacattcctttctcctttcctcttgtaccaggcttttttgattactcagcctgtttttcattacagacttgagttgaacataatggacacttgggtagaacttatatttatctataggtctcttaatcaagcaggcatataactaaggaataagcaaaatgtgattcaggcatatgggagttaatggaacagtagctaggcaataaaatgttcttagcagagtctcaattgtttgtgtatttctaatggtctcagttcttagaaattacaggtataaagtaaggccgttgagacagaaagtatttgttatgagccaagtttagtccttggccacagctgctctgctttcagaaagcagtggctggacaaagagaacagagctgggaaggtggatgtgtgaactgcagtccatgttaaagtcgtagtgtgaaacgtggctgttactctcatgtgctctttgtttcttttccacctagccctgtgatgccagtcacattaaatatgaatatggctatgccttcttggtaagtaagagtttacttcctcattaatgaccttgtagcctttgcaggaggctttttattttttattttttctccataagttgcaggtcatgatcctgtgctgctcttcaggggctgctgtatcccttaagaggctagactaggcctttgtgtccttctctgggtagcatgatgtacatgagttagaacttgacacagtctggcctctcccctcatggactcagtcattcagggacaggaccaaatagaggcaaagaagatacacacaggcatagcatgtaacagttacaatggaatcactggtctaaagaagctttttttaaaaaaaaaaattcttctatgcactatatagccaacagtgccttttttttttaaagatttgcctgtttattttatgtatatgagtacactgtagctgtcttcagacacactagaagaggacactagatcccattacagatggttgtgagccaccatgtggtggctgggaattgaactcaagacctctagaaaagtaatctgtgctcttaactgctgagctatctctctggcccctgtgcatccttttttaagatatgcttaaactacaagagagcatttaagcgtaacctttattccaatattcatactttatatttgtgagttaagagaacggtagaaaagccattttctgggagtaatgaagagaaatctaccccactatttggtgtttgttgggttcatttatcgaacatttgattcatgagatgcacactgattacgccgcagcctctttattctgccaactcttgtcttcctggctggctggttggatgttaaggccattcattgccttgtcattctctcaaggtgcctctcatgcccttcacagccagaaagtacagttagtgagggtccctctgtgctacttgtgggtttctttccactgccgagactctggatttgtcaaacactactgttttgatcttggcactttgatattcggtccagctcctgctgttctgtcctttgcgcacgtttacagccttgactgggttgtttgccctttgctgcttccccaggagtacttttccttctctcagatttcattatgcagtcatttctttagtgttgtcaagtgggactgttccaattctgacatatttaattcagctctgacaagtaagcgtagtagttgggctggtttggcactgtgaattgtgagacttcaccagcccatgtcttcttctccactctgcttttcctactcactctgcactcttcagctaggctggtttgtttctttaattccttgacagccttatgagtccctactccccttgactttggattctttcagctactctatctgaaaagatttccatctgtgaactaaaggttgtatcatggttgctggagactgtcatgtcagcagaaaagcacaaagggccaaaggatggcttccctgacttctgatttgaggtggtgctataatgaaaagtttgggagaatatggatagaggtcattacaagtagctcttaatagtacatgcaagagtgatgtgattcacataagtgtcctgttgcattgacctacatagaaggaaatggctaacatttactacagacttcttagccttgttagctgaagtccttacttgagtgtaagattggattaagcactttctaggttgttatgatgttgcaagtgtggaacactgactttttaacatgagagccagtgtcttagtgtaaaaggaacatagaggatgtcagctacacatgtttcagttaattgtagccagtacattttaaactgagcctcatttctccagaaagttctactgtttgtgatttctctataaactaccttgatgtcagtaaacatatgtgccaggtttggccttttagaatcaaatcgttcttttctttggccttcttttttgtgtgcatgtgttttctaaaataataattgtaatgattatttgggaatttcacactgtgcttgtattctaggtttgatatcgttggactttcaccagattcccaggaagatgaatctggaattaaacaggcagcagaaaccggtgagtaccaaaagcatttataaaggcaaaaatattcataactattttagtaggttcagtaattaaattttgattaaatgcttaagtgtgacctagttaagtgttttcagaagctaatccctctgtctctttcctttacttcctgcctttcccttcttcccttcgccatactggggactaacctaggagctcacaaatactatacaagcattctaccattgagtcctatccccgcccacggtctctgttctcattactctctcctttgccaccacatctactgtctctctccctccctcccctctccctgcccctccctctccctctccttctccctctctggtttttctatgtagccctggctgtcatgaaactcattttgctgcccttggcactcagaagtccacctgactctgcctcctgagtaccgggattaaaggcatgcaccaccatcacaggcttcatatactttctttatgtgccaccaccactaagtcttcatattcttttgtttgagctctgttgtgtagagactttgttttgatcaacttaaacaaagctgagcatgttggtgcccatctataatcccaattagtgggacactgagacaagaggattataagagatagcctagattgcacagcaaactctgtctcaaaaacatggagaaaatagtactttgtttaatagttgtatgtagtcattaaagagacttgaagtaatgatgacataagaatgtaataatatgctgggcagtggtggcgcacgcctttaatcccagcacttgggaggcagagggagtggatttctgagttcgaggccagcctggtctacagagtgagttccaggacagccaggagaaacagaaagagaaaccctgtctcgaaaaacaaaacaaaatgaaagaatgtaataatataaagataacaataaagtgacactaatggttattagtgaaggagtgatagcgctgattagtcacgtagctagccatttcctataacctggctcatttaacactctgtgacgtttgtactcgtctcctttataagcattgttttgtgggtgagagatgtagttcttaagaactgcccagcagctgggcgtggtggcgcacgcctttaatcccagcacttgggaggcagaggcaggtggatttctgagttcgaggccagcctggtctacaaagtgagttccaggacagccagagctataaagagaaaagctgtctcgaaaaaccaaaaaaaaaaaaaaaaaaaaaagaaagaactgcccagcagcagccttttcttttatttagatgcatgtgggagttagagcatccttggtttttcatacagtgccgtgacctgaaatgacttagaatatatgctggcttctgtttgtgggccacattagaaaccaacctagctgagaattggtaaccacagaatcttggagctatgtatatgagctgctttttctacttttatatttatttgaagttttccaaactagattaaatcaaaacccagaaaaatccttttattcctttttaaaaaaaatctttaaaatatgaaatagagaacataacattcaaaaccccttaatgcggctgtgaaagcatggccactgaagtgttagattcaaaaccccttaatgcggctgtgaaagcatggccactgaagtgctagattcaaaacctcttaatgcggctgtgaaagcatggccactgaagtgttagattgtcagaatgaatcttaaagctagagtcctagagcgagccaagcttttgtgctagaggtttagtggtggagcctgtggaagatgaaagaagtgtcctggttaggtaagtgattctcttataacaacagaggctgtcctggttaggtaagccctgcttaactgagtcttagaacaatagagttggttatgcttttcctgtcaaatattaaaggagaatgaaggttaaagcctcagctaggaagaggagggcagagagacttcactattgagtaaggaacagtcacaagttgccttctgaaaggacatcatgctatgctcttaagtagatggtgactgaatttggaagccactgctcttcaagtgggtgcttttattgtgtagtttgtttaaaaaaaaaatcttatttcaccaggcatggtggcgcacgcctatgatcccaccactttggaggcagaggcaggtggatttctgagtttgaggccagcctggtctacagagtgagttccaggacagccagagctacacagaaaaaccctgtctcaaaaaaccaaaaaaaaaacaaatcttatctcatcgagactataccgtcagctaagtagtctcaggttcctggctagccggagttaccactgctcaagcccactgctgcctcctgcacctgacagctgggctgtctctgccccccccatctgtctctagttcacctgacagctgggctgtctctgccccccatctgtctctggttcacctgacagctgggctgtctctgcccccccatctgtctctagttcacctgacagctgggctgtctctgcccccccccatctgtctctagttcacctgacagctgggctgtctctgcccccccatctgtctctagttcacctgacagctgggctgtctctgccccccccatctgtctctagttcacctgacagctgggctgtctctgccccccatctgtctctcgttcacctgacagctgggctgtctctgcccccccatctgtctctagttcacctgacagctgggctgtctctgcccccccatctgtctctagttcacctgacagctgggctgtctctgcccccccatctgtctctagttcacctgacagctgggctgtctctgcccccccatctgtctctgttctctcacttcctgatggaaacccgttgtctcatgctgctcatactgctgaactgccttttctttttcatataaactttaagaagtaactttttgcttttgttttgttttgagactgggtctctctgtaacatggctcctctggaacttactctgtagaccagactggcctcaagctcacggagatccgcctacccctgcctcccagggctgggattaaagacatgagccattacattaagcttacatttcttttcttttctttcttttgtttttggtttttagagacagggtttctctgtgtagccctggctgtcctggaactcactctgtagaccaggctagcctcaaactcagaaatccacctgcctctacctcccaagtgctgggattaaaggcgtgtgccaccacacccagcttaaatttctttatagcctaaaaataactttaactttggggatagctctctacaactgctattctaaaaaatctgaaaccctctactggactgcatgggcaccagacacatacagggtacacatagaatttcaaatattcattaaatatttactatttctatttcaacagaattctaataatttgacttataggaaaaagtaatgtggtttttataaacatgactaatggttttagatactataaagtcatgttacataacccttaaatgtatactattttaaaataacaagttttacctaatttccatttagtttactgaaggaagtaatataaatgtgcacgagaattaaccataaataacaagacatatctctctctgggaggaaaaagtatatgacaagaagttattaaagttttaagatatgtagctcctgtagagtctgaggagtcaggcaaaccatgaaactatatgccactttgtatttttcttttaaaggtttatttatttaatatatgtgagtacactgtcactgttgctgccttcagacacaccagaagagggcatcagaccccattaaagatggttgtaaacccaccatgtggttgctgggaattgaactcaggacctctggatctggaagagcagccagtgcttttaactgctgagctatctctccagcctgtcactttgtattttaaaataaaaatgtttcattcatttccatctttaatatactttgcttctgttatttatttccaccttatagttatctcagtctacttagaaagtatgtatgatacttttcttgctttcagtaaaagccttgatagatcaagaagtgaagaatggcattccttctaacaggattattttgggaggattttctcaggtaagtcagattggcatgtccacaccatcagcatatttatcaacaggtatgtaacttcagttccatttctttggaagagtcccttctttggaactgttacagaatcttggctaattggaattatgctcattaactgaactaagttggattggactggaaataatttctgccccatacacttatttcttcattcattcattcattcattcctttattattgcctttcttagtttcttatcacagttacctttatcttttagagtgccttcaaaattgattcattaaataattgattggaacctagaatgtattttgagggtttttgttgttattgttgttttgttttgtgttttggttttgagactgggttttactctgtcgtcctggctataatgtactttcttaaagcaagcacagtacactgcagttaggcttctgttagtgaaagaggactgtaagaggacaggtgtaagtgccgaggtttctaaggtagagctgagctataacagcctgctttctctctccagcttcatcgtttctccgtggccagcttctctctattgaccttatatcctttctggtgtgtttctagtgcttgctctaggtcctagcccaagctgaacaagaagttctgtatccacaccttgaacttagatttttactcaccattttcatgtagcctgctctcagaatgctctagtttctaatctcctcagtgaattgctatgagaaatgtccaaattctggaatcagttgtaacaataaaactcaatagaatgtaataatatatagtaatatggttaatgtattagaaaggtgttattgatggggctgaggagatagccagcagttaagagcacttgctcttccagagaatccaagttcgattcccagtacctacatggcagctcacaattgactgtaactccagctccagggaagctgacaccctctcacaaacacacgtaggcaaaaaaccaatgcacagaacatgaaaataaattgttttaaaaaataaaaaggtgttatcgatatatgtatggtctttgtctagctaatacaatatacatccccacacatgaataaggcccaaaattaatgctttatttaaagtataatgtactcataattattatgttatttgatactgattacagcttacagtaattaattcctagggatggggagatggctcagacagtaaagtgctttctgtacaactacgaagggcagcgtttgtatcctcggaacctgtgtaaaaatctgagtgtgaaggcaaacccccatagccctagcacagggaagtggaggcagccagttcctccgagttacctggccccaagccttgagtagttcagtcagagagaagagaccatgcctcagaaagtaaggtcgaaaacaactgacttcaacactatacacctaaggaaatcagttctgaaaaccttcagcaagaagtcggttataagtctgtggcatccttctatcaaggaaacagacaataaaactacaaatcaggaaggaggtactgtttggaaagcagtcaggacttcccgtcttcctttttctctgtttatgtgtttatttgccttcttgccaaccattagcatgtaagcttttacagctttggagtttacatgttgcatttccagccatatagaagtggcccaaaggtaactgagtcccattcccaccgtcccgagagaaagaacatcatgctgagatcaccaagtctcccatatccccatgtggtacagcaagtgggggcctggtcagggtgatggcacctagacagatgacagaattatagttcccaacacagtgtgttgcgaatttctaaggtgtctagtacataccatctgtattcattttaaatcctgttttggaaaaataatttaaaatctaattttgagtttatgtctaagactttttatgaagaaaggaaaatgaaaactataatttcagactattctttagccattctgtatgtgaaaatctgtattgatatgttttcttgaaggtagaggcccatacattctgaatatatattttcatcctttacctggtttgattcagtatcttttcttatggacattgctaataagaattctctaacatagccgggcgtggtggcgcacgcctttaatcccagcacttaggaagcagaggcaggtgaatttctgagctccaggacagccagggctacacagagaaaccctgtctcgaaaaaaacaaaacaagaaaaaaaaaaaaagcattctaccatgctcttggcagaagtgctccggttaactctctgcttttgttccagggaggcgccttgtctttatacactgctctcaccacacagcagaaactggctggtgtcactgcactcagttgctggcttccacttcgggcttcgttttcacaggtagcctgcatggtgtgaatcttaccaagattatagagctaggagttagcagatgtttaggagcatgtcatcttttttattgtaattagtgagctttttggtttttattattttttgatttatttattattatatgtaagtacactgtagctgtcttcagacataccagaagagggggtcagatctcattacgggtggttgtgagccaccatgtggttgctgggatttgaactcaggaccttcagaagagccgtcagtgctcttaacaactgagccatctctccagcccggtttttactttttagaagttttaggattatagaaaattgagtgagaaataaagacttctcatattccttgtttgtactccacacacagcctcccctcgggtagacatcccacactacattggtaactttctgtagttggtaagcctaccaagaattcatggttacatcaggcatcttatttttaagatatttctttgacctttgtgatatattactacacttgatctgtatgtcttttctgtgatttagagtacaatatgcttattatcctgtcttatatttaattatttgatacattttaagatgcatattcacacacacattttaatttatattttaaatatttaatgtagtcatttgacagcagtgttttacttttatttgtcactgctggggattagccccagagccttgaacattgttagtcaggtacatcactactgttttcaagttgtcatagtttgctcttgagacagagtgtagaccaggctgaccttccatctatgatccctagccccgcctcccaagtgctgggattacaggtgtaccagtaagtaagcgccacaccctacattcatttctaagctagtttagtctttttgctatgtagtaacttttcagtgtgctatacataatagattgttaactcaattaaataaagtccaggagagccttacctgtgtgctaatagttattgattaccactcatgccaaaatactgaacataaaagatgaataaaaatgttattggcttaaagaaactaattcatgggggctggcgagatggctcagtggtcaagagcgctgactgctcttccgaaggtcctgagttcaaatcccagcaaccacatggtggatcacaaccatctgtaatgaaatctgatgccctcttctggagtatctgaggacagctacagcgtacttacatataataaataaataaatctttaaaaaaaaaaagaaactgattcattggaaacatgtaatataatacatgcaacataatcatgtatgccatagaagtttaaagacattgagggaacaaaatgattgaggtgggactgtactttgccaagacatttgactgaattatgagtaatagcatatgcacacatagagtctggcacagtgctttatgtatctgatacataacattgcctttgtgtttgtcttgcaggggccgatcaacagtgctaatcgagatatttccgttctccagtgccatggagattgtgaccctttagttcccctaatgtttggttctcttactgttgaaagactaaaagcattgataaatccagccaatgtaaccttcaaaatctatgaaggcatgatgcacagctcatgtcagcaggtaggtgtctctggaagcagtgagtagagtcactgttttaatttcttccatgttatatttccaagataaaaaatttggatgttgatgatttaaagaagtaatgaattcacaatagaataaaattaaccaaaattttaatattttattcaattaaattttaaaaatctgatcgccttttacaaatgagcattgtacataatccagtggttatttattttatttttttggtgtttttgagagaagtttttcgatatagcctctgctgtcctggaattcactttttagacagcctaggcccacctgcctctacttccaaagtgctgggattaaaggtgtgagccacccagcggttaagagcactgactgctcttccaaaggtcctgagttcaaatcccagcaaccacatggtagatcacaaccatccgtaacaaaatctgactccctcttctggagtgtctgaagacagctgtagtgtacttacatataataaataaacaaatctttaaaaaaaaaagaggtgtgagccaccacacctagccctccagaagacaatttatgaatataccttcttgttcagtaaaatttaagttataatgattaaagtttaataaaagaaaatgtaaataaccaaataactgctgacagaacagatcagggtgtatattattgtacttgtaggattttttttcttagactatcctaaacaaacatgaaaagaaagaaagaaataaaatttatcttagaaggcactgagatcatgatgtgagatagctagactatgtaggtaggttgtagataatacgtatacaggtaaagggactgaatggctgtcagaaaaaacaaaatgtccagtttggctggaatcttagacaaatctgtatattaagctagggtgtagctcacttggtagcgtggttgcctgatagggacaaagggtttcgtcctttgcacttcctgttatgttgtcttagttatggttttactgctgtgaacagacaccaggaccaaggcaactcttataaggacaacattgaattggggctggcttacaggttcagaggttcgttccggtatcatcaaggcaggaacatggcgatgtccaggaaggcatggtgcaggagaagccaagagttctacatcatgttcagaaggcaaatggaagattagcttccaggcagctaggatgagggttgtaaagcacacacccacaaggatatacttcgtctaacaagcccacacatactccaacaaggccacacctcctgtgccactccctgggccatattcaaaccatttcagatgtatgcacaacatgatggcacagctgtaatttcaacacttgaaaggtggaagcaggtcagaagttcaaaatgatcctggccagcctcagggggcaggagtaggagagatttcaggataaagggagtaagggctcgcttttagaaacgtgcccggtgtgctgaggagggacgtgttctccaggtagcaggaagctgtcttctgttgaagtgagatgtggtctaggttaggaaccaggtgaggcagaatctagtagtatattcaggtaaattttatggataggacaggaagcatcaagggggctaagtatttatagctcagttgaccaggaaatatgctgctataaagtaggtataaagaagagttaactgtaacgaaaaggtgaggttgaagggtaaagggaatgaaaggaaatgaggacatagacacggtatatacagacctctttttttttaaagatttatttattgattatattaaatactctgtacccgccctccccagaagagggagtcagacctcattagggatggttgagagccaccatgtggttgctgggatttgaactccggaccttcggaagagcagtcaggtgctctcacccaccgagccatctcaccagtcccagacctctttttaaaagttttattgagggggaagaattgtgggaaggagtgaccaggaagggagcaatgagcaggatgtaaagtgaataagtaataagtaagataaaatttaaaaaaaaaaaagaatttcaaagcacttaacttaaaaagtttgttgagataaggttacacactgctgcaatcccagcgcttaggaggctgggacagaaagaccttgatttttttgtttgtttgtttgttttgtttttttcgagacagggtttctctgtgtagtcctggatgtcctggaaatcaatatgtagaactcagaaatccgcctgcctctgcctcccaagtgctgggattaaaggcgtgagcccccacgcccggctaagaccttgatttttaagaccaacttagactgatcttaattctggaccaccttagcaaagcccctgtctcagagaagataacaacttttaaatagggagagcagttgaaagttttgtttgtttgttttgttgtttttaacgaaatggggaaaaagacaactgtgagtaagaagtgataaggatatttgatcaagggatatcttagctcctgtgtcatctgggaccacagctgggctgttaccttaaaagaggaaaacattttgagtcaagatagaagtattatcaaatgtcaagagcgggagcagagttcttgggagcttacatggtttttgtcttcatgaagtagaagatatcgttacttagatgagaaacacctggatggatttagggtacttgtaatggcctagaataaaatttgattgatggctaatctctggggtatagtccactgttgtacaaccactaagtgaggttaaatcacttgcttcaggcacaaaggaagtggatagtaatatgatataccccaaaagctcagtgtgccttggttcctacagagccctccattcccttcccaccccacccccaccgtgaaaggaactgttgaatacagaagagtagggagtctgaggagcgactgaaggtcctgagcatctcgagtaccatgcttgtaaatgaggcttatgctggcttttgaggactttagctgaatgagccagagtggtaggatgaggttggaggattacacaaaactgttaggtagggctttagagtgttgtcaagtagatcactttcatatagtggctcgtcgcagtgatgcaaatacaaggttgtaagtttcagagacctaggaaaggaggaaaatggattaagacgtgggaggcttccaggagaaagctactgtcatctttttcaagatctgccttacatactttctttcaaatatatagctgtatgtaattcttgatgaaaggtacacatacaaaaaagattagctctgcatctatcatttcattttaataaggaagtgggaaagcaaagcttttttgctgatattcagttgtcagtaagtagatattactgaaaagttctctgtataggttagtatcattctgaacttcctgattccccagtgttttatttatgcatttgaaaacacagactttgcacgtgcatggaactagatcatatgggagcttttgttttggtgtacaataataatcctaagaaatgttacaccggacagtggtagcgcacgcctttaatcccagcacttgggaggtagaggcaggtggatttttgagttcgaggccagtctggtctacagagtgagttccaggacagccagagctacacagagaaaccctgtctctaaaaaccaaaaaaataaaataaaataaagaaaagaaaagaaatgttatgaactttctgttggcgcctcatccttcttacattacctttatgtagtagtaaaacatcctcacctgcatggattttattagtggcattctcggaaatgtactttctgacttctgtagctgtttattaaatcattttttccaaacaggaaatgatggatgtcaagcacttcattgataagctcctacctccaattgattgacatcactaagaggccttgagtagaagttcaccagcatcacagtagtagagtataaacctcttcccatgactgaccatagaacttctaatgtgtgcagtgttaaaatgttttgcaaatacataccaatgatacagactaaatgatgttaccctcatgggaaatatatgatccttttaagtgtctatgcatatatttgtattatacaattcagaatatactaagtattacagtaggtaagtgaagcaactagattctttgtctcaaattcagcaaaataagataacaaacagttttattacatcatttgaaaattactagtatgttctgtgaagatgtgttcaggtaagatgtaagtgacttcttagttctgtgagttagactatagttttactccacaattgttcagtctccatgcagtgtctgtatttttctgtttgtattcacatagatgatactataatagctaagaatcagatggtattacattatccctaataatggggataatgcttttgagtgtcaaaaagtaatactgcattcttcaattaatggcccttctattgggagaccaggctttttttcccttctatgtaatttttctcaagaaaaaacaaggttcttttttgattttccgtagaaaactaatattgcctctctgtcatatattttattttgacattttgagatacagacatagccgggcgtggtggtgcatgcctttaatcccagcactcgggaggcagaggcaggcggatctctgtcaatagcctggtccacagagtgagttccaggacagccagggctacacagagaaaccctgtctcggaaacaaacaaacaaacaaaccgaaacacagacatacagtatttccaacctaggtaatatgaaaagaaatcaaacattacttaagtttatatatttcaaataactgcaccttagtccaactttagactgtagagttatagactctccagtcctggtaataaatctgtggttttatttttctgtaaaacacttaaaggggaagtaatatcttggcatatttagaaatacttgtgactggcttcaaaatataatttcttaaatatcttatagccgattttaagtttacattttctgtacatgttatgcttaaaaccaaatactgttcaagatgagcaatcagacttatgttttatttttatctgggtaacatattattttgaaattttcatcttaagtaaaggagcttttgataatcagtctcctgtacaaatattaaaataataatttgattttaaatcatcagcatgttcaaaatactggtgaaaattatttaatataaggactggttagaacattatatatatatcccatatttataactgttaccacacagttgaatatgttgcaaaaattatggttatttctgaacggttgcttttcttgctgttttccaaccaaccaagaagcacctttataaacaggtgctaattgatatgaagatcattttggtatgtcctagatagaatgaagccaaatgtctggatttaaaacaatttcaaacaatcatttactattttgctttactttaaagaacataaatttacttcagttattctatctgtaaagatttatttggtataagaaatattccattgactgtgtgctgtaatgtgggaaaatgtcatgtttttcacagtttctatcaatgtgaaataaaatttaattttggctttatcgattgctttatatagtactgtttcttttttcttttcttttttatagataggatctgtactggctagttttgtgtcaacttgatacacctggggttatcacagagaaaggagcttcagttgaggaaatgcctccatgagatccagctgtaaggcattttctcaattagtgatcaagggggaaaggccccttgtgggtgggaccatatctgggctggtaatcttggttctataagagagcaggctgagcaagccaggggaagcaagccagtaaagaacatccctccatggcctctgcattagctcctgctccctgacctgcttgagttccagtcctgacttccttggtgataaacagcagtgtggaagtgtaagcttaataaaccctttcctccccaacttgcttcctggtcatgatgcttgtgcaggaatagaaaccctgattaagacaggatcttactgcatgcccctgctggcctggaacttgcctaagttacctcttctaagttgccttgggcatggtgatgtatcacagcaacagagaagtaactaatcatgctggcccacaactcacaggcttgcctgcctttgtctcccaagtgctgatattatagatgggtgtttccatggcctgatgtttttccaagttttgttttttttttgttttgttttgtttttttttgaggcaaagtcttccttatagctagcccaatcttgccttgaaagcctcaatcctcctgcctcttcctccctagtcctgaaataatagttgtataccagcacagccagtgtcaagtcgtaacatttgggcttactttggaatgatcttctatattgaaagaaggatataataatacaatcatgagaaaatgcattgggagagaaaatttggtgtgatatgattaccttggaatggaactagccatgagaagaaaaaagtattttaacttaattttaatctgctaaaaaattcataacctatttaaaaattcttaaactattgagaaactttattgggtgttttcatctttaatgtagttatcactaggaattttaaataactaccatatgtcagttatccaaatattttttctcttacatattttattaagttctaacttttaccactacaggggtttattcttttgtgtcaaaaagtgtttctggccgggcatggtggcgcacgcctttaatcccagcactcgggaggcaggggaaggcggatttctgactttgaggccagcctggtctacatagtgagttccaggacagccagggctacacagagaaaccctgcctcgaaaaaccaaaaaaaaaaaaaaaaatgtgtttctgtttctggttttaaatacttgaagttgacagcttacccttttgtgattctgcctgtctggttttgatataggtaggagactttgtgatggtttgaagaagaactgtcccccagaggttccatccctagttgctggtgctatctgaaggttacatcgaggggcaggctagccgcaagaagtacatcactgtggtcaggccatgagagttcacagccttgctccactcccagtttgctttcactgcttcaagctgtggttgagttgtgacctctcagcttccagccaccaagcccactgattgcttcaatgccttctcagcaagatgtgactctgtttgtttgt

SEQ ID NO: 57 - DNA, 1138 bp, Mus Musculus
gaacagtgcagggcggcgcgggggcgcgcacgcgcctgagcgcgcgcccggaggggcgggctgggactttcggctgccgggagcccgagttcccttccgcttccgacgcactgtccgccagccggtggatgtgcggcaacaacatgtccgctccgatgcccgccgttgtgccggccgcccggaaggccaccgccgcggttattttccttcacggattgggagatacagggcatggatgggcagaagcctttgcaggtatcaaaagtccccacatcaaatacatctgtccacatgcccctgtgatgccagtcacattaaatatgaatatggctatgccttcttggtttgatatcgttggactttcaccagattcccaggaagatgaatctggaattaaacaggcagcagaaaccgtaaaagccttgatagatcaagaagtgaagaatggcattccttctaacaggattattttgggaggattttctcagggaggcgccttgtctttatacactgctctcaccacacagcagaaactggctggtgtcactgcactcagttgctggcttccacttcgggcttcgttttcacaggggccgatcaacagtgctaatcgagatatttccgttctccagtgccatggagattgtgaccctttagttcccctaatgtttggttctcttactgttgaaagactaaaagcattgataaatccagccaatgtaaccttcaaaatctatgaaggcatgatgcacagctcatgtcagcagataggatctgtactggctagttttgtgtcaacttgatacacctggggttatcacagagaaaggagcttcagttgaggaaatgcctccatgagatccagctgtaggagactttgtgatggtttgaagaagaactgtcccccagaggttccatccctagttgctggtgctatctgaaggttacatcgaggggcaggctagccgcaagaagtacatcactgtggtcaggccatgagagttcacagccttgctccactcccagtttgctttcactgcttcaagctgtggttgagttgtgacctctcagcttccagccaccaagcccactgattgcttcaatgccttctcagcaagatgtgactctgtttgtttgt

SEQ ID NO: 58 - protein, 224 aa, Mus Musculus
MCGNNMSAPMPAVVPAARKATAAVIFLHGLGDTGHGWAEAFAGIKSPHIKYICPHAPVMPVTLNMNMAMPSWFDIVGLSPDSQEDESGIKQAAETVKALIDQEVKNGIPSNRIILGGFSQGGALSLYTALTTQQKLAGVTALSCWLPLRASFSQGPINSANRDISVLQCHGDCDPLVPLMFGSLTVERLKALINPANVTFKIYEGMMHSSCQQIGSVLASFVST

SEQ ID NO: 59 - DNA, 2411 bp, Mus Musculus
atgtgcggcaacaacatgtccgctccgatgcccgccgttgtgccggccgcccggaaggccaccgccgcggttattttccttcacggattgggagatacagggcatggatgggcagaagcctttgcaggtatcaaaagtccccacatcaaatacatctgtccacatgcccctgtgatgccagtcacattaaatatgaatatggctatgccttcttggtttgatatcgttggactttcaccagattcccaggaagatgaatctggaattaaacaggcagcagaaaccgtaaaagccttgatagatcaagaagtgaagaatggcattccttctaacaggattattttgggaggattttctcagggaggcgccttgtctttatacactgctctcaccacacagcagaaactggctggtgtcactgcactcagttgctggcttccacttcgggcttcgttttcacaggggccgatcaacagtgctaatcgagatatttccgttctccagtgccatggagattgtgaccctttagttcccctaatgtttggttctcttactgttgaaagactaaaagcattgataaatccagccaatgtaaccttcaaaatctatgaaggcatgatgcacagctcatgtcagcaggaaatgatggatgtcaagcacttcattgataagctcctacctccaattgattgacatcactaagaggccttgagtagaagttcaccagcatcacagtagtagagtataaacctcttcccatgactgaccatagaacttctaatgtgtgcagtgttaaaatgttttgcaaatacataccaatgatacagactaaatgatgttaccctcatgggaaatatatgatccttttaagtgtctatgcatatatttgtattatacaattcagaatatactaagtattacagtaggtaagtgaagcaactagattctttgtctcaaattcagcaaaataagataacaaacagttttattacatcatttgaaaattactagtatgttctgtgaagatgtgttcaggtaagatgtaagtgacttcttagttctgtgagttagactatagttttactccacaattgttcagtctccatgcagtgtctgtatttttctgtttgtattcacatagatgatactataatagctaagaatcagatggtattacattatccctaataatggggataatgcttttgagtgtcaaaaagtaatactgcattcttcaattaatggcccttctattgggagaccaggctttttttcccttctatgtaatttttctcaagaaaaaacaaggttcttttttgattttccgtagaaaactaatattgcctctctgtcatatattttattttgacattttgagatacagacatagccgggcgtggtggtgcatgcctttaatcccagcactcgggaggcagaggcaggcggatctctgtcaatagcctggtccacagagtgagttccaggacagccagggctacacagagaaaccctgtctcggaaacaaacaaacaaacaaaccgaaacacagacatacagtatttccaacctaggtaatatgaaaagaaatcaaacattacttaagtttatatatttcaaataactgcaccttagtccaactttagactgtagagttatagactctccagtcctggtaataaatctgtggttttatttttctgtaaaacacttaaaggggaagtaatatcttggcatatttagaaatacttgtgactggcttcaaaatataatttcttaaatatcttatagccgattttaagtttacattttctgtacatgttatgcttaaaaccaaatactgttcaagatgagcaatcagacttatgttttatttttatctgggtaacatattattttgaaattttcatcttaagtaaaggagcttttgataatcagtctcctgtacaaatattaaaataataatttgattttaaatcatcagcatgttcaaaatactggtgaaaattatttaatataaggactggttagaacattatatatatatcccatatttataactgttaccacacagttgaatatgttgcaaaaattatggttatttctgaacggttgcttttcttgctgttttccaaccaaccaagaagcacctttataaacaggtgctaattgatatgaagatcattttggtatgtcctagatagaatgaagccaaatgtctggatttaaaacaatttcaaacaatcatttactattttgctttactttaaagaacataaatttacttcagttattctatctgtaaagatttatttggtataagaaatattccattgactgtgtgctgtaatgtgggaaaatgtcatgtttttcacagtttctatcaatgtgaaataaaatttaattttggcttt

SEQ ID NO: 60 - protein, 230 aa, Mus Musculus
MCGNNMSAPMPAVVPAARKATAAVIFLHGLGDTGHGWAEAFAGIKSPHIKYICPHAPVMPVTLNMNMAMPSWFDIVGLSPDSQEDESGIKQAAETVKALIDQEVKNGIPSNRIILGGFSQGGALSLYTALTTQQKLAGVTALSCWLPLRASFSQGPINSANRDISVLQCHGDCDPLVPLMFGSLTVERLKALINPANVTFKIYEGMMHSSCQQEMMDVKHFIDKLLPPID

SEQ ID NO: 61 - DNA, 55900 bp, Homo Sapiens
  misc_feature (1)...(55900): n = A,T,C or G
agggcagggcggaccctggacgcgcgggcgcgcgcggaaggtagcgcggggccgcgttggcgcgcacgcgcctgagcgtgcgcccggtggggccggccgggactcgccgctcgcacgcccttgggccgcggccgggcgcccgctcttccttccgcttgcgctgtgagctgaggcggtgtatgtgcggcaataacatgtcaaccccgctgcccgccatcgtgcccgccgcccggaaggccaccgctgcggtgagtggcgtaggcgtgggctcggaggggtccactgggccggccaccggtggttgcccctcgcgcggggtgggcgttgcgggcgcgtggcggcctgcggacgaggacgctcctcccggcccgggtggggtgcgaatggtccgcgcggccgggtccgcggggggcgggggcagccggggggtcacagccggcgcgagggccagtccccagctcctccctgcattgcggaggaagtgtggccccgggacccccgcgggccggcctagggcacggcgtcagcctctgcagcgtgtttctgcctggtgtgtgggtgagggaaacctaagtccgccaggaaatcgccttattgtcacctcgcactcttatcctcaatgaaagaagtttgaagattgagtgtcctacaaggtcagacgtactgttttttagaaaactcgtgtatgaaaagtcaaacttatttttgcctccggaagcttgcttttgcagtggaaaaattctacaggatatgtgagatgttcctgatttcacttgaaagagataaactgtttttcttagaatgtgatcatttgcactcaatgtctaactgggacctctcagtgctaccccccccccattcattatctcaggaaataaagggagaagttgatcagaatttttgccatttaaaagaggtcgataaagattaagtcgccgaagatagtgttgtgtaattctctcgtaggtttcgttccgttttccaccttaagcaaagctagtgtgtaacaatcctgtgtgggcttatttaggcattgcttattaattttcctcttctcttataggtgattttcctgcatggattgggagatactgggtaggtaccattattattaatagtaacagtaatgaaactgggtcatgcaacttttgtttacgcgttcaaaggtttaatgtttaagggcgctaaaatggtattttaagattgccagttaatgtatcttacagtgcggtgattttatgttttgaaaaccctcagaattttccccttatcatcgtgagtttattgattttttaactctggtttctggaacatattaaaatttcaaattcctcattagttgctttgggtattggataccagagatccgtggaatgttagtagggacggtgtgcaattgagagctttccagagcagttaaaatttcagagcagattgaagagaagaactagttgattttgataagagaactagtggcaacataaggcatgcagcattctgaatagagggattagatgttcactctaatgagttgaaaggcaggggaggcaactcaaagatttatttggaggcttatcaaacaatttgttgtactaactacttatttttattttattttttgtttgtttgcttttttcttttgttattatttttagagacaagggctctctctgtcgcccaggctggagtgcagttgcaggatcttagctcactgcagctttgaactcctgggctcaagtgatccttcagcctcagcctctcaaagcacagagattagaggtgggagctgcctgagcctggccttttgtactaactttagatacatgatttatcttttactcaagctttttctatattgagatgtttttgtttttatatttaaattggtgataatctgtgaaacttaagcaaaatatgaatgttgttgaaaaattgcagaaatagaggaaaactgaagataaataaattttgataaagtagccccagaacgactaaattttctttaaaatgaaccattggggccgggcgcggtggctcacacctgtaatcccagcactttgggaggccgaggtgggtagttcacttgatgtcaagagttcgacaccagcttggccaatatggtgaaaccccatctctactaaaaatataaaaattacccgggtgtggtggtgcatgcctgtaatcccagctgctagggaggctgagagaagagaatcacttgaacctgggaggcagaggcttcagtgagccaagattgcacgactgcactccagcctgggccacagagtgagactcaaaaaaaaaaaaaatgccattaggctagatttttgtttgtttgtttggagacagggtctgctgtgttgccctggctggagggcagtggcgtgatcttgactcactgcaacctccaccttctgggttcctgggtctcccgagtagctgggactacagttgcttgccaccatgccagctaatttttgtatttttagtagagacagagttttgccatgttggttacgctggtctcgaactcctgacctcaaatgatccacccacctgagcctcccaaagtgctgggattacaggcgtgagccaccacttaaaagtgattcctattttttgcctaataagtcgagttatgtaatacaaactttgtatggagttacagaaaaggttgcagcactctttctggcaatccagtggtcctgtgaaaatgatgaacttattttaccaaatgaaactcgaatagcagaatctctattttatggccaaacctttcttgatgttgcaagtcagggagaaggttgctatcctctaactttgccaataatgagcacttctatgcctgaatgattagttcaagcaaaaaaaaaaaaacttcagtctaggcagattccacagactgaagctaaaagtaaaaatggtgaagactattaggatcaaaaataccaagaacatccattacatcttgaccaaaagttaagtttatattaaaaaagtatccttctttttaacctgttgtgataaaagaaaaaacaaaggtctccagttctgaaattatttggtgggataatgctaaggaaaggctgactctagattggttccatgagtgcatgatgaaacttcgaacctgtcagcctgacaagtggcaatttaatacttaagatattgtagtctccccttacctgcagttttgcttcccatggtttcagttacccgtggttaactgtggtttgaaaatactaaatgaaaaattccagaaatactttataagtttaaaattgtacaccattcttttttatttattttattattattttttgagatggagtctcactctgtcacccaggctggagtgcagtggcacgatctcggctcccttcaacctctgccactcgggttcaagtgattcttgtgcctcggcctccggcgtagctgagattacaggcgcgtgctaccacgtccagctaatttttttgtatttttagtagagatggggttttgccatgttggccagggtggtcttgaactcctgacctctagtgatccacccacctcggcctcccgcagtgctgggattacaggcatgagccaccatgcctggcctgaattgtacaccattctgagtattgtgatgaaatctcattccgtctcacccaggacacgaatcattcctttacctagcgtatccatgctatatccattcaccatctgttagtcacttggtagccatctgggttatcaggtcaactgttttggtattgttttgcttttttttttgagacagagtcttgctctgtcacccaggctggaatgcagtgacacaatcatggctcactgcaacctccactctccaggttcaagcaactctcctgcctcagcctcctgagtagctgggactacaggcgtgcaccaccacacccggctaatttttgtatttttagtagagacggggtttcatcatgttggccaggccagtctggaactcttgacctcaagcgatctgcccgccttggcctcccaaagtgctgggaatacaggcatgagccacctcgcccagcctgtagtgcttttatccaaataagccttacattgcttaatgatggccccaaagtgcaagagaagtgatgttgtcatattgttataattgttttattattgttaatctcttcctatgtctaatttacacaataaactttatcacaagcattatgtataggaaaaaacatagtatatatagggtttggtgttatccatggattcaggcatccactaggggttttagagcatcccccactgtttatttctggaattttccatgtaatattttcgaaccacagttgactgtgggcagctgaaaccatggaaaacaaaactgtgggtgagaaggactagggtattttaaacattatataatcacagaaaagttatcccattaaatttaacatttagtattatctaatatattatgcattcaacctttgccagattgttccattaatatcctttatagctatctcctccctagtcatacattatatttagttatcacgtctctttagtctcttttgtctcttttaatctggaacaattccctagattttcttttgtctttcacgacattgacacttctgcagagaacaggctagtcctttaatttgggtttgtgtatttactcatgattagattcagtttatgcatttctggtataaataccatgtaaacaatatgtcctattcattgcgcgcatcagtagactaatgatgctgagtccttttattgttgtaacttcgatcttttgattaaggtggtatcttccaggtctcgactgcagttactttccttttgtaattaaaaagcaagttgcggggggatactttgtgactatgcaagttgttcatcaagctttcacccaatatttttatcatccattgataattgcttgagtcaatcatttctacagtgtgattttccaattctgtcattcctttttttttgtcattccattttgtttattaatctgctactccccatttagttagtatggactcagatttattttctatttatttatttatttgtttattttttgagacagaatctcgctctgtcacccagccaggctggagtgcagtggtgcaatctcggctcactgaacctccacctcccaggttcaagcagttctgctgcctcagcctcccaagtagctgggactataggtgcgtgccgccacacccggctaatttttttttttttttttgagaccttgtctcgccctgtcgtccaggctggagtgtagtggcgtgatcttggctcactgcaacctctgcctcctgagttcaagtgagtctcctgcctcagcctcatgagtagctgggattacaggcacgtgccaccacgcctggctaattttttttgtatttttagtagagacgggggggtttcaccatgttggtcaggctgatctcaaactcctgacctcgtaatctgccctcctcagcctcccaaagtgctgggattacaggcgtgagccatagtgtccagtcagatttttgtagttttagtagagacggggttttgccatgttggccaagctggtctcgaactcctgacctcaagtgatttgcccacttcggcctcccagtccctccctggaattacaggcatgaaccactgtgtcatgcctggactcagatttatttaataggttatgttctattctgttatgttttaaactttttaacttttcattttaaataacttgaaatttacataaaagttgcagaaataacatttatagctccttatacctttcacccaaattacccaattgttaatatttctgaactattaaagaataagttgcaggcgtgttgcctcattacagcttaattcttcagtgtacatttttaagtaccaggacactccagtataaccatcattaagaagttaacactgatggtatactacggtctaatccaccagctccattcacatttcattgatttgagccaataatgtcctttatcagtctaggatcacatattgcctctacttatcatttctctttagttttctttattctgaaacagtccttgtctttcatgaccttgacactttgtcaagaatacaggccgggtatggtaataccagtgctttgggaagctgagcatgagaatcgcttgagcccagctgtttgagaccagcctgggcaacagccagaccctgtgtctaccaaaaaaaaaaaaaaaaagtgtaagccagttactttgtagaatgtccctcagtttgggtttatctgatgttttgtgatttatacctttttgacagtaacactataggggtattgctgtgtccataacagtgcatcatattaggcagacctcatgatgattttgttgttactgatgtgttttatcacttggttaagatggtgtctgccaggtttctccacattaaaataataaatataacatatgaaatatttaaaatattgaatatgtaattaaaatattaaaaaatattttgtggggagataccttgatattataacatattcctgatccccaccatatgttcacccatggatttagcacccattaatgattattgccagaatctattgttgtggtagttgccgaatatcttatgatatttaaatatttaaagttaaaatatggtcttttaattaaatttcctttgttctggccgggtgcagtggctcatgcctgtaattccagcactttgggaggctgaggcaggaggatcatctgaggtcagtagttcagtaccagcctggccaacatgacgaaacctcgtctctactaaaaattaaaaaactagctggacaggatggtgcatgcctgttgtcccatctacttgggagctggaggttgcagtgagccaagatggtgccactgtactccagcctaggcgacagtgagactcagtctcaaaaaaaaaaaaaattcctttattctggatttattatttagcagtctactgtggggtagagctttcctttctcctttatttattacttatgtagatactcatttgtttcaaaattttaaatcagtacagactcttggattcctattgtattcagaggataacaatcaagttagttatttattttgatgctcaaattgtcctttagttggccacagtaaccctttcaagctggtacttggtgtcttttggacatatcctcattcttatttgatcacttcctcactttatggtacaagactttttctaggattgtcttatatgtttcctgctctagtcctggactcagccatttttccaagaaccctggttccttttagtagacagtgagatctggatgctatatgtgctcccagatctagacccttgcagtggacagagctaagaatatatggacatacatacatatgtacacacatatcagttttagtatttataagtattcaaaatcttgagtttataatgattcctccaattgcagcccagcaccacagggtttattatagccttctccctttccatatttgtaattccgtgaggaacctgacttctgttcttggggggttctggccaacagtgcaactgtggagtgtgcccctccagttgcaccagctcacagctatgcttcattcatgggacctctccccatctgctgaatatcacacctgaaagctcagttccaattaaggggaaacgaggaggaggaaaggcctggtggaaagcttggttctcttcatgtgtccccctccctgctactccccagccccgatgtattccaggaattacttatctgtattaccagtccctgtgacatttcctagaccaaggagattataaaagtatagagaagaatgtttgaaagataaaataagtggttgactggatcagattttactgagaggtcaaacaaggtgaggatttaaaataaattggcaacatggatatgttttgtgaccgtaataagtttgcaagtcttcctgtaatcaagaactattaataatagaattatagaatgtgatttggagatcatttaattacaaggaatagaaaactcttcaactagcttaaacaaaaattagaatttgtggaaggatagaagggcagcccactggcatataaagtccatgaaggcaaaggtttctttaataaactttcattaagataaaattcacataccataaaatatacctcagcacagggattttttgtgttttgtttaaattaatactgtattcccagtgctagaatagtataggacatgtaatagcactaagtatttgttggacaaataaatgaataaataaagaattaaagggtgagacatacgaggagcatcaatcaccacatgtattagtttcctaaggctgccattataaataaccacaaactagatggattaaaaacaacagaaattcattctcacagttaaacaggccaaaagtccaaaaccaagctgtcaacagggccacatacattctctttaacggaagatccgtccttgcctgttccgtttctgataactcccggctttccttggcctcaggcaccatacccccaacctctgcctctgtcttcatgtgacctttgctgtgtttctgttctctcctcctcttaggaggacaccagttattggatttagggctcaccctaatcaagtgtgatctcaactcttaactaaggaaatctgcaaagagcctatttttaaataaagtcacattccgaggtttcaggtggatgtgaatttggggggaacactgttcaactacaccattattctcactacctttccctggtcttatggtctctcacttgcttctttctgtagatttgcgtaattctcagtgtggacacactcgtgttatccacaagtgaacgatcctagctctgacttatatcaaccctacttctggtgttcagtcaagaatctgatctgtcttaggtcattttttttcttgtctagttagttggtaagactgattgggactgataggagagttcataagaataacgtgctacatgaatggggttggggatgagtggtgtttcttttacaaacccagacagaatctctgttctacacccatattactacaggataatgaacaaatggaaataatatgtgtgcgtgccaccacacaggtcctgattttgttttgttttgttttgtttttaagtagagacagggactcattatgttgcctaggctggtctcaaactcctgagctcaagcagtctgtccaccttggcttcccaaagtgctggcattacaggtgtgagccactacacccagccagaattcttaaatcttgagtttttcattgtcactgaaaattatcaaaagagttggctacagcttggccatcctttttatattaatatggttggagtcagagttttataacctgtatagaccttcgaatcatccagtacaactagctcctggttatggatgggaaaactgagaactagaaaggcatgattctcatactatagcatgcatcaaaatcacttgaaagacttgattcttgggccccactgccagtttctgattgagtgggtctggaatgagaccaaggaatttgtctgcatgcctcctcttcttctttcttctttcttcctcctcttccttctccttctcctcctcttcctccttctctctctgtctcctccttctcctcctcctccaccttatcttccccctccttctcttccttctttctccttctcctccttctccttctcttccttctttctccttctcctcctcctcctccttctcttccgtctttctcctcctcctcctccccctgacttcgacagggttctcctccgccgccgcctctgcctcttccatctcctctgccgccgctgcctccccctccccctcttccttctccttttcctcctcctcctccttgcttcgacagggtctctcactctgttgcccaggctggagtgcagtggcgtgaacacagctcactgcagccttgacctcctgggttcagcctcccaagtgactggaagtacagctgcatgccaccatgcctggctattttttaaagtttttgtagagatgagggtctcagtatgttgcccaggttagtctaactcctgggctcaaactgtcttcccatctgggcctcccaaagtgctgggattacaggcatgagccagtgtgcctggccagaatttgcatttctaacaagttctcattggatactgatagtacaggtctggggatcacacttctgagaaccaccagactgacggaactgtctgtgaccacacttttagatagtggctgagtggggactagaacccaagattcctatttctttttctcatataagggttcttagtatttctccttccttccttccttccttccttccttccttccttccttttctttctttctttccttccttcctttcttcttttcttttcttttcttttttcttttctttttctttcctttccttttcttttcttttctttttttgagacagttttgctcttgttgcccaggctagagtgcagtggcgtgatctcggctcactgcaacctctgcctcctgggttcaagcgattctctgcctcagtcttctgagtagctgggattacaggtgcccgccactgtgcccggctaatttttgtatttttagtagaaacagggtttcaccgtgttggccaggttggtcttgaactcctgacctcaggtgatccgcccacctcggcctcccaaagtgctgggattacaggcatgagccaccatgccctgcctggttcttagtatttcttatgtagaatggaggttggagccaggcatggtggctcacacctgtaatcctatcacttcgggaagctgaggtgggaggatggcttgagcctaggagtttgagatcagtctgggcaacatggcaaaaccctgtgtattagttctcttgctgctataaataattaccgaaactgggtaatttataaagaaaagaggtttaattcactcacagttctgcatggctggggaggcctcaggaaaggtggaaggcacctcttcacagggtggcaggagagagaaatgagagctgagcgaagggggaggccccttataaaactgtcagatcaaatgagaactcactgtcataagaacagcatgggggaaaccacccctgtgattcaattatctctacctggtcccacccttgacacatgggtattgtgggatctggccagcagcccgcaatgcaatggggctctctctttgttcccaggcggatcggcaggttgagaaataatagacacacacaagatagtgaaagctgggtccaggggggtcactgtcttctggtcccgcggtgccaacaatgcactggatataccagcatttattactaagtttagtgagggcgggggtaggttagtgagggatttagggtcatttgattatgaggtgagatggtcacatggggatgaaataattctttaacataacatttgtatgtagaagtatagtacatttgtatgtagaagtacagtatacagagataagaatttacaatatagtgtgtgcatcagtaatttctaatagagccttaaaacagaaacacagtctttccataacctatgattagcaagatattaatcagcagtaacagttgtagcaaaagctggttacaaacaatccatagaaacaggatgtgaagctagacaactggttagaccagaaattctcagaaggggagtatgtcttaaccctaaagaggcctagaagaaccgtggcaagatgagggcatttatagccctatcttatccatgtggacaggcgcccccaatgcgtccgtttataggctctccacaagggtcgcattctgttcccagagctatgaacatctgcttttctgggataggaatcttggtgatgtgaatcctccgtgattgcacatccattcataggctctttgcagggggaagcacatcacacgctgttggctcgttctggcagtccaacctggcattgtctttacacaatcctgcatgcaattttgtatttacaataatcaggagcatttcatcttttattccgtagcaatagtttcagggggtctccctacacatggggattattacaattcaaggtaagattttggcagggacacagccaaaccgtatcatccaccttctacaaagaatacaaaaaattggccagccatggtagagtgtgcctgtaatcccagctacttaggaggctgaggtgggaggatcgcctgagcctgggaggtcgaggctgcagtgagctgagatgatgccactgcacttccagcttgcgcaacagtgagaccctatctcaaaaaaaaaaaaaagaggttggcaaacaagggcccatggttcaattctggcctgccacttacttattattacagtgttagtatatacattctaatacatacatattagtgttagtattgtcacatatgttcaaagatcccgcccccccccagggatgtctgaaatcacagagagtaccaaaccctatgatactatgttttttcctatgcatgcatacctgtgataaagtttaatttataaattaggcaaagaggtgaacaacagcaatagaataattataacaacatactgtaataaaagttatgtgaatgtgatctctctctcaaaatatattcttgttctgtactcacctattttttgatggtggtaactgaatccacagaaagcaaaactgtggttgatggggaactactgtacttatagagatataattcacataccaaaaacttcactcttttaaagtatacagttcagtagttagtttatttacagagttgttcaactattaccactgtcttaattccagaatatgttcaacatccccaaaagaaacccaacattcatctgcagactacttattcccctccctggcaaccactatctttttctgtttctgtggatttgcttattctgcgtagaaatggaatcagataatatttggtcttttgcatctggcttctttcattttataacataatgtttttcaggctcatctattttgtaacatgtaccagtactgctttctttcattgccaagtaaataattagctgagcatggtgtcatgcacctgtagtctcagctacttgggaggctgagtcaggaggatcctttcaggccaggagttcaagtctagcctgggcaatatagtgagactctgtctcttaagaaaattcacataaaaataattcattcatcaattaatgaacatttggattgtttctacttttttactctaatgagtaatactactctgcacgtttgtgtacaagactttgtatggacatatgtttttagttctctggtgtatatacttgggagtcaaattgctaagtcaatggtagctctatgtttaacccttgaagaactccaggacagttttcatagtagctgcacttttttacacttctgccaagataaatggccagcagtgtgtgagtgctctgatttctcgccatcctcgttaacacttgttattgtctttttgattatagccatccatttctatgtgaagtggtgtcgcattgtgattttgatttgcatttcctaatggttaatgttgagcatcatctcatgtccttgaaaaaagtaaaatagaggtccctctttaaagattttcctctccatctaattaggaataaatagtaacttctcttaaaagcaaaatttattcgaagacaggtgctaacattcttaaatatctgctagccgtaataaagaaatcaatgtactttatgttcttagctccctcaatttagcctaaatatttgccctggcatgcttatactggtccaagcaagcattaggtcatagcctgttcctcttccttatttaaaagtgtttttatctttctcagcattccacaagttaacttcctccttcctttgttctcctctacctttgcctcttttaaaaagttctaagttgctagccagtcgggacaaataacagaatgtgaggtcccgttccagccaatggaaaccagacacagcagtagggtggacttgtcagattataaatgactctgtctcctttgttcggtgtactctcgtgacacagctactggcaagtgtaccctttctgcagaaagtaaaaatggccttactaaataaattaaatttatgttcaagtgctgtttctttacggcaccggagaacaagcatttcaaacatccttattggccatttgcatattttctttggagaaatatctgttcagatcctttgccgttttaaaaattgggttgcctttttgttgttgatttataagaattgtttatattgtctggacactagactcctatcagatacattatttgtaaatattgtctcccattgcgtggggtgtctttgcacccttttggtagtatgttttgcagcacaacagtttttcatcctgatgatttttatgtttgtttgtttgtttcagacagagtattgccctgtagcccaggctggaatatagtggcgtgatctcggctcagtgtagtctctgcctcccctgggttccagcgattcttctgcctcggcttcccgggtagctgggattacaggcatgccctgccatgccctgcccagttttcaagtccttcacttattttgttaaattattcctccaagtattttattctttgtatactatgacgaatggaattgttgactttattacatttttatattgttcattgctagtgtatagaaatatacctttttgataagttttttatatcctgggatcttgctgacctcaatagctcttaggatgtttttgtagatttcataggattttctgtatataagatcataagatactcagctcacaagatcatgagagggaattttactgattcctttcctatctggatgccatttatcttgccagtttccctggctacaatctctggtaaaatggtgtattgtatttattaaatttttatgttgaaccatccttgcattctagggaagatctctcctggtcatggtgtataatcctaattatatgtcgatagatttggtttggtagtttttaggattttgtatttatattcctatgggatagtctgtgattttcattttgagacagggtctcgctctgtcacccaggctagagtgcagtggagtgaacacagctcactgcagcctcaaccttccaggctcaaaccatactcccaagtatctgggaccacaggtgcacaccaccatgcctggctaattttcttattttttgtggagatggggtcttactatgctgcacaggctggtcttgaactcctgggctcaagcaatccccccactttgggctcttaaagtgttggattacgagtgtgagccatcacacctggctgtctttttttttttttttttttttttggtaccctttggttttgatgtcagagtaataatggccttctaaatgagtaactgttcctttttttgggcgggggggatgaggagaaggattctttttttttttttttttttttttttaatttttttagtatttattgatcattcttgggtgtttctcggagagggggatttggcagggtcataggacaatagtggagggaaggtcagcagataaacatgtgaacaaaggtctctggttttcctaggcagagggccctgccgccttcctcagtgtacagtccctgggtacttgagattagggagtggtgatgactcttaacgagtatgctgccttcaagcatctgtttaacaaagcacatcttgcaccgcccttaatccatttaacccttagtggacacagcacatgtttcagagagcacggggttgggggtaaggttatagattaacagcatcccaaggtggaagaatttttcttaatacagaacaaaatggagtctcctatgtctacttctttctacacagacagtaacaatctgatctctcttttccccacatttccccgttttctattcgacaaaaccgccatcgtcatcatggcccgttctcaatgagctgttgggtacacctcccagacagggtggaggccgggcagaggggctcctcacttcccagacggggcggctgggcagaggcgccccccccacctcgcggacggggcggctggccggccgggggctgccccccccccaacctcgcggacggggcggctggccgggtgggggctgcccccccacctaactgacggggcggctggccgggcggaggggctcctcacttgtcagacagggcggctggtcagagatgctcctcacctcccggacggggtgacggcggggcagagacactcctcagttcccagacggggtcgcggccaggcagaggcgctcctcacatcccagacggggcggcagggcagaggcgctccccacatcccagacgatgggcggccgggcagagacgctcctcacttcctagacgggatgacggccgggaagaggtgctcctcacttcccagactgggcagaggggctcctcacatcccagacgatgggcggcggggcagagacacttctcacttcctagatggggtggcggccgtgcagaggctgcaatctcggcactttgggaggccaaggcaggcagctgggaggtggaggttatagtgagccgagatcacgccactgcactccagcctgggcaacattgagcactgagtgagcgagactccgtctgcaatcccggcacctcgggatgccgaggctggcagatcactcgcggtcaggagctggagaccagcccggccaacacggcgaaaccctgtctcaaccaaaaaatacaaaaaccagtcaggcgtggcagtgcgcgccttcggcaggctgaggcaggagaatcaggcagggaggttgcagtgagccgagatggcggcagtacagtccagcctcgtctcggcatcagagggagactgtgcaaagagggagagggagagggagaggaagaggagggagaggagggagagggagagggagaggaggattctttaaacattggattggtagacttcaccttgaagccatgtggtactgggcttttctctgtgagactttggattactgattcaattccttgttacaggcctgtatagattttgtttcttgaatccgtttttggtagtttgtgtcattctaggaatttgtctatttagtctaggttatctaatttattaccatgtaattgttcatactgttctcttataatcttttctatgtgtcaagttagtagtagtctgttctttgtttcctgattgtaataatttgagtcttctctgttttttttctttggttgatctagctaaaggtttgccatttttgttgatcttttcaaagaaccaacttttgctttagttgatagtctctctctttttttttgagatggactctcgttctttctcccaggctggagtgcagtggctcaatctcaactcactgctacctccgcctcccaggttcaagcaattctcttgtctcagcctcctgagtagctgggactacaggcacgtgccaccacacccagctagtttttgtattttgggtagagatggggtttcaccatgttagccaggctggtctctaactcctgacatcaagcgatccacccgcctcagcttcccaaagtgctgggaatacaggcgtgagccaccgcgccggcctctgttgcatttatttccactctagtttttattattttcttctttctgtttactgtggataaagttttttggttttggttttttttcaggtaaaagattaggttgttaatttgaggtctttattttatatatatatatatatatatatttatttattttttttttctttggtctcccaggctggagtgcagtggcgtgatctcaactcactgcaacctctgcttccgaggttcaagtgattcctctgcctcagcctcccaagtagctgggattacaggcattcactgccacaccgggctagtttttgtatttttagtagaaacagggtttcaccacattggccaggctagtcttgaactcctgacctcaggtgatctgcccacctcagcatcccaaagtgctgggattacaggcgtgagccaccgtgcccggcctgagatctttatttttaaacacagatgtctacagctatacatttccatttgagcattgcctttgctgcatcctatgcattttcgctgctgcgtgtttttactttttctaaatggttaggaaaaaacttaagacttagtgacacatgaaaagtatatgaaactcagattttattgtacataaataaggttttgttggaacagaaccacatccttttgtttacatgttgtctatagttaattttcatcctagagtggctgagttgagtagttgcaacagagaccttctggctggtaaagcctaaaatgttgactcttttggtcctttgcagaaaacaattattgacccctgttgtttaatatttcttgatatacagatgttttacatcatgataaattcatcataaaatcaaaaaatcataaatttagccattataagttgggaactgtttgtatattcatactatgaaaaattgagcttttcattgttatttttagcttgcatgagagttagagctgtatttgcttagagtaatattcctaagatgataatattcatcatttgatttttctgtgggttcttatgggctacctgttaacattcaaatatagagcacagcagtcatttcttcaccatgtggtcttaacctactttatctgaggtgtcttcaatttctgtctctgatttttaagtattcttctagactaatttaacagtatatgtgcaaaggcctaattttttaaaagatttttgtgacattaatgttttaaagaattttttctaaggaaaaaatgatgtctgcgaacattcattttataagactgtacaatgagaccgggtgcggtggctcatgtctgtgatcccagcactttgggaagccgaggcgggcggatcacgaggtcaggagatcgagaccatcctggctaacatggggaaaccccgtctctactaaaaatacaaaaaattagccaggcgtagtggcgggtacctgtagtcccagctacttgggaggctgaggcgggagaatggcgtgaacctgggaggcggggcttgcagtgagccgagatcgcgccactgcactctagcctgggcaagagagcgagactccgtctcagaaaaagaaagaaagactgtaccatgagaaatctgtgtgaaaaaaattgaaatgccaaaatgtttacaaagaagaatatttgataagttagaattccagcaatttaagtggaaaaagtgtatcctgggcaggtgcaatggctcacacctttaattcaaacactttggaaagccaaggcaggaggatcacttgaggccaggagtttgataccagcctgggcaacatagtgagatcctgtctctaccaaaaaaaaagtacattctaaaactgtagatacaatatagtctcataacaaataggagctaagctgttaatgattgtttctttttttaaaaaaaggattagttcttgatcgcaccagtccaaatgcttttcattttctacttttgtcttttctcccctaattgtaataaggaataaaacatactatggtgcgtatgtatgtgcgtgtgcgttgtggggaaaacctgtcctctgtcttactgctcctgctgtataaattctttttgattttcatagctgaaactaatcttttccttctcttccacattttgacattctttgtaacttgtttgtagggcttaacttttgatctgtgtggtggtatgtttatatcttgtttctcctacgggactgcagtttcgttgaggatacagtctgtatctcaatctttatctttcatgcatgtagaatgtttgttttttaaatttctctcctcagatgcggtggctcatgcctgtaatctcagcactttgggaggtggaggcgggcggatcacctgaggtcaggagttcaggaccagcctggccaacatggcgaaaccccatctctactaaaaatacaaaaattagccaggtgtggtggcacatgcctgtaatcgcagctacttgggaggctgaggcaggagaatcacttgaacctgggaggcggagattgcagtgagccaagatcgcaccattgcactccagcctgggcaacaagagcagaagagcagaactctgtctcaaaaaaaaaaaaaacgaaaagaaaggctgggcgcagtggtgcacgcctgtaatcccagcactttgggaggccaaggtgggcagatcacgaggtcaggagtttgagaccagcctgaccagcatggtgaaaccctgtcatggtggcgcgcttgtaatcccagctactcgggaggctgaggtaggagaatcgcttaaacccgggatgcgaaggttgcagtgaagagattacaggctgcactccatcctgggtgaccgagcaagactgtgtttcagaataaaataatcttccagttgttttttttttcttcaacatgtcttctgttatttaaaaaagacattttcttgagctctttcattggacgagagctgctggccaaaaactgtgtatatagtagggaaaacaagggtctatgtggttaagacataaacacagttaagagaagtagcacaaaatataaataaataatattaataattattgaattacaattttgagcacaaataggggcagagccacaaatagtcaaaatttactgtgaaatattgttgcattgtctgtatatttggggtgaataattgagaggcaactcttcaacagcctgttactccagacaggggtagaaactagtgagtacagcaaaaggcctttgaactataaagtccataccttaaagctgttgtacttttctgtgtgaactccagcatttttattctttggcaaatgtctaatacatacaaaagattgtaagtactcaaaaagccagtggtatagagttctttggtatggagaaaatagccaatgttttattgtattaataacaattctaaaattcatgttaaatttaaatttttggccaggcacagtggcttacgcctgtaatcccaacactttgggaggccaaggcaggcggatcacttgaggtcaggagtttgagaccagtctggccaacatggtgaaaccttgtctctactaaaaataaaaaaattagttgggtatggtggcacaggcctgtagtcccagctactcgagaggctgaggcaggagaatcacttttactcaggaggcggaggttgcagtgaaccgagatcaccccactgcactccagcctgggcaacagagagaggctccatctcaagaaacgtaataaataaataaatatatttacattttttattctgtttctatagtcaccatcaatttacatatttctcaatatacttcgtaagtgtaaacataaaggaatacggctgtcatctgccttggccagccatgatataggtcaagcttttattatatgtagtaatgttttgaggaacataattgaagctttattttattttggactctaataaataggtggaagattgttattactattttttgagacagagtcttgctttgttgcccaggctggagtgcagtggcatagtacgctcgtggctcagtacaactcccacctcagtctcccgagtagcttggactacaggtacgtgccaccacacttggctactttttgtagagacagggttttgccattgttgcccaggctggtcttgaactcctaaggtcaagtgatccacccacctcagccagaatccaccacagggcgagatatcagatctccgttnnnnnnnnnnnnnnnnnnnnatccacccacctcagcctcccaaagtggtgggattacaggtgtgagccacccccgcccagcctgaagattattttataagtgtgattttttttaagtggctgtgtagtcccaaaactataattagctgaaataatactgtaatgtttaaaacttatttagttatccctgaggtcatcagcacaaatcctgaaatagaaaatatagtaacgatatacttagaaattgaaatagaaatagaaaaagcttacagaaaatcagcattggcaataaccatggaaaacattttataatgtggttatactgttatcttttgcagagataacagacaggtttaaattttatttatttatttatttatttatttcagggggaaacgaggtctcagtctgttgcccaggctggagtgcagtggtgtgatctccgtttaccgcaccctccgcctcccaggctcaattgatcctcccacctcagtctcctgagtaactgagactgcaggagcgctcccagctaattttgtattctcagtagatatgggggattcgccacattgcccaggctggtctcaatctcctggactcaaatgatccgcccaactcagcctcccaaactgctggggtcaaaggcttgagccactgcacccagtctagttttttatcttatatgctgcttggatacctttgctggtcaaggctctgtgacaaagagtgccttaattgcttggtaatgtctactctgggcccacgatctaggaatggtagcccatatgccaggtatttattattgctgcaaaatattgcttattatacacattaaaatctatttgcaaagctaactatgcacgttaagtttattcctaattctactgaaattatcagacagaaaactggacgggcgtgatggcttaggtctgtaatcccagcacttttggaggctgatgtaggtggatcacttgaggtcaggagttcaagaccagcctcgccaacatggtgaatccccatctctgttgaaaatacaagaaaaattagccagccttggtggtgggcacctgtatcccaactactcaggaggctaaggcacgagaattgcttggactcaggagtcggaggttgcagtgagccatccctgcactccagcctggacgacagagcaaaactgtctcacaaaaaaagaagaaaacttagtggctgttaacactgaaaatacgtacattgaaatagtgtatcaaattcaagtgaatagcttgtaataaagtgttaaacataaaaagcaaaaaaaaaaggggggggttgttgaacatagacttgcatagacctgtaatatgtacttgaatcaattgatatagctcataacttacatttgtcttagcagatggtagaaggtgtttctatctacagaatctataatcttgtctcaaaatgatttcccaaatgttttcagacttacctcagggcaaacagctcatttccctcaacttcatctctctcttcctgcttatcccaaagtcacaagtctagatcagcagtaagcagcaggtagcccagaaaaggccacactcagccaaatctggtgacctttagctgaatatagatgcgccttgacttacaatggggttacatctggcagagctgaaaagttgagcagcgtacggatgtgttttgcttttgtgccattgtaaagttggaaaatcttgagtctaaccgttgtaaattggggaccatgtatactttagtagttgagtctggtgggtagagaatttatcagttgctttgctttgcaactattatgcagttctaaactcagattggtttggtgtaagaacttttttgagttggatttgctatttttgaaaattattttgaaaattgtattggattatgatatagtcaagtattcagatcttaaatgttcagccaggctgggtgcggtggctcacgcttgtaatcctggcactttgggaggctgaggagggcagatcacttgaggtcaggagttggagaccagcctggccaacacagcaaaaccnnnnnnnnnnnnnnnnnnnnaaattagcagggcgtggtggtgcacgcctgaaatcccagctactcaggaggctaaggcacgagaattgcttgaccctagaaggtaaaggttgcagtgagctgagattgtgtcactgcactccagcctgggtgacagagtaagactctgtctcaaaagaataaaaaataaatgtttagctggataaatttttacttacacccatgaaaccatcaacatgatgaagatagagaacatttccagctccccaggagtatttttcattctcctggagttagtaccctcccatcccagaggcgaccattattctgacttctattgctataccatacttttgcccgttctagaccgtcagataaatggtattatatgtatatcttctgtgtccagctctttttaaaagttggaacatacactttactatctcataaatctattccttttattttcagaagaataaactttttatttatttatttatttatttttagtagagacggggtttcgccatgttggccaggctggtctgtatctcctgacctcaagtgatccgtctgcctcagcctcccaaagtgctgggattacaggcgtgagccaccgtgcccggactacttttttattttttactttgtaacttgttatttagattcaggagtacatctgcaaggtaaactgcatgttctgagggtttgatgtacagataattttgtcacccaggtaataagcgtagtacctgataggtcttttttctgatcctttccctccttccaccctccaccatcaagtaggccccagtgtctgttgttcctctcctagtatccatgtgttcttgttatttagctcctacttacaagtgagaacatgtggtatttggttttcggttcctgtgatggtttgcttaggataatggcctccagttccatccatgttgctgcaaagtacatggtctcattctttttttaatggctgcataacaattcatggtgtatatgtacgatattttctttatcccgtttgccgctgatgggtatctagggtgatttaatgtctttgctgttgtgaatagcagtgcaatgaaagtaagtatgcatgtgtctttatgggagaactgccgagaccagctctgtcagggagaccctaacccagcggtgctagaggaattaaagacacacacacagaaatatagaggtgtgaagtgggaaatcaggggtctcacagccttcagagctgagagccccgaacagagatttgcccacatgtttattaacagcaagccagtcattagcattgtttctataggtattaaattaattaaaagtgtcccttatgggaaatgaagggatgggccaaattaaaggaattggttgggctagttaactgcagcaggagcatgtctttaaggcacagatcgctcatgctgttgtttgtggcttaagaatgcctttaagcggggccaggtgttccttgccctcattccggtaaacccacaaccttccagcgtgagcattagggccattatgaacatgttatagtgctgcagagattttgtttatagccagttttggggccagtttatagccagatttcgggggggcttgctcccaacatgtctcccttctttgatttgcaaagagatataaaagcaaaggcagctttgtcatggtgagctacttctcgcaggagtcaggatccgcatctgcagactatacaaagacaaataacatagattaaaagcacaatcatcattgaaatcacagagcttccaagtgtttttatccattttaatgggttactagctgctaatttgtctgcagctcctttaagcactccagttcctggcattaaggtcaggtgtgcctgggatgctttaaatatttgttcttttaattttgcaatatccaaagacaagtttgtagggtgtccttctagatgcttttttattctttcccaaattttgatcttattaagagcatttaatagtttccacaaatccttatgttaagctcctagagcaggccatatcatttgaggttgaggtgccactatactgctgtggttccagataataggagctcttgccatacttcttatcatttctaccatctgaccgttttgttcagatcacctgaacatagtgtgaccgtggcacacagactgagaggtgcagttcaagctaaacatccccttaggggaccaatcaataatgattccataggaatcattgtgccgcacctctgcctgttctgcagtgcaatcttcctaaacaaatatgttcattatttctggccaggtccagtccttcttagaaataggtttttgagggtagtatgcctcaataataggagcagatttattatggtaaatactgagatcagaaagcatatgtaactgtgtcagagtgattacatctaggcattattgccagccaagattgatgaatatgcctaataagtataattgttctctgtgtcagcccttattgaaggaatactcaaggcagtggtgataaccactatcatagctacctttaaattattcattgtgactggttgtcccgctttcctcaggttttcttctgccgtctgtgacagcttcttgatctgtccccaggtgggtggctctgttcgggtgttgctcatgacagttgggatcctcctcagcgtccgtctcgacatggctgcaatcagggggccctcgggatgctcccgggtctcttactcggcatctggctcatctgataaggtttcaggtgtcttgatggtatccaaatcggctgttgatttttgcctggagaaacacaagcataacctctaccccaaattattattttacctatttactaactttttgtaatcggatctctccaccaaatcagttgttctgcttctgtctttgcagctggtttctgtagatgctgttcagctgctgataacatctggcctttgggcaggctcaaaaaatttaaagttaataatgctaggttcagttgcatctgtggggttccatattctctgtctcctttctgcttttgcaactgctgttttagggagagattcattctttccactatggcttgtccttgagaattgtatgggataccagtaatgtgtttgatattccacatagagaaaaatgtagctagagcttggctagtatagcctggggcattacctaattgttttaatagaagttggaatgcccatcaccgcaaaacactgcacaagatgatgtttaacacaggcagaagactctcctgattggcatgtagcccagacaaagtgagaaaaggtgtccacacatacatgtacataagctagtctcccaaatgagggaatatgtgtgacatccatttgccaaagagagttaggttccaatccccgatgattaactcctcctgtaaaagatgaggactgtaccatttggtaagttgggcatcgctggataatagctttagcttctttccaggtaatgctgtatctgcgtttgagaccagaggcattaacatgggttaaatcatgaaagtgtctagcattaaataattgcattagcaactaggcgatcagccatttgattcctttcaaaggtcctggaaaaggtgtatgagccctaatgtgggtgatgtaaaaaggatgcattctattaactgctgtttgcagttgagtaaataaagtcatcagttgttcatctgcatgaaattgtaactgagcattttcaattaactgtgtggaatgaaccacgtatgaagaatgcttagcaggctgcaggttgtttactgcaggaattgtaaatgtaaaccgttcacagtcttgctcagctaaggggatggtaaagaaacagtctttttaatctatgactattaaaggctctgtcgcccaggctggagtgcagtggcacgatctcggctcactgcaagctctgcctcccgggttcccgccattctcctatctcagtctcccaagtagctgggactacaggctcccgccaccacacccagctaatttttgtatttttagtagagatggggtttcaccatgttagccaggatggtctcaatctcctgacctcgtgatccgcccacctcggcctccccaaagtgctgggattacaagcatgagtcaccacacctggctgctttctttccttttaaagagactattttaattgattttgatcacctctactcaaaactatcctaaggtccacattaggattagtctctaataatctgaagatataattcaattgtttaaaagaacatattaagaagactttggtagaattacatgtatcaagaaacactggacttgggcacaatggagatatggctgacttttgaaaaaagaagtagttttttgggggagggcagggcaaagaggtaggaagtagttggtactataaggaaatgttagagactattttggaaatgtattcattattttaaggcaactaacaaatggtcatctttctgttaggacattgtagcagcagcctttactggtcatgaaatttgcatgatatctaaaattatacttctgtaaataggtcagtgtcgattaatagtaactttgtatagaaaagcagatgccagctggcatagaagtggcagtgtagatgctggtagttctggagtcctggaagctatgagatgccatacatcacaaggccatcacagccaggtagataaatggctgaggaaagcagcggagctggccgtgccagcatttacaaatggaacacttcttgggcagccaggtgtcatggggcacagacccacagttctctttgcacacatcatgctcacagttccgtccatagaaggagagggggcaggcacagaaggaccccagcatgcaggttcccccattcagacagcaggttctgtttagttccttactgtcctgtatctccctgggcggcacaagttgggaagaccgaggatgaattgcaggctcctcctggggctgaatgctgtcatctctgaaggccaggtctccctgagatggacgcgcaagttcctgatggcccaacccttaacgaccttttttgactttttgatgatagccattctgcctgctgtgagatggtattttgttgtggttttgatttgcatttctctaatcattaatgatcttgagcatgttttcatatgcttgttggccacatgtatgtcttttttttttttttttttgattcagtcttgctctgtcgccaagctggagtgttcaagcaattctcctgcctcagcctcctgagtagctgggactacaggcacgcaccaccacgcctggctaattttttgtatttttagtagaggtagggtttcactatgttggctaggttggtctcgaactcctgacctcaagtgatccgcccgcctccgctacccaaagtgctgggattacaggcatgagccacgaccacgcccagcctgtcttttgaaaagtgtctgttcatgttttttgtctacttttcaatggggttgtttgatttttttttttttaacagtaaagtggaagcaagtttattaagaaagtaaaggaataaaagaatggctacaccacagaacagctaggtggtttgttttttacttgtaaatttaagttccttatagattctggatattagacctttgttgggtgcgcagtttgcatatattttcttccatctgcaggatgtttgtttactctgttgatagtttcttttgctgtgcaatagctccttagtttaattagatctcatttgtcaatttttgtttttgttgcagttgcttttggcgtcttcaccatgaaatcttagacaagtcctatgtctaaaatggtatttcctaggttgtctttcgagtttttatagttaggggttttacatttaagtcttgaatccatcttgagttgatttttgtatgtggtgttaggtgggggtccagtttctatcatctgcatatggtcacccagttatcctggcactttttattgactggggagtcctttttcccattgcttgtttttgtcagctttgttgagtatcaaatagttgtaggtgtgtgaccttacttctgtgctgtctattctgtttgattggtctatgtgtctgtttttgtaccagtaccatgctgttttggttattgtacccctgtagcatagtttgaagtccagtaacatgatgcctccagctttgttctttttgcttaggattgccttgtctgtttgggctctttttttggttccatgtgaattttaaaacattttttcctaattccgtgaagaatgtcattggtagtttgataggaatagcattgaatctgtagattgctttgggcagtatggccatttaacagtattgattcttcctatccatgagcatggaatgcatttccacttgtttgtgtcatctctgatttctttgagcagcgttttgtaattcttgttgtagagatctttcacctccctggttagctgtattcctaggtattttattctttttgtggcaattgtaactcacacttttaaaataaaatgtgtgctttttgtacaaaaaaatctcatatcgctgtcatggagcttccttggttcatcttttactgcgtgtgttccattgtgtgtgcactcagtcctgtgtgtgcttgtccacgcccccaccctgtatatatatgtacgtatatatagatgagtctttttttaactcttgagataaacctgcaaacatgatttcctatcacctctaaatactctcatgtgtatttcccatgcacaaggatacttgtacataaccaacatacaacactccaaattaggagatgagcattgattaaacactatatccagtccacagactccattgaagttttgccagctttctcagctgtgtccgtttcctttctggcctgagatcctttccaggagtatgtgttcatttgagctgtcatgtcttgagtctgaaactgtttatcagttcttctttcatttcctttgcagttttaaagcatatagccacagccttcagttctgcatattctgcagagtgactcttcaacttgagtctgtctaatggttcctcatgactgggtccagtcatgcattcttcgtctttatttttggtaccagttttattgacatataattcatataccacacaattcactcatttaaagtgtgtaatttgatggttttagatgtattcaccgtaagttttgcaaccatcaccacagtcaattttagaacattttcattgcctcaaaaagaaaccctatactctttcatttgtgttctattgtaactggcttctttcacttaacattgttttcaaggctcatccgtgctatagcatgtcagtacttccttctcattgttgaatcatactccgttgtatggctgtgcctcattttattttattttattctttatttgagatggagtctcgctctgccgcccaggctggagtacagtggtgtgatctcagctcactgcaacctcctcctcccgggtttgagtgattcttctacctcagtctccccagtcgctggtactacaggcatgcgccatcaagcctggctaatttttgtatttttagtagagacaggtttcaccatgttgaccaggctggtctcgaacccctgacctcaggtgatctgccagccttggcctccccaaagtgctgggattaccgtatgagccaccacgcctggcctcattttgtttattcatccatcatttgatggacatttgggttgtttgcaccttgaagttgcgtaatactgctaaaaaagaacatttgtgtacaagttttttgttgttgtgtttttgtttttgttttgagatggagtttcactcttgttgcccaggctggactgcagtggcacgatctcggctcaccgcaacttccgcctcccgggttccagcaattctcctgcctcagcctcccgagtagctgggtttacaggcatgagccaccacatctgtactggacatattttttcactattcttcggtatagacctaggaatagaattgctggatatggtaacttcatatttatccttttgagaacctaaaggttatctaaagtcgctgcaccatttacatttctaccaacagtgtatgagggttctgatttctcaccataccctttaacacttggctattatttgtcatttttacgataaccattccggtaggtatgaagtggtatctcacagtggttttggtttgcattttctaatgactaatgatgttgagcatcttttcatggtgtattaaccattcatttgtctgagaaatgtctattcaagtcttttgcctatttttttattgagatgtcttttttgtttaattcgaggtaaaattcacatgacataaaactaacccttttaatgtgaacaattcatgacatttagtatattccttttttttttttttaaacgagacagagtctcactctgtcgcccaggctggagtggagtggcacaatctcagctcattgcaatctctgcctcccaggttcaaatgattctccagcctcagcttctgagtagctgggactacaggtgcgcaccacgcccagctaattttcatagatttagtagagacggggtttcaccatgttggccaagcaggtcttgaactcctggactcaagggatctgcccgccttggcctcccaaagtgctgggattacaggcatgagccaccatgcctggccaaagttttttttaaagtattttttcttttccttttacttttagttgatacataattgttcatatttatgggatactgagtgatatattttgatacatgtatacaacatgtaagaatcaaatcagggtaattagcatatccatcacctcaaacatttatcgtttctttgcattgtgaacattcaacaccctttcttctagcattttgaaaatatacactgaattgtagttaaccatattcactcaacagtgctacagaacaccagaatttattcctttcatcattatattgatagccatcctagtgagtatgaagtgatgtatcattggggctttgatttatgtttccttaatgactaatgatgttcagcatcttttcctgtgctttttggccatttgtatatcttctttggacaaacatctcatcaagtcttttgcatattttttaattgggttgtctttttgtttgtgagttgcaagttttttttattatggatactagacactttaattagatgtgatttgcaaacatttttcccactatgtaagttgtcttttcattttcttcatagtgtcctttgaaacacaacagttaattttgatgatttctaatttatctatttttttcttgtcggttgtgcttttgatgttatatctaagaaattgccagatctgaggtcacaaagatgtatgtgtgttttcttctagttttatagttttatctcttacatttaggtatttggtcagtgtttacatatggtatgaggtagcagtccaacttctttgtattacatgtggatatccacttgtcccagctacttttgttaaaaagactattccttccctgttgatttgtttcagaaataagtttgacagtaaatgtgaggttttatttctggattttcggttgatttatatgtctgtctgtactctagtactagtctttctgaatgttacttggtaggaatttttgagattaagaagtgtgagtcctctaattttgttctttttcaagatttttgttgttgttgttattctgggtctcttgagtttccatacaaattttagatcgggttctaatatgtgcaaagtcaggtggtattctgttaaagattgcattgactccatagatcaatttgagagtactgccgtctttaaaatattatatctcccagtccatgaaagtgggatatccttccatttatatagattttcttgtatttcttaatatgttttatagttttcagaaaaaagtctttaacatagctatttacacatatacacatgtgcatatacacaaaactcctatataatatcctggttatagttaatgttatgtaagtattgcagttaatactgttgttactaatctttttatatgtctttaacactttgggggaagtgggttgaaatagaaaaatagttaatagaaaagtatttaacagggggctgggcatggtggctcacgcctgtaattccagcactttgggaggctgaggcagacggatcatgaggtcaggagatcaagaccatcctggctaacacagtaaaaccccgtctctactaaaaatacaaaaaaaaaatttagctggtgtggtggcgggcgcctactcgggaggctgaggcaggagaatggtgtgagcccgggaggtggggcttgcagtgagccgagatcgcgccactgcactccagcctgggcaacagagcaagactctgtctcaaaaaaaaaaaaaaaaaaaattaacattcatcaagactctttgatgtaagaaaggctgaaattactggtactttattctttagtagagataatatgtaaaaagcatcaagtatatggccaaatgtaaataagcaggaaactatatgtataacatgatccctgttttgtaaaatgtgcatctattccttaattgacatgcatgggaaaaatcagaaggaaatgcatcagaaaattaactgtttattcctggctagaaggatttgattatttataatttttcaattattccatgttctgctttgaacgtgtatgtatgtgaacatgtacgcatgaagaaatattaaagttgctggattaaaaaatttttttttcttaagttttctgtagagtgggtcttactatattgtttaggctggtcttaaactcctggtctcaagctgtcctcctacctcagcctctcaaagtgctgggattatagacatgagccaccatgctcagcgaaagttgctgtttttattttatttactcacttatttatttattttgagatggagtctcactctgttgcccaggctggggtgcagtggtctagtcttggctcactgcaacctctgcctcctggttcaagcgattctcctgcctcagcctcctgagtagctgggattacaggcaatgcacaaaaacgcccagctagtttttgtatttttagtagagacagggtttcaccatgttggccaggctggtctcgaactctggactcaagtgatccgcatgcttcagtctcccaaagtgcttgtaagcatgagccactgtgcccaggtgaaagttactgtttttaaatagtgtagtaagcatgtagagatgttagacaactgatttagtttatttatctgaggcttttttctttttcttttttttcttttctttttttttgagatggagtctcgctctgttgcccaggctggagtgcagtggcgtgatctcggctcactgcagcctccacctcctgggttcaagcaattctcctgcctcagcctcctgagtagctgggactacaggtgcacaccaccatgcctggctaatttttgtatttttagtagagatggggtttcactatgttgggcaggcttgtcttgaactcctgacctcaggtgatcttcctgcctcaccctcccaaagtgctaggattacaggcgtgagccactgcacccggccaaggctttttttctttgtgtaaaatgttaattatttctcttgcctactttataaacacattgtataaagacattttaaaaatatatctatagtttggaagttgtgaagccctgtggaaatatctgaaggggcacacactgctgttcagaaatctgagaaatcatccttatccctaggtaaaacttaacagctgctgggttctttttagattcatggtgttgttttaatagtattgagggcccacattttaaagatatttttaggccgggtgtgatggctcacgcctgtattcccagcactttgggaggccgaggcgagcggatcacgaggtcaggagatcaagaccatcctggctaacatggtgaaaccccgtctctactaaaaattagaaaaaattagccgggcgtggtggcgggcacctgtagtcccggctacttgggaggctgaggcaggagaatggcgtgaactcgggagaggtagcttgcagtgagccgagatcgcgccactgtactccagcctgggcgacagagcgagacgccatctcaaaaaacaaacaaacaaaaaaaaaccatatttttaggatttaacatttatcttcacaattttttaaagctactcttctgctacttacttactgggatttaaaacagtgtctaatagcattattcaatgatttttccaccaggcacggatgggcagaagcctttgcaggtatcagaagttcacatatcaaatatatctgcccgcatgcgtgagtatttctgatcttcaggcttgtgattcagagtctggagaggagcaattgtgattgctttacccttccagaaaagtatttgaatacagttaatttttactttttaaatattgtttaaaaataaagattagtagaattccttaaaactaaaatggtttcttaggtaaattgatttttttctttttctctttcgttaagcaatttaaaatattgctgtcttggaggtcagctgaacttaagaccagaaaaattattttatttatttatttatttatttatttatttatttttgagacagagtctcactctgccacccaggctggagtgcagtggcgtgatctcggctcactgcaacctccacctcctgggttcaagcgattctcctgcctcagcctccagagtagctgggattacaggtacgtgccaccacgcccagctaatttttgtatgtttagtagaggcagggtttcaccatgttggccaggctattctcaaatgcctgacctcaagtgatcgacctgccttggcctcccagaaaaattatcttagatatacaaatatctataaagttctaggatatccctagggtatctctgaaggggatttacctgttagatttgtgagaactctttattacgttgaaaacactctttaattttatcgtttggggcaatgttgatgtactgtggaaagagcacagactttggaatatgataggtattgttttgaattctggctctgaaagttttgagcaaacttagaagatcaataagattggcacattaggtcaagcttgtccaacctgtggcccaggtcagtttgaatgcagcccaatgcaaattagtaaactttcttaaaacattatgagatttttttttttgcgatttttaaatattattttattttttacctcatcagctattgttagtgttaatgtatttttatgtgtggcccaagacaattcttcttccaatgtagcccagggaaaccaaatgattggacacccttgatttaggtcaaaaagttgctgagaagcaataaccatggagaagacaagaagggattggacatactcatgtcagttagtaattcatccccagaagtggtagtagcagtagagttgggacagatacataaacatgaaagagggaatgggaagaagaataacagctgagaagattggataagaaaacatttcttcctctttttatcctgaaatacagtctgtcttacctctaggctacagtgaatactgtggctagggttgctatgtcctctatcattctgctcaagcaagagacagaattctttttattctttttctttttttttgagatggagtctctctctgttgcccaagatggagtgcagtggcataatcctggtttactgcaacctctgcctcccgggttcatgcgtttctcctgcctcagcctcccaagtagctggaattacaggcgcctgccaccatgcctggctaattttttgtatttttaatagagacatggtttcaccatgttggccgggctggtctcaaactcctgatctcaggtgatccgcccgcctcggcctcccaaagtgctgggattacaggcgtgacccaccccgcccggcccagaattcttaattacgttggaatggatattgatatttgccccaagttgaactgctttaaaaggctgttgcccaacctaggaagtttgtattttcaaagaaattttgatacagtttgtaacctctaaggtggacttacttcatgaatcaggaggaaagtggtgagatgtagttagagtgtgcttatttttctttcctttggatggagctgaattcagattatctagcatatttttaatcacagacttgaattggctataatggacacttaggcaaattttggatttcccttatttatttagaggtctcttaagcaagtacatagctaagaactagaaaattaggaaaagtgtaatctgagcatatgagaattgatgctacagtatcagtgtaataaatcactcattgtccttagccctataccggaatctcgtgttttatacatttccaactgtcttggtttctggtttctcttctcgtgtctgagaagtcaaaagtagtaagtaagggtgttgagaagggaaaatgtatctgtcaagcttcgtcctttgttgctgttgctctgtcttcagaacacatttggaggggcgtggaaagcagagttgtacaggtgtggatgaaataaaacagttcatatgttaaaactgtagcatatagttttgtgtaggtctcaagcaattatctgtttttgattaatggaatttatcagtttttatgctttgttattctgattttgttgttttttcttttccatgtaggcctgttaggcctgttacattaaatatgaacgtggctatgccttcatggtaagtaagaatttacttattgaataagaacattatattacttatttaatgttatcagaaatgcttttgtgtacagcagtttttatttagctgttttttaaattgcaaagttgcatagttaacctctatttacattttcatactctggatttaggggtaaacttaaggagctgtacatacaggtagaggaaataggagagagtgtttgaataaaaatcatgtgggagaatatcttctgctgcttgataaacctttgttggttttagtaacccaacattcgaatgacccctattaaaccacagcctcttcatctttccaatttcttgcctgtctgggttgtttttaaggaaaccgcttcccttccagccctctgaagatatcctcacattccctctgcactttactgtcagaaagtagggtcagttttttgttcctatgtgctacttccagactatgatttttcctaactgttctctgagactcctaacatcaggtctgttaaaaaacgatgactttagccgggcatggtggctcacacctataatcccaacactttgggaggcagaggcaggctgatcaactgaggtcaggagttcaggaccagcctggccaacacagtgaaaccccatgtctactaaaaatacaaaaattagccgggtgtggtggcatgcacctgtagtaccagctactcaggaggctgacacaggagaatcgcttgaacctgggagggggaggctgcagtgagcagagatcatgccactgcacttcagcctgagcaacagagtgagacttcgtctcaaaaaataaataaataaataaataaataaataaataaatagtgagacttcgtctcaaaaaataaattaattaaatagataaattaaataaaataaaacatatttctggttagccttttaatccaagctaccatgaatgtagtaaaatatacttactacaataatagatttttcttagaatcaaaagattttgccttattttacaggtttgatattattgggctttcaccagattcacaggaggatgaatctgggattaaacaggcagcagaaaatagtaagtacagaaaatgtttataaagccaaaagtgttcttaaatgtttttagtagatttagtaatcatatcgctactggttaaaaattacacatttgggccgggcacggtggctcacgcctgtaatcccagtactttgggaagtagaggcgggtgggtcacctgaaggtcaggagttcaagaccagcttggccagcatggtgaaaccccatctctactgaaaatacaaaaaattagctggatatggtggtgggcgcctgtaatcccagccacttgagaggatgaagcaggatagttgcttgaacctgggaggtggaggttgcagtgagctgagatcgccccactgcgctccagcctgggcaaccagagcaaaacttcatctcagaaaaacaaaaacaaaaacaaaccaaaaaaaaccacatttatctaatctcaggaggtactgctgtttccttccttttaccccctgccccccagagagggtcttgctgtgtcacctagcctggaatgcagtggcgtgatcaaagctcactgcagccttgacctcctgaactcaagcgacccttccacctcatcctcctgagtaggctgggaccatggaggcgcacaccaccatgccccgccaggttttaattttttctttttgtagacacagggtctccctgtgttgcccaggcttgttttcctttctggtcactctgttacttgtttgccacagtgtccgcatggactcacttgagtataggcaatggagatgaggtggatggggacaaatggcatttatcaactttaaactctgtcagacgtataataatttttctttgatttacataggaaaatggagaaaacagcagaatgtttatatagttttggccggccgggcgtggtggctcacgcctttaatcccagcactttgggaagccgaggtgggcagatcatgtgaggtcaggagttcgagaccagcctggctaacctagtgaaaccccgtttctactaaaaattaaaaaattagctgggcgtggtcacgcacgcctgtaattccagctacttgggaggccgaggcaggagaatcgcttgaacccaggaggcagaggtttcagtgagccgagattgcgccattgcactcaggcttgggcaacaagaatgaaactctgtctcaaaaaaaaaaatagttttggccagttatcttcattaaagagacttggaataacagtgaaaataatgatataatgagtataatgataagaaacagtgaaaatgtggtcaagtgcggtggctcacgcctgtaaccccagcactttgagaggccgaggcaggcagatcacctgaggtcaggagtttgagaccagcctggccaacatggtgaaaccccgtctctactaaaaatacaaaaaaattagccaggcgtggtggcgggcacctgtaatcccagttactcaggaggctgaggcaggagaatcgcttgaacccagtaggtggaggttgcagtgagctgaggttgtgccattgcactccagcctgggtgacagagggagactgtgtctcaaaaaaaaaaaaaaaaaaaaaggaagaaaaaagttgttaatgttagtgcggtaataataacacgtgccactgattgagcacataactgtttacaagctaggtgtttcttacagggcacctcatttgacaccgctgtgaagtattagctctgctttacaaaacctcgaaagcctggtctctggttaggagtccatctcctttatgattatggtaattctagttgttcggagggagaaacagaatactaacttactgggacgtgtctatttttaacaaatgcacaggaggccgggcacggtggctcacacctgtaatcccagcactttgggaggctgaggcaggcggatcgcctgaggtcgagagttcgagatcaggctgaccaacatggagaaaccccgtctctattataaatacaaaattagccgggcatggtagcgcctgcccgtaatcccagctacttgggaggctgagccaggagaattgtttgaacctgggaggcagaggctacagtgagctgagatcccactgttgcactccagcctgggcaacaagagtgaaactccgtctcaggaaaaaaagaaagaaagaaatgcacaggtgcacaggaatgtgcttttcttttacatatgtgtactgaaatattgacaagtataataatgtgaggactgggattgccttcaggaaaatctggttggtgactcttgagtgtgggtgggtgtaggtgggtgtgggcagcaatggcaaggcaggctggctgtgaattgttttgctttttggtaattttttatttacatagttacttagagactgtcgcccaggttagagtacagttggtgatcatatctcactgcagcctcaaattcctggtctccagcaactctcccgcctcagcttctgagtagctgggactacaggcatgtgccaccatgcctggctaatttttaaactgttttgtagagatgaattctcattatgttgtccaggctggtgggaaactcttgccctcaggtgatcctccccaaaagtactgggattacaggcatgagccactgagcgcagcccttttgttttaaaagaactctttaaggtctttaaaacagggaaaatggccgggcgcggtggctcacgcctgtaatcccagcactttgggaggccgaggcgggtggatcatgaggtcaggagatcgagaccatcctggctaacaaggtgaaaccccgtctctactaaaaatacaaaaaattagccgggcgcggtggcgggcgcctgtagtcccagctactcgggaggctgaggcaggagaatggcgtgaacccgggaagcggagcttgcagtgagccgagattgcgccactgcagtccgcagtccggcctgggcaacagagcgagactccgtctcaaaaaaaaaaaaaaaacagggaaaatacattcaaaagatgtgagatatttgggaatgtcaaaccaacaacactgacttatgggatcattaaaaagtagattagagttagaatcctagagttgggattttgtctgaaaataatagatgacaaaagtatgagggtaagtgttagatgctatggaaaacagggagggcctgggccctgtgaagaagatacgtgggcctcatgaggtccagaatgaaagattctgtcctaacaatagagttggcctatgaaatacttgttacttctttcctctctgaaaattcctctcagagaaaattagaatcagactcagccaggaaagaaaaaacaaaagagaatgtgctactgaacaaagaagacagtgctcaggttacatagttgggggtacatagtgcccttacccttaggtgaaaggtgattgaggccaagggatgttgctcatacctgtaatcctagcactttgagaggctgaggcaggaggatcacttgagcccaggggttcaaaaccagcctgggcaagagtcgctacaaaaaaaaaaacaaaattagctgggcgtggtggcgcatgtctgtggccccctcagctgcttgagagtctgaggtgggaggattgcttgagcctgagaggtcagcaacagagtgagaccctgttttgagagagagagagagagagacagagacagagacacagagagagagtgtgagcgagcaaaagagatttattctggtttttttttgtttgtttttgagatggagtcttgctctcttgctcaggctggagtgcagtggcgcaatctcagctcactgcaacctccacctcctgggttcaagttattctcctgtctcagcctcccaagtagctaggactacaggcctgtgccaccatgcccggctacgttttgtatttttagtacagacggtgtttcaccatgttggccaggctggtctcaaactcctggcctcaagttgatctgctggcctcagccttccaaagtgctgggattacaggcgtgagccactgtgcctggccaattctgtgattttttttaaaaaacaatagaatgaatggttttaaacactttttaaaccattaacttaactacgtacaacacttaactacgtacaattttaaacacttaactacgtacaattttaaaatgacaacttttaggtacaaatgcctatggttcattgaagagagaaacatggaatatatatgagcagaattaactattaattttttaaaaatccatctcttgatgagagaaagaactgttgttaacaaaatatttaatgggaaattattgaagttttaattaaaattttatttttttattttcaatttttgtgagtacataggtgtacatatttatatgtacgtgagatgttttgatacagggatgcaatgtgaaataagcacatcatggagaatggggtgtccatcccctcaagcgtttatcctttgagttacaaagaatccatttacactcttgtaagttattttaaaatgtacactaagttactattgactatagtcaccctattgtactgtcaaatggtaggtcttattctattttttttgtacccattaactagctacacctcacctccagcccccttctacccttccagcctctgataaccatacttctactactgtctgtgtctgttagttcagttagttttagatcccacaaaaaagtgagaacatgcaatgtttgtctttctgtgtctggcttatttcccttaacataatgatctccagttccacttgtgttgttgcaaatgactggatctcattctttttttatggctgaatagtacttcattgtgcatatgtaccacattttcttcatccagtcatctgttgatggacacataggttacttccaaatcttggctattgggaacagtgctacaacaaacatgggagtacagatatctcttcaatatactgatttcctttcttttgggtatatatcccaaaagatatatacccaaatatagttaaaagaaagatactttcttttgagtatatatccagtgggattgctggttcatatggtagctcaatttttagttatttgaggaacctccaaactgttccccatagtagttgtactaatttacattcccaccaacagtgtatgagggttctcttttctccacatccttgccagcatttgctattaactgtcttttgaataaaaaccattttaactggggtgagacgatatttcattgtagttttgatttgcattttgctggcgatcagtgatgttgggcaccttttcatatgcctgtttgccatttttatgtcatcttttcggaaatgtctattcagatctttggcccgttttttttgttcttgtttgttttgagacagagtcttgctctttcgccaggctggggtgcagtggtgcaatcttggctcactgcaacctccgtctcccgagttcaagtgattctcctgcctcagcctcccaagtagctgcgactacaggtgcgcaccaccatgcccagctaattttttaatctgtagtagatacggggtttcaccacgttgggcaggatggtcttgatcacttgacctcgtaacccaccctcctcggtctcccaaagtgctgggattgcaggcatgagccactgtgcccggcctggcccattttttgatcagattattagatttttttcctatagagttgttaaagctccttatatattctggttattaatcccttctcagatgggtagtttccaaatattttctcccattctgtgggttgtctcctcactttgttgattgtatcctttgctgtgcagaagctttttaacttgatgtgatcccatttgtccatttttgctttggttgatatgcttgtggggtatttctcaagaaatttttgcccagaccaatgtcctggagattttccccaattttttctcgtagtagtttcatagtttgagatcttagatttaagtgtttattgtgatttgatttttgtatacagcaagagatagggtctaattttattcttctgcatatggatatccagttttcccaggaccatttttattgaagagactgtcttttccccagtgtatgttcttgacacctttgtcaaaaatgaattcactgtaggtgtgtgtgtatagatttgtttctgggttctctattctgttcctttagtctgtgtgtctgtttttatgccagtaccatgcagttttggttactatagctctgtagtataatttgaagtaaagtaatgtgattcctctagttttattctttttgcttagggtagctttggctactctgagtctttcgtgattccatataaattttagggggctaggcacggtggctcacgcctgtaatcctagtactttgggaggccgaggcgggcggatctcgagttcaggagatcgaccatcctggctaacacggtgaaacctcgtctctactaaaaatacaaaaaattagccgggcatggtggtgggcacccgtagtcccagctacttgggaggctgaggcaggagaatggcatgaatccagtaggcggagcttgcagtgagccaagatcacgccactgcactccagcctgggtgacagagcgagactttgtctcaaaaaaaaaaaaaaaataattaggattgtttttctatttctgtgaagattgtcattggtattttcatagagattgcattgaatctgtagattgctttgggtgatttgggaaaaatattccatggtcatggattagaagaattcatgaacaataacaatcaatattgttattggttcttcttatccatgaccatggaatcttttttccattttttggtgtcctctttcatcagtgttttatagttttcattatagagaccgttcacttctttgtttaattcctaggtatttaattttatgtgtgactatcggaaatttgatttttttaaaatttccttttcacgttgttctccgttggcatatgaaaatacattctaattttgtattttaatgaagtgctttgaatttttcactcatttccaccttaaaagtaattgcgcttttctattactaattttttcctaatttaaattttatcagtgggcttaactctgaaagtattgctgactaactttcatgttgtttttagtaaaagctttgattgatcaagaagtgaagaatggcattccttctaacagaattattttgggagggttttctcaggtaagataaaatttgagtggaatgtcagtaccatcagtatacttatttagaagtctgtgcattaatcctttctatagagtagtcttttttgatgttatagaatcttgactgatacacttacctttgatgtttaattaagtttcagtgtactggaactaattaatttcttcttgaaagaactataatacacatgtacacatgtaattaaatttctaagttaacacagtttatccttttaattaattaaaactgataacacaggcatgagtcccctctataggaggagactactgataggaacagtaaagtggaagacaagagaatttcttccctttaccttcacgtattgacaggttttaggtatgaatatgtggtgtttatttttggcatttttctttgtctctgtactttttcccctgctttctgtactccctccacagacgtagcttcctcatacggacctttctttcatggctactgcggcatataagctgtttgccatggaaccagtccccagatgctctaacttatcatctgtaaatcttctaagttagcaacttagtgtttggattaccttaattagggagatgtttggattaccttaattagggagatgtcagaattctgaaattatttagaagatagaattcagtagaaagatttgttgatacaatatagtgaaaaggtgttactgatttggtgtttgttgaaattcacagataatgtatattgtaatacacattgtgacataaacatagggacagaaattaatgatccaggccaggcacggtggctcacgcctgtaatcccagcactttgggaggccaaggtgggtggatcacttgaggtcaggagttcgagaccagcccagccaacatggtgaaaccctgtctctactaaaaatacaaaaattagccgggcatagtggtgcacgcctctgtaactccagctactccggaggctgaagcaggaaaatcacttgaacccaggagccagaggttgcagtgagccaagatcgcaccactatnnnnnnnnnnnnnnnnnnnnnnnnnnnnnnnnnnnnnnnnnnnnnnnnnnnnnnnnnnnnnnnnnnnnnnnnnnnnnnnnnnnnnnnnnnnnnnnnnnnnnnnnnnnnnnnnnnnnnnnnnnnnnnnnnnnnnnnnnnnnnnnnnnnnnnnnnnnnnnnnnnnnnnnnnnnnnnnnnnnnnnnnnnnnnnnnnnnnnnnnnnnnnnnnnnnnnnnnnnnnnnnnnnnnnnnnnnnnnnnnnnnnnnnnnnnnnnnnnnnnnnnnnnnnnnnnnnnnnnnnnnnnnnnnnnnnnnnnnnnnnnnnnnnnnnnnnnnnnnnnnnnnnnnnnnnnnnnnnnnnnnnnnnnnnnnnnnnnnnnnnnnnnnnnnnnnnnnnnnnnnnnnnnnnnnnnnnnnnnnnnnnnnnnnnnnnnnnnnnnnnnnnnnnnnnnnnnnnnnnnnnnnnnnnnnnnnnnnnnnnnnnnnnnnnnnnnnnnnnnnnnnnnnnnnnnnnnnnnnnnnnnnnnnnnnnnnnnnnnnnnnnnnnnnnnnnnnnnnnnnnnnnnnnnnnnnnnnnnnnnnnnnnnnnnnnnnnnnnnnnnnnnnnnnnnnnnnnnnnnnnnnnnnnnnnnnnnnnnnnnnnnnnnnnnnnnnnnnnnnnnnnnnnnnnnnnnnnnnnnnnnnnnnnnnnnnnnnnnnnnnnnnnnnnnnnnnnnnnnnnnnnnnnnnnnnnnnnnnnnnnnnnnnnnnnnnnnnnnnnnnnnnnnnnnnnnnnnnnnnnnnnnnnnnnnnnnnnnttacctttggtggtcgaaaccctccccttggtgggaattctaataccatttaagggccaggcacggtggctcacacctgtaatcccaacactttgggaggctgaggcgcgtggatcacctgaggtcgggagtttgagaccagcctaaccaacatggagaaaccccgtctctaccaaaaatacaaaattagccgggtgtggtggtgcatgccaacaaacccagctacaagccacgctgaaccagaagaaaaccccgaactcaggaggcggaggttgtggtgagccaagattgcaccattactctccagcctgggcaacaagagtgaaactccatctcaaaaaaaaaaaaaaaagtaataccaatttaagagcagattggattttatgcctaaaattctgcaaaggagaaaatataaattcagaatattcgtaaggcatgttgtaagtgcagcagtttcccatggtacaaactatgtctcgtcggaaaggaagtctgtatgttctctggtgtagagaaccgcatcctttaggacacggtggggttgtgtttgtatttccgatatttgcctgatttgatttgacaccagccaccaagtttgatttttttatggatatcattagtaacaagatattccctaaattgctgtgggcaagcatgtgtgttccattgactttccctgcttgtcttttcagggaggagctttatctttatatactgcccttaccacacagcagaaactggcaggtgtcactgcactcagttgctggcttccacttcgggcttcctttccacaggtaacttggttgatgcactcaacatgagattactgagctaaaggtagctagtagatattgttggagataaagtcatcttatttttttttattaataaactttattttttggagaagttctaaattcacagcaaaactgagcagaaggtacagagttactatctacctcctgtccccacacatgcacagcctccccaccatcagcatccccacctccacagccatgtttttgctgcagtcagtaatgctgcactgacacatcaccatcaccaagtcctccacttacagcactcatccttttttaaaaataattttcttagacttttgtgatgtattactaggccttatttctgtacgctatactgtctgtattgtggagtacatagaatggaattagaaagaaaccttattgtcacaaatcttatattagaaggatttgatacattttaggatatatatgaaaattaggactttttttaacatatagaaatcatacttatttttagaccaggtgcggtggctcatgcctgtaatcccagcactttgggaggctgaggcgggtggattacctcaggtcaggagttcaagaccagcctggccaacatggtgaaaccccatggctactaaaaatacagaaattagctgggcgtcgtggtgcacacctataatcccagctactcaggaggctgaggcatgagaatcacttgaacccaggaggtggaagttgcagtgagccacgattgtgccacttcactccagcctgggtaacagagcaagactctgtctttgggggaaaaaaaaaaaaaaagatagctgaataaaacagcaactcaaaatactaaaacaaccaaccaaacaaacaaaaaaaagctgaaaatataaagatggattaaaatataatctgcttggctgggtgcagtggctcacgcctgtaatcccagcactttcggaggccaaggcaggtggatcacaaggtcaggagattgagaccatcctgggtaacacagtgaaaccctgtctctactaaaaaatacaaaaaaattagctgggcgtggtggcacgtgcctgtaatcccagctacttgggaggctgaggcaggagaattgcttgaacctgggaggcagaggttgcagtgagctgagatcacgccactgcactccagcctgggcaacagagcaagactccgtctcaaaaaaactaaacgaaacaaaaaaatgtatatataatctgcttcaaggaactcattcactgggaagatatatattataatatgaggcaaggtgatcatacatcctatagaagtcaaagggatgtggtgagtatatggatgaaggaattttatttttttggccaaatgtaacttctaatatgttatatatatgcatatttatgtacaattttaaatgcctggcatagtgtcctatacttttacaaaaataaaactatttcttcttttgctttttgcagggtcctatcggtggtgctaatagagatatttctattctccagtgccacggggattgtgaccctttggttcccctgatgtttggttctcttacggtggaaaaactaaaaacattggtgaatccagccaatgtgacctttaaaacctatgaaggtatgatgcacagttcgtgtcaacaggtaggtgtctagaagcagtgatcagcgccatatttgtaacttttttcatgtgatattttcaagaaaagtaacatttgaatgcttggggatttaaatgagttaattcatattgagtcataagttagcagtcattagatgagtgtgtattcaacttaattcaacaaatatttactgattggctattatacacagcattgtacataattcaaagatgaataataaacattccctttcattaaaatttaagataaaatttaatagaaagatgcatgtctaagtaactgtatggatagcagaatgtgatatacattgtattagaagctttaaaaagtgcccttggaaaataacaaaaggtgccctgaaaaactgagaagagattaattttatcttaggaggcactgagaccatgatgaaacagctagattttgaaaaacggtgggatttggatagcaaatgtgcagagaaagaactataggacaggaaaagcaagccattcagtcttaggaaaagctgggcatgataggacagaagacatagggaacagagactctttgtgctgagaagggacttactagacttactctctaggcagcaggaagctgtcagtgtttttggttgaagtgagatgtgatctgatctacattctagagacaggtgatccagcaggatttagagattaattatgtggggtgtagtaaccaaggaagtatcaaaagggcctgagatttctagttctgatgccatcataaaaagtaggtgcaagaaacagttttagagtaaaggaaggagataatactgagtttaatgtattgagatcaatgtgcccccacaatatcaaaataggatattggaaatacttgttctgaagttcaagcctggaaatggagatttgaaataattactaatataattgatcaacgaagaattatcttgagaaagcattataagaaaaaaagctcagggatagaactttgggggacacattacagtttagcctaatgagaaaaggagttaggtgttgagagtatgggtggagagaatttcagagtgggaaggagatgtgtaatgtgttccagagaaggattaaggagaaatagtttaggaagaaagtacccaatattaagccacctgtgaccttggatgtttgggtagataaagccaaaatgcaaaggattgtatgaagtggatagggaaatgaggaagcagaggcaacatgtatagaccttttaaaaaagttttggtaaacaggaagaagagtaggaaatctgttcttcagtgggatcagagaaagacctatgagtggaaggagggaggaagaagatgcagtaaagagaagataattgatagaggcattctcagagggatcatagaatagaattaagtcctgagatgtatagtgcttgccttaaaagaggagaaaaccattttcaatcaagatagaagaggacaggccgggtgaggtggcgggcacctgtggttccaattactctagaggctgaggcgagaggatcacttgatctccggaggttgctgctgcagtgagccatgttggcaccctgcactccagcctgagtgacagagtgagaccctaaaaaaaagaaagaaaggatggatgaatataaacaggagatggagagagaagagagtgcttgggagctcatattagatgtgcttatcttttcagtcaagtagaaggtgcgatcacttgatagaatgaaggaggccggaggcctggataggtctggaggcttgagaagacctagagtaaaaattgattcctagtgagatagtcatactgacagttttacaaccactcagcctgggttaaataatttagggacggagaaagaggtggtaatatgatttatccagaaagacaagggtgcctgggaacctgaacctagggtgttctcctactgatatagagtattacagtgttgaatccagaaaagagagggcaggggaagtcctggaacccttaatgtgtgcaagagggactgaaggtctctagagcagctgttttcttcatgggctttgtatcacaaataccttggagcttcataaaagctctatagatgagtctacaacaactctgggctgaatgaggaggagcagaaaatgaggagaagtaggatagtgggaggtgatctcacaggaaactctttgggacttcagagtattgtgaaatagaacactttcatgctggggctcttttctgagtgactaaattacaaggctgaaggttagctgcattgctactatttggcactgtgaggctaagtaaggccttgaaatataagagctgatagcaggaagtgagtttgagggaggtgagaaaactgagccaaatgcaagaggctaagaggagaaagtttcttctatgataaatctttggtatattaatgttcatatcttcccaggaacatcttaggtacatgctctctatcaaatggttagttgtatgtaattctttatgaaagacacagcatagttaatgctatggatttagcgcataattcagtttgaagaatggtagaagctctgctttgtcactcatacttagttgtcagtaattgttcacttactgagacttctcagtgtaggcaccatcgcttctaaacttccctgccccccagtgtcttatattgttccagtataggaagatgcagaactagatactggatgggagctgtcatttcagtgtacaataatcatgataggaaatgtcctgaaatttctgttggagcctcatttctcttttgtcttatttaattgtagtaaaaatgtgatttcgcctttatgcataccatagatttgattagtggcattttagtgggaatttaatttctgacttacataactacctacctattaaattactttattccaaacaggaaatgatggatgtcaagcaattcattgataaactcctacctccaattgattgacgtcactaagaggccttgtgtagaagtacaccagcatcattgtagtagagtgtaaaccttttcccatgcccagtcttcaaatttctaatgttttgcagtgttaaaatgttttgcaaatacatgccaataacacagatcaaataatatctcctcatgagaaatttatgatcttttaagtttctatacatgtattcttataagacgacccaggatctactatattagaatagatgaagcaggtagcttcttttttctcaaatgtaattcagcaaaataatacagtactgccaccagattttttattacatcatttgaaaattagcagtatgcttaatgaaaatttgttcaggtataaatgagcagttaagatataaacaatttatgcatgctgtgacttagtctatggatttattccaaaattgcttagtcaccatgcagtgtctgtatttttatatatgtgttcatatatacataatgattataatacataataagaatgaggtggtattacattattcctaataatagggataatgctgtttattgtcaagaaaaagtaaaatcgttctcttcaattaatggcccttttattttgggaccaggcttttattttccctgatattatttctatttaatactcttttctctcaagaaaaaaaaaaagtttgttttttctttattgtccttcatagcaggccaagtattgcctctctgcaatagacagctactgtcaatacatgctgtaatttgacattctgggtcacagatataaggtatttaaaatctatttatgctttatagagaaaccagacattaaaacttcatgcactacttatttcgaattactgtaccttatccaaatttacacctagctattaggatcttcaacccaggtaacaggaataattctgtggtttcatttttctgtaaacaactgaaagaataattagatcatattctagtatgttctgaaatatctttaagactgatcttaaaaactaacttctaagatgatttcatcttctcatagtatagagtttactttgtacacgtttgaaaccaactactgtagaagatgaggaatctattgtaattttttgctttattttcatctgccagtggacttatttgaaattttcactttagtcaaattattttttgtattagtttttgatgcagacataaaaatagcaatcattttaaattgtcaaaatttccagattactggtaaaaattatttgaaaacaaacttatgggtaataaaggctagtcagaaccctataccataaagtgtagttaccatacagattaatatgtagcaaaaatgtatgcttgatatttctcaactgtgttaatttttctgctgtattccagctgaccaaaacaatattaagaatgcatctttataaatgggtgctaattgataatggaaataatttagtaatggactatacaggatgttaataatgaagccatatgtttatgtctggatttaaaaattttaaacaatcatttactatgtcatttttctttaccttgaagaacataaactgttatttcacttctacaaatcagcaagatattatttatggcaagaaatattccattgaaatattgtgctgtaacatgggaaagtgtaaatgtttttcatggtttctatcaatgtgaaataaaatttaattctgacttttctgtg

SEQ ID NO: 62 - DNA, 2471 bp, Homo Sapiens
agggcagggcggaccctggacgcgcgggcgcgcgcggaaggtagcgcggggccgcgttggcgcgcacgcgcctgagcgtgcgcccggtggggccggccgggactcgccgctcgcacgcccttgggccgcggccgggcgcccgctcttccttccgcttgcgctgtgagctgaggcggtgtatgtgcggcaataacatgtcaaccccgctgcccgccatcgtgcccgccgcccggaaggccaccgctgcggtgattttcctgcatggattgggagatactgggcacggatgggcagaagcctttgcaggtatcagaagttcacatatcaaatatatctgcccgcatgcgcctgttaggcctgttacattaaatatgaacgtggctatgccttcatggtttgatattattgggctttcaccagattcacaggaggatgaatctgggattaaacaggcagcagaaaatataaaagctttgattgatcaagaagtgaagaatggcattccttctaacagaattattttgggagggttttctcagggaggagctttatctttatatactgcccttaccacacagcagaaactggcaggtgtcactgcactcagttgctggcttccacttcgggcttcctttccacagggtcctatcggtggtgctaatagagatatttctattctccagtgccacggggattgtgaccctttggttcccctgatgtttggttctcttacggtggaaaaactaaaaacattggtgaatccagccaatgtgacctttaaaacctatgaaggtatgatgcacagttcgtgtcaacaggaaatgatggatgtcaagcaattcattgataaactcctacctccaattgattgacgtcactaagaggccttgtgtagaagtacaccagcatcattgtagtagagtgtaaaccttttcccatgcccagtcttcaaatttctaatgttttgcagtgttaaaatgttttgcaaatacatgccaataacacagatcaaataatatctcctcatgagaaatttatgatcttttaagtttctatacatgtattcttataagacgacccaggatctactatattagaatagatgaagcaggtagcttcttttttctcaaatgtaattcagcaaaataatacagtactgccaccagattttttattacatcatttgaaaattagcagtatgcttaatgaaaatttgttcaggtataaatgagcagttaagatataaacaatttatgcatgctgtgacttagtctatggatttattccaaaattgcttagtcaccatgcagtgtctgtatttttatatatgtgttcatatatacataatgattataatacataataagaatgaggtggtattacattattcctaataatagggataatgctgtttattgtcaagaaaaagtaaaatcgttctcttcaattaatggcccttttattttgggaccaggcttttattttccctgatattatttctatttaatactcttttctctcaagaaaaaaaaaaagtttgttttttctttattgtccttcatagcaggccaagtattgcctctctgagaaaccagacattaaaacttcatgcactacttatttcgaattactgtaccttatccaaatttacacctagctattaggatcttcaacccaggtaacaggaataattctgtggtttcatttttctgtaaacaactgaaagaataattagatcatattctagtatgttctgaaatatctttaagactgatcttaaaaactaacttctaagatgatttcatcttctcatagtatagagtttactttgtacacgtttgaaaccaactactgtagaagatgaggaatctattgtaattttttgctttattttcatctgccagtggacttatttgaaattttcactttagtcaaattattttttgtattagtttttgatgcagacataaaaatagcaatcattttaaattgtcaaaatttccagattactggtaaaaattatttgaaaacaaacttatgggtaataaaggctagtcagaaccctataccataaagtgtagttaccatacagattaatatgtagcaaaaatgtatgcttgatatttctcaactgtgttaatttttctgctgtattccagctgaccaaaacaatattaagaatgcatctttataaatgggtgctaattgataatggaaataatttagtaatggactatacaggatgttaataatgaagccatatgtttatgtctggatttaaaaattttaaacaatcatttactatgtcatttttctttaccttgaagaacataaactgttatttcacttctacaaatcagcaagatattatttatggcaagaaatattccattgaaatattgtgctgtaacatgggaaagtgtaaatgtttttcatggtttctatcaatgtgaaataaaatttaattctga

SEQ ID NO: 63 - protein, 230 aa, Homo Sapiens
MCGNNMSTPLPAIVPAARKATAAVIFLHGLGDTGHGWAEAFAGIRSSHIKYICPHAPVRPVTLNMNVAMPSWFDIIGLSPDSQEDESGIKQAAENIKALIDQEVKNGIPSNRIILGGFSQGGALSLYTALTTQQKLAGVTALSCWLPLRASFPQGPIGGANRDISILQCHGDCDPLVPLMFGSLTVEKLKTLVNPANVTFKTYEGMMHSSCQQEMMDVKQFIDKLLPPID

SEQ ID NO: 64 - DNA, 2568 bp, Homo Sapiens
agggcagggcggaccctggacgcgcgggcgcgcgcggaaggtagcgcggggccgcgttggcgcgcacgcgcctgagcgtgcgcccggtggggccggccgggactcgccgctcgcacgcccttgggccgcggccgggcgcccgctcttccttccgcttgcgctgtgagctgaggcggtgtatgtgcggcaataacatgtcaaccccgctgcccgccatcgtgcccgccgcccggaaggccaccgctgcggtgattttcctgcatggattgggagatactgggcacggatgggcagaagcctttgcaggtatcagaagttcacatatcaaatatatctgcccgcatgcgcctgttaggcctgttacattaaatatgaacgtggctatgccttcatggtttgatattattgggctttcaccagattcacaggaggatgaatctgggattaaacaggcagcagaaaatataaaagctttgattgatcaagaagtgaagaatggcattccttctaacagaattattttgggagggttttctcagggaggagctttatctttatatactgcccttaccacacagcagaaactggcaggtgtcactgcactcagttgctggcttccacttcgggcttcctttccacagggtcctatcggtggtgctaatagagatatttctattctccagtgccacggggattgtgaccctttggttcccctgatgtttggttctcttacggtggaaaaactaaaaacattggtgaatccagccaatgtgacctttaaaacctatgaaggtatgatgcacagttcgtgtcaacaggaaatgatggatgtcaagcaattcattgataaactcctacctccaattgattgacgtcactaagaggccttgtgtagaagtacaccagcatcattgtagtagagtgtaaaccttttcccatgcccagtcttcaaatttctaatgttttgcagtgttaaaatgttttgcaaatacatgccaataacacagatcaaataatatctcctcatgagaaatttatgatcttttaagtttctatacatgtattcttataagacgacccaggatctactatattagaatagatgaagcaggtagcttcttttttctcaaatgtaattcagcaaaataatacagtactgccaccagattttttattacatcatttgaaaattagcagtatgcttaatgaaaatttgttcaggtataaatgagcagttaagatataaacaatttatgcatgctgtgacttagtctatggatttattccaaaattgcttagtcaccatgcagtgtctgtatttttatatatgtgttcatatatacataatgattataatacataataagaatgaggtggtattacattattcctaataatagggataatgctgtttattgtcaagaaaaagtaaaatcgttctcttcaattaatggcccttttattttgggaccaggcttttattttccctgatattatttctatttaatactcttttctctcaagaaaaaaaaaaagtttgttttttctttattgtccttcatagcaggccaagtattgcctctctgcaatagacagctactgtcaatacatgctgtaatttgacattctgggtcacagatataaggtatttaaaatctatttatgctttatagagaaaccagacattaaaacttcatgcactacttatttcgaattactgtaccttatccaaatttacacctagctattaggatcttcaacccaggtaacaggaataattctgtggtttcatttttctgtaaacaactgaaagaataattagatcatattctagtatgttctgaaatatctttaagactgatcttaaaaactaacttctaagatgatttcatcttctcatagtatagagtttactttgtacacgtttgaaaccaactactgtagaagatgaggaatctattgtaattttttgctttattttcatctgccagtggacttatttgaaattttcactttagtcaaattattttttgtattagtttttgatgcagacataaaaatagcaatcattttaaattgtcaaaatttccagattactggtaaaaattatttgaaaacaaacttatgggtaataaaggctagtcagaaccctataccataaagtgtagttaccatacagattaatatgtagcaaaaatgtatgcttgatatttctcaactgtgttaatttttctgctgtattccagctgaccaaaacaatattaagaatgcatctttataaatgggtgctaattgataatggaaataatttagtaatggactatacaggatgttaataatgaagccatatgtttatgtctggatttaaaaattttaaacaatcatttactatgtcatttttctttaccttgaagaacataaactgttatttcacttctacaaatcagcaagatattatttatggcaagaaatattccattgaaatattgtgctgtaacatgggaaagtgtaaatgtttttcatggtttctatcaatgtgaaataaaatttaattctgacttttctgtg

SEQ ID NO: 65 - protein, 230 aa, Homo Sapiens; identical to SEQ ID NO: 63

SEQ ID NO: 66 - DNA, 2423 bp, Homo Sapiens
agggcagggcggaccctggacgcgcgggcgcgcgcggaaggtagcgcggggccgcgttggcgcgcacgcgcctgagcgtgcgcccggtggggccggccgggactcgccgctcgcacgcccttgggccgcggccgggcgcccgctcttccttccgcttgcgctgtgagctgaggcggtgtatgtgcggcaataacatgtcaaccccgctgcccgccatcgtgcccgccgcccggaaggccaccgctgcggtgattttcctgcatggattgggagatactgggcacggatgggcagaagcctttgcaggtatcagaagttcacatatcaaatatatctgcccgcatgcgtttgatattattgggctttcaccagattcacaggaggatgaatctgggattaaacaggcagcagaaaatataaaagctttgattgatcaagaagtgaagaatggcattccttctaacagaattattttgggagggttttctcagggaggagctttatctttatatactgcccttaccacacagcagaaactggcaggtgtcactgcactcagttgctggcttccacttcgggcttcctttccacagggtcctatcggtggtgctaatagagatatttctattctccagtgccacggggattgtgaccctttggttcccctgatgtttggttctcttacggtggaaaaactaaaaacattggtgaatccagccaatgtgacctttaaaacctatgaaggtatgatgcacagttcgtgtcaacaggaaatgatggatgtcaagcaattcattgataaactcctacctccaattgattgacgtcactaagaggccttgtgtagaagtacaccagcatcattgtagtagagtgtaaaccttttcccatgcccagtcttcaaatttctaatgttttgcagtgttaaaatgttttgcaaatacatgccaataacacagatcaaataatatctcctcatgagaaatttatgatcttttaagtttctatacatgtattcttataagacgacccaggatctactatattagaatagatgaagcaggtagcttcttttttctcaaatgtaattcagcaaaataatacagtactgccaccagattttttattacatcatttgaaaattagcagtatgcttaatgaaaatttgttcaggtataaatgagcagttaagatataaacaatttatgcatgctgtgacttagtctatggatttattccaaaattgcttagtcaccatgcagtgtctgtatttttatatatgtgttcatatatacataatgattataatacataataagaatgaggtggtattacattattcctaataatagggataatgctgtttattgtcaagaaaaagtaaaatcgttctcttcaattaatggcccttttattttgggaccaggcttttattttccctgatattatttctatttaatactcttttctctcaagaaaaaaaaaaagtttgttttttctttattgtccttcatagcaggccaagtattgcctctctgagaaaccagacattaaaacttcatgcactacttatttcgaattactgtaccttatccaaatttacacctagctattaggatcttcaacccaggtaacaggaataattctgtggtttcatttttctgtaaacaactgaaagaataattagatcatattctagtatgttctgaaatatctttaagactgatcttaaaaactaacttctaagatgatttcatcttctcatagtatagagtttactttgtacacgtttgaaaccaactactgtagaagatgaggaatctattgtaattttttgctttattttcatctgccagtggacttatttgaaattttcactttagtcaaattattttttgtattagtttttgatgcagacataaaaatagcaatcattttaaattgtcaaaatttccagattactggtaaaaattatttgaaaacaaacttatgggtaataaaggctagtcagaaccctataccataaagtgtagttaccatacagattaatatgtagcaaaaatgtatgcttgatatttctcaactgtgttaatttttctgctgtattccagctgaccaaaacaatattaagaatgcatctttataaatgggtgctaattgataatggaaataatttagtaatggactatacaggatgttaataatgaagccatatgtttatgtctggatttaaaaattttaaacaatcatttactatgtcatttttctttaccttgaagaacataaactgttatttcacttctacaaatcagcaagatattatttatggcaagaaatattccattgaaatattgtgctgtaacatgggaaagtgtaaatgtttttcatggtttctatcaatgtgaaataaaatttaattctga

SEQ ID NO: 67 - protein, 214 aa, Homo Sapiens
MCGNNMSTPLPAIVPAARKATAAVIFLHGLGDTGHGWAEAFAGIRSSHIKYICPHAFDIIGLSPDSQEDESGIKQAAENIKALIDQEVKNGIPSNRIILGGFSQGGALSLYTALTTQQKLAGVTALSCWLPLRASFPQGPIGGANRDISILQCHGDCDPLVPLMFGSLTVEKLKTLVNPANVTFKTYEGMMHSSCQQEMMDVKQFIDKLLPPID

SEQ ID NO: 68 - DNA, 95124 bp, Mus Musculus
cggccgctccgcgtcgccggccgcttcctggtgccgccgctgccctccacgcctcctcgcccccaccgccacctcctcgcctttctccctccccgtcctcatcccggtccccgtccccctcctccgccttccctccagccgccgggaccgccgccgccgccgcctcctccgcgtccatgtatgagggcaagaagacgaagaacatgttcctgacccgggccctggagaagattctggccgacaaggaagtgaagaaggcgcatcactcccagctgcgcaaagcgtgcgaggtggccctaggtgagcccggaggaggccgcggcgcggggtgccggccgcgagaggtgggcggcgtggcgggcggctcgtccggggagccctgctggccgcccgactggagttgacagcaactcggctggacgcggggcaccggctgagtggaggaggataggcggccagccggggcccctggaactcgagatggttacggatcgcgaggcacctggcttcgagtggtccacaggacgggatggggggagggttgttggtggcccctgcggtgcggacagaatgtcatcctttgtgatggagcagaagatgagctgttgtttattagcttagaaattgaggtggggccgatctgacgagactgagcgtgggggagggttccgtattgcaattacaataactttatgatttggcgtggtactttgggaagaaaggttgaagttgttccctcgttgacagtctcgagaaagggggttgcaaaaggtgcctcgagtttgccatctctctgccccagctacaggaaaaaagagtagtaatgtaacctactgggctgacctggaagaacaagactagaggttaagggggtggcggtggccgtgtctgtgtggaaatgtggaaggaaagaacctttagataaattgactttaggtaacacagaaaggggtgtgtgtgaaatgagagaaaagagaaagacaatgacacccaccagccacatgtctggacagtggcagctgttctcaagcttcagttgtgatttatagttcagacagaagaggtctagtgtaatgaagccacagcagggcaaatcccaaacaatacctataaaaccattgtaggcagataacgatttgtttgcggtaggtttggtaggtctagtgcatccatcaataagagaattgttaagggagaagccagaacatttaacacagataaatttgtgatgcttacccttttgtttatagccctggaccagagcagctcaactttgcaagaaatgaaaatggttaaaagtgatttttgaaaaacatttttgaaaggggacaaactaactttatgctaaagtaaggggtccagataggttagagacaattttgcatttaagttttgacttaagactaccatttaacttactccaaatgttacagccgcccttcctcctttttttctcaatacttagtaatatgaaaaacatcaactggatttgtttaacatccaccaaaaaatggtcctttttgttggtggtgttttgttgttaatgtagtagtatagtggacttaaatagttccttcctttgcccttcattggtcataagttcccattttgttattgtaactaacaacacgtttccaggtgaatgagaagactattgtacagttgcaaaaattgaatttatatttgggtcctgaaagaagtcattattaattggagtgataggaagggttttaagaacttttaaaattattgtgtgctgtagggttttcagtaacctggcagggtaaaaaaacaaatgaaattcaaattaaagctttagtatttaagaactaagctttgctgtgttagagtatgtgtgtccattttttttccttttttttttttttttttttttttaagcaaggggcatgggggcatgcagacaggttccaagtagcccaggctggcctaatatttctttgtagctgaggacaacttgaactttcctaaaccactgtctctgattttgaattctgggattatagacaaatgacggcttgttttagaggtgcaatgcagaggatggaacccagggattcatttgtagtggcaagcattctatcaactgaaaaatatccaaacccagaaagtatttccagtatgctaaagcatacacatttacaggttttaagtaaactggtttttatgtactttttttctctttccaaatactaaaatgagtatgttggcagctcatcgaaatgagagtctggggtttaagtccatcttttgttacagttcagtattactgtgcttggactttctcagtccagttaagggtagtggactcagtgaatgtgagtgcgttcttctgctagatacatctggtattcttgccgctctacatttcttcagaaagtctgtagctcccttaactgcagccctgacatttttaggcataggaattcttgatggtgtgctctttaaatcttttgccatttaacgagtaccagagtactttgtttacaggaagttttttgggtgtttttgtttttaacaagaggcattttccatatttcataaaagttacatttagctctctataaagtaaattttcagtatgcagtctcatggtaaataacccctgatttttttttcttccagtcatctgtcagtattaagtttgggatagctgctatctatcactggctgacttggaactcattatgtagaccaggctacccttgaactatagaacttatggcagtcctcctgcctctgcctccaaggtactgagattactggtgcctactggtgtgtgtggctattgttaaaacccttgtgaatatttctatatatattcattctctctttagatgttgttgaacacttaacacggagctgaaaggagatgggcagtaagctaggaaacatgcgctatgccagactttgaatccttttctggttttgtttgaaaaaaattttattggcattcaagtagaattcagatcattgatatttgttatgtttatctcccctttattataataaccagttaaaagaatttttctgtaaataatactcataaaattagagcttatcatgaactcttaagaatactctatttgacttaaaatataacttttttgtaaacaaacagtagaagtcaggttcagtgactgatgcccgtaatgccagcagttaggaggatagattgccatgaatgaatttcaggctttcttggttgggtttcatagcaaaaacattttccactctcaaagatactatataaatgaattttcaatgtttacaaacagtaacgaatctttaaatggtatacaattatttaaagcttattttaaaatttctagcatgttagattttattttacagaatggttgtaaaagagcctttccttgttaaattagtaggaagcccaggaacagctagctccaggttgccctctcttggtacctgccctgtagttctgtgtagtgaacatggagggattctctgctgccctagcttagtgtgatccatgcctgctcttgagaatcctgcagtaaaaatagtctggccatctgctggcagatgagacaacagctgagctatttttagtttcaaagaatttaagattgttcaggatagagcttgaaggtggtggcattgtttctctttggggaggttctgttgggacatcctccagccaggcttctaggttcaggagtttctttgatgttaggatgtaagtaaactagtcaacttctggttttagatagctgtgataataactacagatgttggagtgaaagttcatggttggaatcgacactgttgcaaagtaagagagagagaaggttttcaggaagacagaccagggggaccagcagggacgcaagagaagtcagttttcctcaggcagaatatgagtttctattgttactcattctgtgaaattatcctgttgacttagctttcttatgagtttgttacccataaatataatttaccctagaaatatatactttatttatttacttacttccttacttagacaaggtcttgctagatagatttgattggcttggtgctagctacgcagaccagactaacccagatacagcagtcagggtgactttggcctctcgagtgttgggatgtgagctaccttgaacttgtcagtaataagaatgtaatatcatgatgcaaatattacagaactcccttgcttctgcctcactaacctgttcttatttcaagtggtactgtaataaaagagtatgagtggaggctgaagtctgtggtgctggttttgtggtacttttacttatcaccatctgagacagggccttcttcccattcaacctagaaattaccatctttgtaagactgtcagggcagtgagcctcttttcttcccctgtctaccctcacctcccagcactggggtagcaaatatgtgtcattgtgcatacctggctttgtgtgggtgctgggactccaaattcagggcttcatgtttgtgcagtacacttttcccagtgagctgcctcctaccttcctaacacatttaagatacaattttaatcaattagcaagtcttctttgctatctaaagtaaaaggtggtgttcagtacctgagctgcctgaatctttgagtaaaaaaagatccagtgtatatggtctttactttgacatttcaggttggttttaaggatcctttattcagaatggccatggataaaatgttgtgaagcctaacctctagagaaacttttttttttattacgtattttcctcaattacatttccaatgctatcccaaaagtcccccacaccctccccccccacttccctacctactcattcccattttttggccctggcgttcccctgtactggggcatataaagtttgtgtgtccaatgggcctctctttgcagtgatggccgactaggccatcttttgatacatatgcagctagagtcaagagctccggggtactggttagatcataatgttgttccttcgatagggttgcagaccctttagctccttgggtgctgtctctcgagaaactcttcacccacacattgagctgacagagtaagctcaggttacagtcagatacaatcttatttccattgggagtttaaactgcacatgaaattctctaaagcaacctaacctgctgaattttatttaccttctcctagatttatgagaccgttttcagtctttaatgtagttaatgccacagggacacatggtgatcactgtttaagagaaaagacagagtggttaatgcagtgaccagaactgctgctgagacagttcttccgagcagtcctgtgtttagggaaaatggtagtcacgttccagttaggtagctggtagccaggcatagagaaggacatgctgtcatcccagcacttgttaggtcgacgatgatcaaggagtttaaggatggtggtggcaacaccagatcctgtctcaaaaacaagaacagctgggttggaagctcagtggatgagtacttgtcaggtatgcaggactgcctctgtggagtctccacccatgaataaagcagatgtggtgttacaggcctgcagtctcagaactgagcacctggagataggagggaccagttcaaggtcagtctgggctactggagaccttgtgtcaaacaaaggttcatggggtgactaaggtcgaagactagtttccttttgtttcccttgcgtctcctggtactaaattgactctcctgataacctttatctcgtagataaaattatgaatagaaaataatttaggaagtgtttgtcatattccttgtggacaattgaggaaacaaatctaacaaagaaaaacacacaaattattgatgttccaagcaaaatatttttaccttatttttacaaatttgcatatttttatgtatatgagccttttgcctgcatgtatgtatgtaagtcatacatacatgcatacatcctttggtaagtcagatgaaatcattagattgcatccaactggagttatagccagttacgagggtgcatgtgtgtaacgtgaaccatacccaggtcctctgaaagagtgctcagtgctcttaactgctgaaccatctatcttttcagcccaaaacatacattctttctgactatatgcttgcgaatgtgtgtctgtctgtctgtctgtctggctgtgtgcattggttttgtttttgttttttagcaaacataattatcttgcctttacacatattttttgtttaattttatttttaatttattttttacactccatattccacacaccccccatccaccctccatctccatccacgtcgtgcacctcctccccacccatctccacatggatgcccccatccctcaccccacctgacctctaaattccctggggcctccagtctcttgagggttaggtgcatcatctctgagtgaaaacagactgggaaatcctctactgtatgtctgttggggacctcaaatcagctggtgtatgctgtctgtttggtggtccagtgtttgagagatctcaggggtccagattaattgagactgctgattttcttacaggattgcccttctcctcagcttctttcagccttccctaattcaacaacgggggtcagctgcttttgtccattggttggttgcagatatctacatctgactgtttgagctgttgttgggtctttcggagggcagtcatgctagatccctttttgtgagcattccatagcctcagttaatagtgtcaggccttgggacctccctttgagctggatcccactttgggcctgtctctgaaccttattttcctcaggctcctatccatttccatccctataattctttcagacaggaacaattataggtcagagatatgcctgggagggcaacctcatccctcacttgatgtcctgtcttcctgctggaggtgggctctataagttctttctctctactgtctggtgtttcatttaaggtcccagttctggtagtctctcacctcccaggtctctggtgcattctgaggggtttccccaacctcttatttcctgaggttgcctgtttacattctttctgctggccctcagggcttcagtccttttacctcacccaatactagatagggtttccctctcccccaccctaccccatccactttccctctcaggtccctccctcccaacttgtgattgctttctcctctctcccaggtgggactgaggcatcctcacttgggcacttcagcttgttgagctttttgagttctgtggactgtatgtatcttgggtattctgtacggtttcgttttgtttttatgtttatgtttttgtttttttccccagctaatatccacataccatgcatgtccttttgggtctgagttacctcactcaggatgatattttctagttccgtccatttgcctgcaaaactcgggatgtccttgttcttaatagttgaatagtattccattgtgtaaatgagccacattttctgtatccattcttctgtcatgggatatctaggttgtttacagcttctggctatcacaaataaggctgctatgaacatagtggaacacatgcccttgtggcatggtggggcatcttttgggtatattcccaagagtggtatagctggatcttcaggtaggtctatttccagttttctgaggaaccgccagactgatttccagagtggttataccagtttgcaatcccaccaacaatgaaggagtgttcctctttctccacatcctctccaacatgtgttgtcacctgaggttttgatcttagccattctgattggtataaggtggaatctcagggtcgttttgatttgtatttctctgatcactaaggacattgaacatttctttaggtgcttctcagccattcagtattcctctttcgtgaattttttaaagcagtcttgacatcttggtacatagcctctgctatccacaaactcagccctaccctatgtcaccatatgcacccttcagtcaagtggtaaaattacaggcatgctttattgtgtatgacttttttttcctttttgtttttggtgctggaggttgagcccagagtcttgtgcacactaggaaagctctctaccactagctactttcgcagccctagaattaaaaacaaaaagcaaaaatttattctctaatgttcagtgtggtttttttaaaataattttttaaagatttatttatttattatatgtaagtatactgtagttgtcttcagacacaccggaagagggcgtcagatctcattacagatggttgtgagccaccatgtggtttctgggatttgaactccggacctttggaagagcagtcgggtgctcttacccactgagccatctcaccagcctgttcagtgtgttttaatcatcctcaactcttaccccatctctctagacgtactccccttccctaccaacccatcttcctgacttctactgaagtcctattgtgttgcctacacattcttagatgttcagccatccacatgagcatagtcagtttacaaggtgctacacacttaaagaaagctgattctctttctcccagaggctatcagttgtcagtagctcctcggctagacacctccactttccatgctgggattggtctggtatgttgtcccaatcactgtgagttcatatgtgttgtttccagaagacactcgtttgattacattcttctactgactctggctctttccaacccttcaggtcaggagggtttgtagtacagtacaaacattttcctgctgagctacttccactacttctagaaatttttaataagagttgcccaatgatataataggaaattttctactttaaaaaaaaaggacataattcaaaatagaaggctgccaagtatggtggcaatgatggtcagtttgttgttgttgttgttgaaagatttaagtatgtgagtacactgttgctctcttcagacacagcagaagaggacattagatcccattacagctggtcgtgatctcccatgtggttgctgggacccctggaagaacagtcagtgctcttaatggctgagacatctccagccccaatattgatggtgccttttaattgtcaactggactgacacaatctagaatcacttgggaaaagaaagtctcagtaagagattgtttaaatgaagttggcctgtgggcatgtctgtgggatattatcttgattacattaatgaaagaaccaacataaaagtgggttgtacaattccttgggtgtgggtactagactgcataaaaagggaagaaattaaaatatgggttcatttgtcctctctgtgctcttgactgtgagccataacttggaattgggagctaaaataaactctttctgccctggattgcttttgtcagggtatgttatcacagcaacagaattaagacagtgctcatacctgtaatctcagcacttgtgaggctgctgtgaactcagggccagcctagaccgcatgctgagtttcaggcggacctggactatagaatgagaccttatctcaagacaaaaaacaaatgttcttctccctctccagaagtttttccactgagaatgatataaaataaattcaaatatcagttgtcagatttttttcagtgaaaacaatttttcttcctaaagagaatgagctttttctctttagatcctttctggagttctgcatacatgggtcattaaggatctaaatattaatccccttggatttagagtaggcattataatccagtgactgttacccttacaagaagaggatagggcatagaggcacacaaagcaagaaggcagtgtgaaaatagtggtagagtctggaattacgctgtcataatcaaggcaccttagaagccaccagctaatgaaaggagagttcctcctagagccttggttctgttgctccaactgagagaagaaccttctgtttgaagtcactaagtttattgataactcctagaaagtcctagaaactagtgaaaacgttgttcctaatttttcagatcaagttgatttcttaatttgaattttcatttttaaaatacagaaaatattagttatgtgttgggctctactcttgattgcccatgaatctggtggggagcggtctagggtttggtatggattaagtagaaaatctgagactttagtataggttaaatggaaaagagtcaagcacaattatttaattttgtattcttttgattgttttgtgaagcaaatctgtgcacatagacagacagacacagatggtactaaattggtctgcatagcgtacattatttttcattcagaaaaaaatcataaacactttagaaataccttttattataatagtgactgtaggaaaatctgaagccataattttctctcaaatttgaatctaaatatcacttagtcagctgttcacagccaatgcctgtccagagttttctaagaaatgagataaaaacataagtagccaaggtatgaatgccaaacatttccatttttgatgcatgagattgaattcaggcctaagattttagacagaggagactctatatggcatttgctgaagtctgtttatatttataattcaaataaaattggcaagttactttataccttttctaaaagaagacaacaacaatggcaggcagttcctccaagccattttaaaaagtaaaactgaagaaatgtcaccagatgttcttactgtggcaacaccagttatttctgtttttcttttcgtcttttttccttccctattccttgactttatggtgctagggatcaaaaccattttgataatgcatttgggaatctgaagagttgtttaagttctcaaggattctgcatagactggcttttattgtagtcctattccctaacatttgtgcttttgtgtgtttgtgtgtgtgtacatgtgtgtatatgtgtgtgtgcacataagagagagtgagacctagtgagtttagagttgcttatgtttgcataggtaaggggttacaggcacatgagcaatttaactaatagtgacaccacaaaaagaatgtgttcaccacctgtccctagaaggtattaactatgtagctccctcaggagggttgaagccttatccaagatggaatgctggtagacccaggcttgtgtgggtcatgtacaagtaatcacagccacagtgagctcatgagagcaacagccatatcatagctggaaagtcaatgttgaacagcactcttctttctcctacatcctttgcaccctcttctgccatattctctcaattctgcttcatttagaggcttaccttttttttttttttaagatttacttatttattatatgtaagcacactgtagctgtcttcagacacaccagaagagggcgttagatctcattacagatggttgtgagccaccatgtggttgctgccatttgaacttaggacctttagaagagctgtcagtgctcttaactgttgagccatctctccagcccttagaggcttattttgagcatgctggctagttataagtctgtcctctataaaaagaagtttctcttatcaaagcagagagcaacactaatctaggaacataaacataaatatatagaaagcagttttatgagtacaacatatcctctcagtaagacagcaacagtagagtctgacctatccagccatagattttttttgatcaggcttatagtaccaggtgtgagtttggcctgtacaggcttcaaatccaaccagaaaacgattgcttaccccatgacagtcatgctacaatatccataaagctacatctgtagctctaacaccttctacccatttgctgtattccctctcctttcaaagtcttggtctctctttttttttttttttactaaattttgtgtgttctcagatatataaacacagtctgctcagtccatataatgttacttgtatgcatgttttcagagctgaccatttgtattagataaccaattaatgtactcttccctgaggaagactatttctctcattctggtagaattccttaattgtctatattttttggggggttggggcctcttgagttaatagacatattaacatgtctattggtatcatccttgttcaggtcatgttttggcagccttgttgatgagatctaaatagatttgctttttctgacattagaagaagacatagtctcacaacaaactttctgttcctctggctcttctagtctttgagcttctcttccactttcaatgactgatgtgccttgggtgcaggagttgttttgtaggtgtacccattaggactgtgctccacaactctgcatttactttcagttgcagttttctcacaactctgcatttactttcagttacagttttctgtaatggtccccatctgctgcaaagaggtttcttgatgatggctgaggattgcactcatctgagggtttaaggacaaatatttagaatgtaggaaatatgctgatttggtaaaatggtagttctaagtctttctccatgatcctttggtctagcaggttttaagtccaattggagagtcattgattaccgccaaggcatgtgagccactactgcacccttagggatatcatgccgtgctggccatagttgtggttcataggtgccatagctgctaggtagggctatttattagttgtttccctcctttagaaacttgcatggtcttgaggaaggaggctttctggtcagatccagctcaggtcctctgggtcctgtgtccaaaatgtaaggtgttgtcagcaattgtgacttaatcttcaattcctgagaaagaagggcaacaaaggacaatagcaattagcctgtaatatttgggagtctcttggatggccctgaccaacaactcagaagagggcttctcatgcctgctgttggggtttttgtaagtctgtggccctttgggaggaaacattgtaagcccatatgagaaatttttatttattcattttctctctctgtctctctctctctctctctctctctctctctctgtgtatgacacataaggactattaagtattataataagtatagaattctataagtatataataagtatataagtatacgtaacatatatatagacttacatatggtataggtgtatgttttaggtaggtagttaataatactccttatgacttttcagacatccttattgttattttctgttctcctttctgtacttatatctcttcaattcttttgatgtttcaaaatctctttaccatgtttgttgttaccatgaattccttttaaggtaaccctagtggtgatttttctcagttactctcatcttacaaagtcttgatttttttaaaataagcttttaaaatatgatttattgttgttattttaaatgtgcattggtgttttgcctgcatgtatgtctgtgggagggtagtggatatcctagaatgaagacatttgttagctgccatgtgggtgctgggaactgaacttaggacctctggaagagcagtcattgttcttaactggtgagccatctttccagccacggggtcctaaatttaggatttatttttttccactgaacatcaaacatagttatggaaatgtgctactgaccaaaatgttagcctttatggtgtttcatgataattttgctgccataatacatttgtatacaatgtgtcatttctctgtatctgctttcagtagtttccctcttctgaaatttaattacaatgtattttggcatgtatttccttggctatcttatttttgtttcctcagctttaaaatacatagttttgtgtttgtagtttagaaaaccttgttaattgtaaagtcagttttgtagctaatatctggtattggatcttgtaaaggaatacatcatgagcatatatccccgttgataaaaaggaataatgaatttttttttttaacataggaggtgtgttctgggatccaaactgaaacatttcttcctgtggtttccttcaaaattatattgagaactgttgattaaaatcattcacgttttattttgtttgaagaaggctaattagcagcatccctggatttgagactgatgctgataaacaaaaagtgggatttttttttcctatctccaaattacctagtttttatagtgtgtttttctaaccaattacagacttaagtttctaagttactgtgtgaatgaattaaaaaccaggctttagaaacactcaacatcagtctctgtccccatgttaaattagagagccagagttaaaaggggtgagaaaagaaggaaggaaacacaaaatagaacaaaattttaatcttgtttatgtcttgtgtgtctttatacatggcaacattattgaatgtctgcctgttgtgtgactttcacagctggatgctaggaatgcaagaaaggattaaaaaatactctttattatgtacaaatcaccactaaagagtgtacctcttatctaactgaaattttgaaccttttttttttttcttttccaaatcaaatccttcctcttttacattccagtgccactttcccacgtctgcctgtgagtttggcttttagactccatgtgtaaacggtcacctgggattcgtctttctgtgcttgtcttatttctcttaagcattgtaaacctttattaaattgtgtctttagtagttccaagtaatagtttataccatccctgtttttactcctatcattagtaaaatggaaaggctttagttctcagacaactagactgaaatcctgaataataaatgcctggcacacagtagacaatgaataagttgtatatattttcagaatcagtgctatagcaaagtaatttgaacaagttactttatacttaatatttagtgcttaacaatagaaggtagtcagtaaatagtattaaattcaaaggtgttgggttaggttttccttaggagagacatcagcatctctttaccacagtgacagaccgaagaaatgattctacccaactccagtttgctgaagcaattagcttaagtgcagttacttacaggagcatggggttggggttgggggaaggcatgaaactgaaaggagcaccatgagaaggaaggcaaggggcttaaagcagaggggaaagagagtagaatacatggagagaagaggaggttttcactgggaggaaaccaaccagcagcggggtacacgggaaggttgataagaggggagggaaagaaagctatatgaaaatgccagactgtcttagttagggttttactgctatgaagacaccatgaccaaggcaagtcttataaaaaacaacacttaattggggctggcttacaggttcagtggttcggtccatcaggcagacatggcacaggcagagctgagagttctacatcttcatccaaaggctgctagtagaagactgacttccaggcagctagggtgaggatcttatacccacacccacagtgacacacctactcaaaccaggtcacacctccaaatggtgccacttcctggcccaagaatatacaaaccatcacacagactattatttttcatgctaaattaagagattaattttttttaaaaatagacatgcttattttataggatttttttccaaatatagtcctaactagaaaaattagttactatcaacacataagcattttcaagaagctataattctgttagagtaatcttcctgagaggcacagagtgtgctcgcccgctctctctcacgcgctctctctcactcacacacacacacacacacacacacacacacacacacagacagacaggggcagagagagacaggcagagacatgagtggacaaatggacgagattgtggctacaatattttttcctagtacttctgattaatgtacttattaggggagagagtggatgctttggtaattcaaattctttgcttgttaattcacacttaggaagactgtaatcaaattacccaggaaactttttgtcctcctatgctaacatatgcttttctctttttgccttcaccagaggaaataaaagttgaaactgagaaacaaaggtttgtgtgatttcacttgttttataaaattaatttgcatacttttcagtcttggccaaaatagtaatacaatcatctatactttagcattaaacaagttcatataaatgagacatttctagttttgctatatcttaacttctttttgtgaagtttaatgtatatttacaaaaatcactatatttctttgaacatgtaagcttctttagaacataatggaaataattcaaaagtgtacttcagcataaaggcatgtagagagcccatggctgtttaacgttgtttcatgaagtatttacattgatgctgggatctttagagaaagagagaaatgcatgttgtgtccagcatctgtggtcactgctgtccacccttgcagatctcttgagctctctaggctgtgctttcctgtgaagtacaaaaagacagaaaagtggtcaataaggttctttttatgactgatatttttttctcacaggtttgtcatcataaatgtaaatgtgctcttctatgcaaactctctttttttatctagccctcctcatggagaagcaaaagctggatcaggcacccttccaccagtgaaatcaaagacaaattttattgaagcagacaagtactttttaccctttgagttggcatgccagtccaaatgtccccgcatagttagtacatctctagattgtttgcaggtatgtataaaatgctatctaaagctgtctggtttcaatgtatttctgatattgctcacagttgatgatttacacaggtccacgaaagccttgagtactctttctgaggtaagaaacaaaatagtcatttatatttagatatacagtagctacacaaaagatgttagttaaaaccattagcaaaacaaaatctaggagttacagggacaaagttcagagcagagactgaaggcatgaccatccagagaccatccacctggggatccatcccataaacaaccaccaaacccagacactattgaggatgccaacaagaacttgctgacagaagcctgataaagctgtctcctgagtggctctgccagtgcctgacaaatacagaagtggatgctcatagccatccactggactgcgcacagggataacatttgaaaagtaaagaaaatatctagtaaaaaaacaaaaaaaaaacccaaaatctaagttggttaatgataaaagtgttgatttgctctctttcaatcagtgctatcatactgttgtatgttttgtttttgagatagtcacttcatatgtccctgtgtgatcttgaaccactttcaagcagtcatgactacctcagcctcctaggtagatagccccacaggcaggcacccacaggcaggcacccacaggcaggcacccacaggcaggcacccacaggcaggcacccacaggcaggcaccactgtgcttaaggcatcactggaagtgattgcactaagtccctattttacacaatgcagcattttgatattgacactgtttgccgccttactgttttgctccccctgtggcattcgttagtcagaaattgtcatgagtgtgttcccctttttcttctcatacacaaacacacaccatatcttagatattctgtgaggcaagtttccagatttcaggtgtttgtgtttgttttcaggtattgtcactgtttggaggttatatatactcaactaacagcgtagtagccaagaagagatgatttgttcttaagatgggttaaagataaattcacctatttatgaccttgctgttgctgaaaaattagcagtattaacatctaatgccttctttcccagcaaaattggtagtagtgtatagatgattctgggatttttttttccttttttgcagccactatttacaaactgaatgtcataaaaaatgatgacaaaatttggaaagagatttgatgtcatttgaaagtgttaagatagtccctccaaaacactatcagtaaaacctggtttagattgaaagcagcaagcaattctaatttatcacagtgttcttaaggcctggctttctagaagtattactattagttttgttattggtttggttttttttggttattgcaactacaaatagttttccaaatttagtaaactacaggaaaaaatagactttagctttgattatacctcactgtttttgtttaaaaattagtatatattcattcacatatatttcaactcatagtccgctagtatatttattagttatctcttatgtctgtttcagaaacttattgcttatgggcacttgactggcagggctccagatagtacgacaccaggcaaaaaattaattgatagaattattgaaacaatatgtggctgcttccaaggtcctcaaacagatgaaggagttcagttgcagataataaaggtaatgaattatataaggtgtattatttattatacttttgaatccagaagcatctcgacctgaaaacatcaggaagagttgttctctgtgcactttgggtgtgacgggcacttgggataatgtttagaacccatatgagatttgttgttttatgccattaggagaaaactgtgtttctctatctcttctcttggccatccagttaggattgaattctttgggtcttgaggagtttttctgaacctacctgctttttatacatctttcatcttttaagtttcaagatgattcataaagttgtgaccttaccaacgtttactgtattgttagagcctacgttgtccttctcaggccttgtatcaatcaccaggtgtactgtctttcacaactctcttgtacccatccatctagtgaacctgctcaaacaaagtgaacaaataaaatccaagcttgtgttgtaatgaatctggatggttaaattcgtttagagaaaaacaagttgtgttctagttgttaatgttacaactatggtagtatatatatttatttatagtatttatagtatttatatattgatatgatattgtatgaaacatacctgtctacactcagttgtgatagagtgtaaacgttctgcattttaattatcacaagtacaacttctaatgaaacttagctaaagcatgttctggatatgggagaactacttccatagtagtgaaagcctcagatattttaataattggtaatatgttcctagtagatagaaatctatacacatcactacctaaagtgtcattgtcttaattgtcatttaaagttttaattttaaaatgcaaatatgtatttttgtgcttaaagtctagatgcagaaaactgcttttgtgttctttccttacaggctttacttaccgcagtgacatcacaacacatagaaatccatgaaggaactgtgctgcaagctgtgaggacatgctacaatatctatttagccagcaaaaatctcatcaatcagacaacagccaaagctactcttactcaaatgctgaacgttatctttgcacgcatggaaaaccaagcagtaagtgttgacggagagtgagagaacagcacaggcctcaggtctgaaaagagctcagagtacttatggagagatcagacccgaggatccctgtcttgtggggttagctttactgacttgcttgccttgaaacaagatgtgctttgaatctcaccaaaaagtgtatatgcttgattacatcatggaagtgttcgtgaagtggtattttagccaaacttactttaatatagtgtaaagtaggtataaactacctcatttgacctgttcacatataaaatttagccttaaaacaaaagtgcatttttatatcaatgaagtatttagtatattttatttctttcatacagtaaaggactgttatgtttcttatccttaaacctacttcaggttggttggaaagaaattaagaattatagactttaacttgattttttttaatttgtttttgtttacattttatttcacaagtcttcataatttagaatcttttattttgcagaaagactgcaaaaatatttgagagggactttctccttcacccttgaccttctctttttctttttttccttgacctgtttttttcttttgtttctgttttgaaattttgtgtgtacagtgtatgctggcatgctgccctacatgtgtatgtgtggaggccagacattgttgacactggagtcttcctctatcaatggctgtttgcttgtttctttgttttgagatagggtgagcctcaggctctgtttgactttacactcctggcactagagttacagacacatgccactacaccttgcttttatgttagggtaatgcctcagaagtacctgcctgttccattctgaaatttttaactggcttagtcttttgtagctacagctgttgtgagttcatgtgcacagcagccatgtcatgtcccaaggacagtgtttcacagcactactttccatcctttggttctttttgctctattgccatgatgttctctgagccccatgacaggtatgataggatggcccatctatgttgaatacacagtcacttatttttgttgtattaatttttaacttttccctttttggctttgaaatcaaccatttcaacaaggagcttgcccccttcagcagggcaaggacatttatttagaaaccaaagtctgggattcaccaagttaactagtgtgtttgttgtcttctagttacagttcttgctctctgagcaaatatagctaaaaaaaatacgctatattctagtctctcctacacccatatgtgactttttatctgtacatattatcatgtgtttatactgacatttccgcttccagttcaacatcatagagttagttcattttagactttcccccttgaaagaagtataacttatttctctaaacagtataaaatgtggcttttatttttattttgttattgctatttggtttttaaatgttatacatgtatacagtgcatcttagtcatagccacattatcaccctccccatccctcaacatgtcagtaacctcccatttcccattgctacttcctggttcttctctactgcccctttaaaacaaaacaaacctactgagtctaattagtgctacccacagtcacatggctctggggagagcctctggagcatgggcagcctaccagtggccacctccctgaagaaaacatagtctccctttcctagcagccagtagttcctcagctaggtgcagagctcatgagcttctccatccacattaggatgctggctgctttgctgttgtacatgttttgcatgtgaattcctgagagggatggccatgtcatgtgtctaaaagatgcatttccgggtactttttgccaccctctctgacttttatattctttccactcccccttccttgacctcgaggcaggaaaggttcacatagctgtttcatttagggataagcattcaacagtcacttattctcagctccctgatgagttatgagtctctaaccactgcctgctgcaaaaggaagtttctcatcagagctgagagcagtctgatttatggattgaattggtggtacagctgtactgagtgtcccgctgataggagcaagctacatactggtctcaaacgtttgttctcattctaattacgcatcgagtagtgtctatttgtaaaataagagtttgcgactgctaactataaggttcttatacttttttagacattagaatcatttaattcaattttgtttttataaatataattatataatttgaaatattactggagattatgatgtatcatttaatactgtacaatatttatttttgtggaaatttatcctgtaataatccttcatattggctcatggagaatgaaagagatgtatgagaagcaataaaattctaaaaaaatgaaatactgggattctgcaaataatactaggattctgcttaatgtttagcatcttaagtgagctagtttattagatgatattatatacacaaaaatgacaggtcttctaaagtaacagtcaaacattgatagatgtaattatttttatgcatactggatgcctggacaaaatgatgtaagctctcatggcaattttacttgctagctatgtaattataattataatactgtataaattaaaaagtgtttggtatgataatgtcagaacatgttatgaaagcatatgaactgaaaagtttgtttcccatttgatcatttcctaatctccactccccacatacatgtttcttgtgtgtagacaaaaaggagagagagagagactgagaatgaatgtgaataaatatgtgtgtgatgtactttgttcttattggtaggttttttattttaggtaaatatattattggcaccaatccagttactacttggcagcattaaaattgttttcattttgttaagatagtacattttcataacatcacacatcaaatacaaggtctagagagatggctcagtacctaagagcatttgctgcttttccagaggacctcactttagttcctagcatttaaatcagatggcttatagcttataatctagtaccctctggccttcatgggcacagcacacatgtgtcattcattcatgaggacacatgcatagtttaagcactgaatatagtcaaataaaaatattactgaggactttctcccttatgcaccaatttccagatatctaaggagtagtatgctttatgttctgatggcctataatccccaggcccaaggaaaaaggataccatatttaaagaatttatagttaggtgggtttgaagctacttcttttactagtactgaaaatcattttgttctttccagttacaggaggccaaacaaatggaaagagaaagacatcggcagcagcagcatttgttacagtctccagtaagccatcatgagcccgagtcacctcatcttagatatttgccacctcagactgttgatcatataaaccaagagcatgaaggggatcttgagccccaaacacatgatgtggataaaagtctccaagatgatacagagcctgaaaacggatctgatatttccagtgcagaaaatgaacagacagaagctgatcaggcaactgcagctgaaagtaatcttgagatggggccatggggtgtttgcgtttaagggccgtgatgggatgagttttcactgaaatgtagaaaaatgatttaatggctaccaaatagtttgtgataactgccatttttctattagtggtaaagctagttcacgtcagcctgcaccatatctcttactgatgctgcgccttcattagcatctcacaaatagtgcgatgtatagactctcttgggaagagacacacctttcttaaaagaatcataaatacatggtacaaaattatataagttcttcatttttctttttcatatcagttttagagcaaacaaaggatccactcagtaagggcttttagactatggttgaaaatttaacatcattattggtttagaaagtactgtgtctgttttcccggtacttgggaggcagaggctgaaagattatgactttgaggttggcctgggctatacagcaagtacctatttttagaaaaaaaaaaaaaagtaacaaaattaaatataaaaacaattttaattaatcatgtaacagaaaaaattgatttaaaatatagctacagtagtcagcaaggttaagatgttctctctcaatatttcttttcttaaaaatctgtgtgtgtgtgtgtgcgcacaaatgtgccacagtgtgtgttcagaagacagattttagatgccagtctttgcctttccacattgcttaagacagacgagctagctttggaactctcggagtttcctgtctccactccggtctgttagagactacagacaagtgacattttgtgggctctagggatttaagctcagctctccatgcttgtgcagcaagtgctttatccactgggccaactcccgagtccaaaaacgtttccactgtcatagaattaagttttatatagacttttatgtataaacgcatgaaataattttctctttattctttgagcctgccaggaattttgagttgttttcttttcttgttacgtagcctgacttgaaaaatgataaaaattgtgttgctccctgttgtggatagatagagcttagttagacttcatctaaaatttgttttgttctttttttctttttttctttttttttcatttgaggaaagacctcagctgttgacattctttaaaatcatgtttacttagaactcaatagcggaataaataggtgtatgcatgtacatacatgtgtagaggccaaaaaatcaaccaacttcaagcatcattccttgggtaaaacccattttatttttaaatagggactctgactggcttagagactcgccggtgaggctggggtggctagccagcggcccccaaggatctgcctgacattgcctccccagaacggatgttataagaacatactgccgtgcccagtttacatgtgtacaatgcattctgattactctaacctctcacccctcttctccatacaagttcctttttcatattcatgtttttgtttcttttgtgaccaagtgtgtttaaccagggccatcaatgtgactgagtatatgataatctgttggcgtgtagtgggcttaccagagagccctgatggcagtggatagtggggagtgagtctccagtttctagaatctatcactgatcactagttcagtcagaactgggggaaggaaatctcttgagaacctctcccatctggtggccattaacaggcccgttcttatgcaggttgtgtgtaagcaagtacagttgctttgagtccatgattggaatgggtgtatcatgcctagaagaaagatggcattctgtagctctttccgtatttttacattgttttggttccctcatctgcagttttcttgatctttatagacgatggtataaatgtcttctttatagttcagcatttagtctctattcttagcacctagtatagttatatattcttgcaaaaacaggtcctttggggtaaggctgagcatagcatttgcctttgatgcccagctggtagttttgctttgaagttttgctgttttgctatggagctttggctgttctggaatgtgttgtatagaccagccttgaactcacagagatcttcctgcctctgcctctctctgcccctctgcctctgtctccctagtgctgacctgagcttttttatttttttttatgtttatttatttatttatttaggtttttcgagacagggtttctctgtatagccctggctgtcctggaactcactctgtagaccaggctggccttgaactcagaaatccgcctgcctctgcctcccgattgctgggattaaaggcgtgggccaccaacgcccggctttattttatatgagttctgagtatcaaactcaggtcctcatgcttccatgacaggcagtttactaactgagccatttttccaatcttctttttgctttatttgaaaaagctaccttaggcaaaccagctattcacactaggtaaattcaccaacggaatccatgtgttttgcctaaattgcttttgaccaaattgatcctacttttcactacatgtttaagttgattcaaagggctgatctctgacaaaggtgggattttatttgttcattacattcagcaaacatatgttgagcattctgtgttttatgttctcaatgctagaattttgggttaagatgatagatacagcagttgcttttcatgtgtttactgcttttagcctacctaaaggatccgatgaaggtataatgtatggtttcctagaggtggcatgcgtaggtagttaggttgaggaaaattaggaaaatgtgtatatatagagaaggcaatgttgttttcgttgaattgtaattgataaaaatgattagctagaaaatggggaaaatatttgcaacagaaataacatgggctgtgtgtaacagagaaacatgtactatgtgtaaggacaccactgtagatgtcttatagaatgcagggttttcagtaaggaagggattattttgaccatgaaggcattgttctaacatctggtataaataaatcttgagttcagagtgcatattttagagcacaacttgattagttgagtaaagttgcacattatttgttattataacagagtattatattattgtaggtattgctaacttctctaggcagttcttgtgtattatatatatattaatcacttatacatttctgtcaattcacatgaatatttatttactatgttgtagatacttttagatagtggttctgtatatttactcacattgaaatagtttttggagttggagagatggctcagcagttaagagcattgattgcttttctagaggtcatgagttcaattcccagcaaccacatgcctgctcacaaccatctgtaatgggtaggatccagtgccctcttctggtgtgtctgaaggcaactacagtgtactcatacacaaaatagataaagaaatcatttttttaaaagaaatttgttttcagactcaaggtgttttagccaactataggacaaaaataaaagcttagaaatggtagaaaaatacccacacttaagtttttttccccacagaggaatataaaggctatttttttctggtaagtttactgattgaacacacttaacagatttcccactgtgacactgcctatgttgtagaacgtggcaggtagtagattaaaaacagcacaattatagagaggacagactttggaaaaacagcattgttaagtcataatcctttataatagtctgcttggggagcagtggagacattactgtagccagaagatacaaagttggcagccatttggcataggggggtgtttgccaggttcctggagcatcctagagctaattgaaccaccttgagacactttcagcatcctctttgtagccatctatacaagctttcagattccattgttttctttagctgctcagaagtcctgcaatatgtctctctttattttttttaataaaaaaagcatgaattcagttttacattagaaatgtaaattcttatgtgaagaaagagtgagcaaaacactaatgttgtcccaagtggctcaatatctgtctccttaggtattttctgtagtaaaatgcaatattaataattatatcaaataagatttagttactttagtttgatgttggataaggtttagtacagacttatatgtactaagtacatgtcaatgtgcacaagacattaaaagtgctttatttagaataccattagaagtttgagtctttgtaggactaatctatggaatctcattaagttgaatagttaatagctattcaatcagattgaaccctgttaaagtgagtttgaatttcaaaaatacttaagtattgacttggtcacaaattctgaaaatttagcaaggtagtgtcccaaaatatttacacccatttgattttctttaaaaagtgtttcattatacatgtctagtagaggtttcttaaaaagttaaaataatgttgtctcaaatttttgtctttcaaagcattatctaaaaatgatatcttgtatgatggagactatgaagaaaagccacttgatattgtccagagcattgtagaagaaatggtgaacatcattgttggaggtagtgtactttatttgaaattagtttattctgttttacaggatttcatctgaccatggaaatactatgatatggaaccaaaggagtaaaattgtaaattctgaaattagtgtttgtatgtttgtgtatgtcagccacatgcagtatgcccctccccggcccattcaggctgctttctaagatctctagtgagatgcttttagccaccagatagcatcaaaccctgtatctaccccttttcctttctacaggtatacaggtgcagtcccttctcatgccctgtgctcagacatctgtgtctgtagatcagcaaaccagtaagcatctttctccacagttgctgtagtaacttcagcgtaggactttttctccatgtaaaattgttacattttttacttaaagtactttgccacttttctccttttaaagttgccgttctggacttcacttactctctgaaactattgctaactacaagaagggctattcagatatatggtatatgtgtcacagcaatggatctggcaacagtcgcagcattgagtgtctgcgtaacataaagagatgattagatttaagagtggtgagttggtataatacatgagatgtccgataatagaaaaaaattatagaagcaatttaacagggttataagttccaaagtcagaattttggattttattcaaagccaacagaatcagttttggagattttagaactgagaattttgatgagaaatctaaactaagtctgcgaagtggaagccctgtaagagactagcacggtagactggtctaattgtagtaagactacaaagtgaaagaaagcaggaactttaaggcaacaggctttctagccacttaaggagctaaagaagagaaaataagtatgtcacacgcagctccagggctgctccacagtgtgttgactcactgagaagactcacaagactcaacataagagctgtcctcattgagaagttttattacagccaaaggtacagagtaatactattaaaggaagagacagatgagagataggaggtaaactctagaggaaatcagctgtctactttcaggaactaggatatttttagttcctccagtatcaaattattaaatattaacaaaatgtttaatatgtatttgaggcatgaggactaaaattttaattgctgacacatcgtactttctgcctaacatgcactaaaattctaagctcccacaagaaaacttggttcactatggtgcaaactgtttatacaaacgtttggactcagtgagccatattgatcagctctggatagaaacactactaaaatttaagataccaaaaattagctaaaggacaacacttaaatatgcttttctaagctgttacctcttttcttcattggtagcatcccagttataaagctcaatacactagatgtttagtaatactattggcagaattcaatgatagtatacaaggtacttggagaaaagcactaatacttttggcacactgaatgtgacggaatctgtatagtcatattataaacacaatgcaaactagcactttgcctaaacagagagcaggtgctactggtgcatggttagcaagctcatgtcactgtgatgggtatttgaggaagtaacttgacgggagaaaagatatattttggttcacattttaagagatttgagttcaggatcaatcagttctagggctcctgggctgtagtatggcagaaagcatgtgctggacccaacttttctccaggaagctaggcagcaaagaagagggggtgagggcctatctcccagggactacttactccagccagtccccaccgactaatgacacctccaaaaaatagtgccacaagcacataagcctgtgatagactaacattctgctctttaccctgagaggttcatgaacatctcatataaaatgcagttggtctaattccatgagttcccaaaggactaacagttacaacatggtttaaaagtcttcaccaaagcaaatttaagtgacctgagtcaagatggaacagcaagctatataactttcacatcccgtagagaggactgggagcaaagaaatggtgcaacacatcaggagacagagtaaatcctgcgtctgcacattagagatccagggcatgtggtaacgcaccccagaatcaaagcaagccactgcctctgtggctttgcgcatgcttattttcaggccaaactgcaagttttcaaacactgatccttattttgtttttccctcccaattctcattgcaacctgattaaaaacagccagtagtcactatgttaccgcttgattgctgggcagccatgaagttatctctactaagttagtctgtccctgtaaattctacatcctacagagttagttgcaggacacagataaaatgtagacatggtgttttgttgtttttgttttgttttgttgccatagtgtcataatgtacacaatcaattttctaatggttcaaaagacctgtatatgcatgctatgtgtgaagacatcaaaggtagcaaaagtgttagtggatctggataaagatgcttttagagcagtttctagtaccctcctgataacacataagttgcgtcttcactggttacttcttcatcagtattctggttttctgaggtaccaccaaaattagccatttcagtctgcttaccaaattctcgaccattggttttcaacctctaggtcatgacctctttgggtgttacatatcagatagcttgcatttagagatatttacattagaatgcaaagaagtaacaaaattatagttataaagtatcaacaaaatatttttatagttggggctcaccacaacataagaaactgtattaaagggtggcagcattaggatggttgagaaccactgttctaggctttctttaacacacttctcaaacttacccaagttcttcctaaaaatttgccgccagaactttttttgtttttggttggtgggttggttggttggttggttggttggttggtttttcgagacagggtttctctgtatagccctggctgtcctggaactcactctgtagaccaggctggcctcgaactcagaaatccacctgcctctgcctcccaagtgctgggattaaaggtgtatgccaccacgcccggctgtcatttcttaatattcatgttcttagtccatttgtcacatgacaatatctgggagaaataattattttggctcccaattccagggtatgtttatttggttctgttgcttctgggctgtggtgagataaaacaccatgctagggaatatgtggtgggaagagcagctcacctcataagggacagaaagcaagggcttggaagtggacatgacagcctttacagacatatccctaatgacctacttcctacaaagtaaagtggctcccaaagtaacatcaccagctgggtattaaacctgagcatatgatcctgtgaggtctaagttgttgtaggtgtcagtctattaaaactcgtagtggaaatcccgtagttatccagtagaaactaaagaaagatactacagtattgggaatattaattaaaattataaaacatttaaaaccttatagttaaagagaaaataggagtgttctgtttccacatatccttttaaaatagtgcattaaagtcagggattgtcatattataagcttatgtgccaattcttgcttgtctggagagtgttggggtaagaattaggttctggagcatcttaggccagtgttgtagttgttggggtacatctgcgccccacctgttctataaataaagtatcactgtaacgcagccatgcatagttacagtagagactgggatttataaaaccttagatatgtactgtctgatgtcttcttaccaaacaagctttgctagtaggtacaatgcaagtatagactaggaagtagaagttccctcactctgcaacattgtacttaggaaagtctcaaatgtagagaacatttcagagagcagtgttaggagcacatttatccagactcactaatactttttctacctttactttatgtcttcacacatagcatgcatatataggtcgtttgaaccattagaaaattggttgtgtacattaaatcattgtacccctgtataatgcatatatatacacacacatataccacacacacatacatacatatatatacatacatacatatatacatatatacatatatatatgtatatatatatacatacatacatacatacacatacatacatactgtaaatatggatgttatcatatgtgacctcaattttattttcacacctaggaaaattgccatcttttcaaaaatatctaatatagttaagaatgttcccacatgtcccaaatatgtgcctctcatgttccttttgttttaaatccaggacccaatctcagtacatattacatatattaaacttatctgtatttgattttagttacaagtcctctaacctttatgaaaaagagttgactatttgagaagaaatggataataactgaagttcagcgaaacatctcagtgttgtagcattcatcagagcccagtttagtgagttaatatatattcaaaagtaggcctctgcttatgtacttctagaataacctttgatcagttaagtgtgtttattgctactgcaacttatagaccatgttgggaagcatactaaatagatatttgcactgtaataagtacattacatttaaaaagtgtgccaatatatattttactttgctttttggtcactgtttcattttagatactctgggttttgttcatttgtttgttttttaagcatgctgtggtttaatcagatatacttgagtgtcttttcttgtcattttagacatgggagaagggatggctatcagtgcaagtacagaaggcaacactggaactgtagaagatggtagtgacagtgaaaacatccaagcaaatggaatcccaggaacacccatttctgttgcatatacaccatcgttacctgacgacaggttatctgtctcctccaatgatactcaggtatgtatgggtgaggtggagagaaggaaatggatggtctgccagtaacttgagcagatcttcccagttgatgtgagaatggagttttgagtagatttctttcttataactataactcagagcagttagttcttttaagatgttttaatggctacgttccaactgtaactgtgtctgaacactgaagttacatttaacagaaacatcatttttcacaagttacggagaaattacactatcatagggaaaacatgggactgtggggcattttaatggagcctctgatgagaggttcacagaagtcagtgtggacaggagtggcaggcctggctcacactgcttctctgctttatgtgtttctggtccttatgtttgcagatggaggattctagagattttcttggttaggttgacctaagccagtaaaagactttaaaagattactacactgtctaccagcattgatcgtttttaatcatatttctattcatacttttgtgtgagctggataaattttaggagtatccttgatgtcaaataagggatattttaaagaatgtcttttaaaggtgtttatttagtgtcgggtctgagaatagcatatgaaggtcattgtgtcagataccacttcagcttcttcttgtgccaggagggagaatcccagatcagagttctctgaaaactgtgccagaaggctgaatgatttatgataggatgtgtctttattttccatgctatgttaacttctttaggaatctggaaattcttcaggaccttcacctggtgctaagttttcccacattttacaaaaggatgcctttctagtgttcaggtcattgtgtaagctgtcaatgaaaccactgtcagatggaccaccagatccaaagtaagtcattaaccattttgtttaagagatatttaagcttaaaatgtactgtaaatatagtgtttgcattttcatttgttctttttgtcctgtggaatcttaaaatttttgttttaaaagatacataccaaaaataataggttcccaaacttttagaatatatactttacactatttgagaaaggatgtgcagcagtacagaatagtgagtacatagtagatatcaatatatgttactgagtgaataagtcactcactatatttccacattctgagtaactttggaactattgcagtcagatgaattgccttaagatgatttctgtctccacttatataaagaacgttgatataagttatctaattcccatcaaatataggtttgtttggtttttttttttaatttgacacaagctggaactgtcttagaagaaggggtcttggttgaattgtctctattaaattgggctatggacaggactctgggacattttcttgattgatgataagtgtgagaaaggtcaggctactgtgagtagggccaactcttggtcctgggttctataagaaagcaggctgagcaagccataaggaaaaagccaataaatagcactcctccatgacctctgcttcaatacctggtctggatttcctttatgatggactttggcatagaaatgtaagtgaaataaaccctttgactctccaagttgttttatcacagcaattgaaagcaaagttcaacattaggaaagtgcatattttgtggatgataatataattccagtgcagtttatttctgcttgcatttaaggctttgagttaaaagaatggcctgttctttattctttattgtagtaggatatattacattgacagtttcaggagagtttctagcaaaagggtgtttagagaaggaatgaaaatgatatcaaaatagaggaaaatttaaacattcctacttaaatcattttttaaaattctttggagtgtttaaatgctactaaagtctagaggtggttaccacaaaaactggagatcctagaacccttgtaaatcctcagaaatttgcctagcatgcacacagcagcaaatggtagagaccctgttacaaataaggtgggaggcgggaaccagcacccaaagctctgacctcatgtatgcaggcatggctacacaaatgtagtgtgaccacactcgtacaggaatgtgtgcatatacaaacatcacacacacatacagaaaaaacgactttaaaaatcgtgtaagcttctgcaaaacacatattttctataattttattttgtcacattgttctactttagggagaagcatgtttcagatttaaattaaaattttaaaatgtttttagacccaaatctcaagagccagaaaaataaattattgcttcttcagtattttgaaaataggaacttgatggaagtaaaattaaggttattaattatatactgaagaagaatgtattttaatatagctccttgatatgaaaaaaacctttctcattaaaaatttgataattttggcatttcattctgaattgatgaagattactataagaagaaacaactttagcaatttggagttagtgggttagagaagatccaggctaggtccctaggacgcacatcaggcagctcacagcctaatgcaactctaggttaaggagctctagtgccctcttctggcttctgagtgtatttgcatgcgtgtgatacacataattatacagatatacacatacaaataaaaataaataaatctttaaaaaaaaaaaaaacctgaagtaatagatctggggagaagtctgagtgggtacaaggcttgccttaccttgccagcatgaggagaggtttgatcctgttttttggttttttttttgttttgttttgttttggtttggttttttttaaggcagacatgttggcatacacttatcagccaagttttgggattacaggaccagacacatccctagggctcactggccaaccaacctagtctacttgggaagttccagtccagttagagacagtacctaaaaatgatatggatggtgccagagaaatggtatccaaacagtcctttggtcttcacgtgtacacatacttacagaaaggaattgggttattgctgacggtcatttgtgctgtgatttattcctaaatgtttagttttcacaagtcaaaacgggaatttgataaaatctgtctttacttctatttattttcttgctgtgctaagcaatgacctatggagagtttccagcctctactgtaatttgaaactacctcataaaaaattgcagacatgaagtttccatcttggttgctttctagaagaataatttagctaagaatggtggtatactcttgccatcccatctcttggaggctgaggcaggaggattgctatatgttcaaagacaccctagactgtatagtgagaaacatgttttagaaaatgtttaattatcaaataggacatttgatccttacttcttttttttaatgtttttacataacaggtacttaataaatacttgaaaacaagaacaagtggatcttttgagcaaatactgtctaaaaggcattttattcaatgctaagaacagaaagttaaagtatattcataacaagattcatatattagcaaatggcactctgcaggatctaattactataggaattgagcagaaaagaacaatgtgaagtaacttggaagcagtagttgtatgtaggcctcagaacacccaacatgaggacttctagtggttacttccagtcttacctctcattgtaatttaaaacagcatttttgagtactaatacttttgtagcacattcagagtaatagctattttgcaaacaacactttaataaaagattctgatactgtttctccagctttatttcaaagaaggtagtaatttttgtgatactgttgatataacagtgttcttgtgagattggctgagatctgtgaattacttgacacaactgtaaacattttaaggtggaaatcaagagtaataaagtgtcatatcctatgcaaatatggctgaatacggtatttagaaaaagttttttaaaagtaattcctgcagcattttatgctctgccttttaaataataatgcttccagagaatatcattggttctaaaggtctatgttgatttcagaaaagtaacaagaatttcaaatacctattgggatagtatgcttaaaataatgttataatctagtggaacgtaaacatttttattggtgtttaggaattctgaatatgactaacataactagaaaacattagcattacatactaagcaagcagatatcttcactctgttcatgtgatctgtaagaagtatagttttgaaagaaaggaaccaatcatatatctgcaaattatttttatcttttctaggggaaaatgtttaaaatacttgtaatttttacccttgtaagaagcacatggatatgcacatatgtatatagcaacataaaaattagaggcaatgaatttttttattcactttatatcctgatcactgcttttcttcctcgtcctgtccccttccacaatccctccctctgagaaggtggagacacccacaccccacaccccagtagccacgtcaagtctctgcagagctaggtacatcctttcacactgaagccgaacaaggcagactggctataggggaacatagtctatagacaggcaaccgctttggagacagcctccgctgcacatccggtacatatgtgcaggagggggcttaggtccagcctatatatgctctttggttgattggtcagtctctcagagtctgaagggttcaggttagttgacttcattagttttcctgtgagttctatctccttcagtgtcctcagtccttcccaaactcttccaaaggagttcccaatctccatccaatgtttgcctatgggtctctgcatccatttgagttagcttctaagtgtagtctctcagagaacagccatgctaggctcctatgtacaagcataacaggcatcattaatagtggcagagattggtgcttgaggccatgaatcttaaagagggcaaggaggagcacatggaaaggtttggagtgagaaattaggtaattataatctcaaaaaaaagagagagagaaaatttaaaagaaatcctgaaatgatgtggctgcagagaagcacttggtagtcttgactaagtttctgaatttgtacagatgtgtgtacagaagtggctgtgggtcagtccgttattaccacaatcatgactttgtctacatactgtgctttgtgtttcacctctcaggtctcatgagttacggtccaagattctttcattgcagttgcttctgtccattctgcagaatgcaggacctgttttcaggacaaatgagatgtttattaatgctatcaagcagtatctatgtgttgcactctcaaaaaacggagtctcatctgttccagaggtttttgagctttctctttccatatttcttactttgttgtcaaacttcaagacacatctgaagatgcaaattgaggtatgttctacatttagacataaaatttgaaggttactcctatttcctttgtttcatgttacattagcagcacatgaaagcttcccataataggtgtgtgttttcacgtgcttcattttgatcattcttgtagctagtaggtgttggttaagcaatagaatgcaaaatgaatggatagcctgtgcattcagcagatttgtactagctgaaaatacaatctgattttcacaataactttaccactttacatatgctatatattaataatttggcatgcactctgtctctgcatgcgatatgtgtgtgtgcatttctgtgtgactgcgtgtgcatgagtgtgtgtgtgtgtgtgtgtgtgtgtgtgtgtgtgtgtgtattttgcatgtacacaagtgttgggtgctcatacccacatggaggccattgcaggacatgaggtgttttcatctgccacattcaccatagttctttcagacaggctgccttactggaccttttgttttcagctaagctggctggtcagcctgcttctaggatccatgtgtctccgcccattatgctgggtgtacagccaagcccagctttgcatgtggtattaggatttgaccttacatcctcacacttttcacatgctggaccttttacccactgagccatcttcctggcctaaatttagcaatcataaaagagctgagcagtgccatacatactaagccttcagagctttaaaggactttgtagaggtggttgaaagatttatttttaagttatttggtaacatgtaaaaaagttaatttttgctttgcacatttttccccaaaacatatatttgtatgtgtcttattcccaagatattgaaagtagaacaacagtcttggttctcaaatatttttagagacttaaagctaaattggtctctcttctgactacgtctgcgtgcataaggagctgtcgtatcagttccttagttagatctttgtttcctcttgggacgtttcagtgttgtaaaggaacattttatgtctttatgatttggtggatccttttcccaactccttaaaatagtgctgtacttgcaacgtaaagtttagaaatttctatttgtgtgttggtcagtattcaccttcatattatgtttgatataatatagagttttttaaaactttgtgtatgtgttcatgtggaagccagaggttgtcttcctcagctgctctctatcttatgatcttgagacaaggtctctcactgaacctggaacttacttgttcagctagatgagctggccagtaagccccaggactgaagtcaccaactctgactttttacctggtgcgagagacctgagtgtgggttttacccactagcccatctccccagcttctgcatattttattttctgctaatttcatgctaccagaagatgaataattagtaggcattccttttccctacctttgacatggttaaaataattgcattatctttataaattattcttctatattttctaccatattttatttcaatattattatgggaatgaaatagtaaggactttaaattttaagttatatatttaaaaattggcacaaattgtctatgtttgtcatacatctgtaaaataattccaggcatttagtgagttttaaattttttatagttttcccctattgtcttcagaaactacaaataaaatagtttcaatcaaaatttgggatttttttactcctgtaataaccagaaaccttccacttgacgatgagatacttctcttaagattagataatgtgagcaaattttgaatactgagagctcatagggactctttgcatgagccatgtgatatatacattcttacatatctaagattataaaattaagtttcagttgcaatttttttacaaaaatgaatttaaaaggaaatactctagaaatttcctattgcctcataaatagtaggttatagttataaaatttttactgtattctagttgtagtagaaattattaaaatcccggcctggggcttctatccagcctttagtcattaagttcctggatgaaacacacacatgtagcctttatatttataatatgccttaagcaacacagtagctatgcagctgcctaccctccatgctgttacaatctacttttctattgatagctcaataggaaacttattatgtttcatctgggctgttcttagcttcagttgggcagccctcagggccacgttttttatggttcagctaacccatggaggcttctcctttccctctcctacactttcctcttctttccctgagcccacaaaaacctaaaccccgcctatgtctcttctacccagctattggctgttggcatctttgtttaccaatcaaaataaacttggggggaggatcacaaaggctacatgtggattccaggtcttgggggtgcacttaacattaaaatagagagtaaaaaacaaaacctcaacactaatttatatctttgtttttatttttgttttgttttaagccacagtctcactatggtctcactacttagctttggccagcctggaaatctctaagcagatcaggccaggttcaaactcagcaatctgcctgtttcaccacttgagtgctgagattaaaggcatgtgccatcatgcccagcttgtttaaaatattttttaaatctttaaaaaaaaatattccattatctgttaaaaggagataatgaaagttattgatgtaagaatatatatatttttgaaaatacttaatttaagataagttgtattctactttggaaaataccaaatatatgaaaactcaaatttgcaaaataaaattagaatcattgttatatgaagattcaatttatcagaccgttcaaagtttgtgtaatgtgaccccccgccccccccccccggccaatgcagcattatgtagttttaaaagattaatatgtaactttcagagaacatctcctatatgaagatagtatgcttatatcacagctattattatacattttgtgctgtaattgcttaagaaatttaaagttctggttttctaaaaagccccctattaggcatgggatattacagtaatagaattgcttattgaattttgtaaaccatagatagtgatatagttgttttgttttttgtttttagttttttcaagacagggtttctctgtatagcccaggctgtcctggaacttactctgtagaccaggctggcctcaaacacagaaatccgcctgcctctgcctcccaagtgctgggattaaaggcatgcgccaccatgcccggcttgtgataagtttttccacacctctacacgtctggattattttataaatcagtatttttgcaacaccatcaacgtctttctaggcacacctagaaaggagaattttgtccattaagcagttgtaagcagacaatttatatataaatgtttagctaaatcttttgtacgtttaagaaattatacttagaaaccgaaggaaagatgtttgcttttcattcatttcttcctataaccctgctgaggtgcttatgtctcctggatcctatacaacttcttagacctttaaatattgggaaatacacctatatccctctgtgtcactaattttcttgtagcacttgcttttgtatgctaacttatcaaaattcaagtttgcaaaggctacaatgtcattggaaggaatatatcatatatagtataattgaagctgaacaattttcttttcttagattaaacagcagttgtctttgccacatttgtatccctgtgcattctgggaagatctgataacagtgtttgggaactgtgatcatggccatagatacttattgaatgcttacatataagacatgtgacatgtgttgtgtagacagcgcttattgagagcactctggttcatagccttgtaatgtcacagaaaatagcaataattgttttgagttctttgaaagaagaatacattatggggctggctaactcttgggagatatcacttttattataaatgttattgtttctggattcatagaacatagtacaaatgctgatgtgttttcattttagctggctttaggtcatagtcactttcccaaaatgattgaaattttagtattagtcttcagatggaaattttcttcattagataaattgtgcttgataatattcagcataaagaatagtgagagataatgtcttgaataaggattttttttacttttatgagtaattagaaaaatataaaagcatatataaaagtttagagtagagttgaaatctaggagtatttagaactgctctgtactagagtgtccaaaatgacaactggtgaataagaaacagtcagaaatgatcacccagaacaactccttatctttgtacatttaatttgtcaagactgagatggccaagaaagctggtgttagagacagaactaaaagtccagtgccaaaggaacctaggtcctccctcctctagatctttggacctttgaagagcgatgcgttctgtgttaaatggtactttaaagagatgcttcctctgtcacaggtattctttaaagaaatcttcctgtacattttggaaacgtctacaagctcatttgaccataagtggatggttattcagacactgacaaggatctgtgcagatgctcagagtgtggtggacatttatgtaaattatgactgtgacctaaatgcagcaaatatatttgaaagactagtaaatgacctgtcgaaaattgcccaaggaaggggcagccaagaacttggtatgagtaatgttcaggtaagagggtttttttgtttgtttgttttgtttttcaaatttttccaagaatgagacctgcattttcttaaatgatctttattctatttctgaattattgtaggaattgagcctgcgaaaaaaggggttagaatgtttagtttcaattttgaaatgtatggttgaatggagcaaggatcagtatgtgaaccccaactctcaaactacccttggtaaggtaacattttaggttgaattctacatagttttaagtcagtgatatgttagaagatatttaaagatgccattaaagtagtcttgtgatgtatttatttatgtaacataataaaatgtctttgtaagcattaaaattattttcaacttacacttaaaatttctagtttagttatcctagcaatataataataatacatagcagtaatataaaagtatgtataatataatatatcctctcttccatattgacactttttcttataggtcaggaaaaaccctcagagcaagagataagtgaagttaaacacccagagactataaacagatatggaagtttaaactccttagaatccacatcatcatcaggaattggcagctacagtacacagatgtctggcactgataatccagaacaatttgaggtcctaaagcagcaaaaagaaataatagaacaagggattgatttgtaagtattggatttgtaaaagaactgttaccgaatatcgctcagccacagtatcctaactctgtccccggtctccctacatttctcattgtttttcattccttattctcttggatctaaaaattgaatggctccatatttagttctccccattattgaaagagtcttaatcagatccatgagatgtccagcctatgttttcctcaaatcgttctgttactccccttttgtgtaatatttatctatgaggtggtgtggcttttggggctctgctccatccacaatgatgcgtgtgcgtgtgtgtgtgtgtgtgtgtgtgtgtgtgtgtgtgtgtgtgtgtgtgtgtaaggaacagaaggcttgtttgcaggaagaaaagagaccaatgaaaggggaacaaggcagaaagtaaggccatgaatatgagccaaatataaattctgttgtgtatgagtatgtgcacatgtgcatatgtgtgtgaaatgatttaatgaacctctgaatagcaacagacagaccaacctagaagggggaaatatcatggggcctcacctgtagataaagaactacaggcaacaaagaatgctgcaagtgagagaaaccattctccctagggatgagtcccctaaatggtcatctaataccaccaaatggtcagccctgaaatcatatacataccactaactctagatggactgaagagcttgtacatatgtaagtacatacatatgtatgtatggtgtatgtacatatgtatgcatgtaccagatcttttgtaagctttttacaaaatttagcaggaaaattgatttcacaagatcggagtctgggagaggagtcaggttgggatcggaaatgcattaacaaaaataaaattcctagtaagaatgaaacatgtaactaagcttgaggaaacagaaaactaaaaggagtaataccaaaaactggagtttttgaatttcacatttttgtcacatgatttatgaaatcagatgcaaataaaacagtccaaaactggacatcttctatttatcaacagcacattcatgacacatacattgtggatggagcagagccccaaaagccacactttctcttttagctttttataccttgttagtcaaaaattctttataaaatcacctcacagataaacgttacacaaaaggggagttacaggagggtgtgataataacttcactctgtaaagtctttagaagttcaaagcaagagtttcacgggtccttgctttatttatcatgatgcatacctgtggcttcatccttggacgggacctagatgaatctttttttttttcttgatcacaaatctacccaattgtatttcttattatgtagtcttagtattctgtgaggagggagcacattctattcttgattctaactgtattacatctttccggcaaaacaactaaaaccatctacttaaactttgttcttaaattatttgactcaaatcaggaatcttataaagtaattcatctaaacagcatcgattcatggaagtccatcttcatgttaatctacaggaaatttgctcaataggatgagcttatgcccaagaattgttaggctatgtaattgtggcaggacaggagatcagctgtgagaagcagtcctgggacaaactctctggggctgtgtctctccagagtgcacctgtctcaggcatgcaaaacagtgggccttctccaggaaactcattcgcttgtcatagcctttcctagatggcttctgtggagtttcagagtttgcagtcctacagttagttctttggtttagtgttaagtcagtaaagtgcttgctttgcattcatgaagacttgagctcagttcaccagaacccacttagaagatagattagatagatgatatatctaatgaaagagagagagagagaaagaaaaaagagaaaaaagaaaagaaaagagaaaggggaggaaggaaggaaggaaggaaggaaggaaggaaggaaggaaggaagagaagagaagagaagagaggaagaggaagaggaagaggaagagaaaagagaaaagagaaaagagaaaagagaaaagagaaaagagaaaagagaaaagagaaaagagaaaaaagagaaagagaagagaagagaagagagaaaagaaagatttatttttataaagctaggcctggtgggtaaacccagcacttgaagggctgaaacagaagttggccattaggtctcttctatcacagcctcatggggaacatgaacaaagtttgtgaggaaaattctttaatatcatgattaattaacctattttgtaaggcgaaacatgattgttcaattggctggaccatatcagaacttttgccccagaagaaccctgtagaattaatgataaactcggagaaatggtcttctctatatttagatggatagatgtttgttttgctagataaaagtgtaattgtgtagtcagatgtttgttatcagattcctgcaaaacaactaaacaggtagaaggtttagatgagaagtaaattgttaaggtactgtcttactagcagcagatgcctctgcctatgtgccagctgtaatgtccagtggaggtgaacagtatgggcgaaacctgagtgaagtccaggttctctttgttaaagtcacaaccagacatcagcatctaattgacatctaaaagagatgtataataccattggatctttttttttatagtcttgtccagcagtgtcccagggatactacttggatatcttgaataatttccaaaacctgtgagtttgacagcaggctttttggaagtccctttaactatggaacatggcttgtgaaggtacaaaaggacacattactgctatgagaagtactcttctagaaagttagcagtctatactttgtaaatacagcgccgccgcaccctaccccaccccaccccaccccaagtttggtctcagtagatggctcatttttctcagctgtggatagacactgctgtgcagaaataaggcagcgtcttgtcctatatctcattctttacatggtttaaataatcaattaagaccctcataatttatataacctttacaagcctttttttttccattttggaaaaaaaatctagctattttaatctttatgcaaaagcttttatactagtcaacatcttactgatttttgataccatatgacataacacaaacataccatctcttatgagaatttgggccttgagggtggtggttaaacaatgtctatcccttctttgttaaggtccaatggcaagcctaagtcctggttttgccaaagctcactctggaggaccaatacatttgtctgactcacagagcataggtgaggatttctgacaggagtgtactgagagcagtctccctggaaagtctacctagtattgatgatggctttcccacaactgcataggtggagccccctttccttcaccttaaattttaatggtttgatgtgtatgagtgtgttttgtctacacatatgtctatgtaccacatacattcttggtgctcacagaagccaggaggtggtggcagatcccctagaactgatagcagagaaagaaattgtaacatttctggaaagatggctttgctagcaacctgaaagatggattagaatatgggcaaaatgagatgtggagaccatttaagaactatccaagttgtccaggaaactggtgatgagacaccaaaatagtatagaagaaggaaatagatgatgtttaagtgaacaaataacatttgaatcggctcttagagcctgaggagagctcccctgtgagaagatgctgcaaaggcatcagaagagtctccaaacgcattaggttagggaactcagcagatatatagaaatagatgagagaaaggggtaaattggaactgtactgagaaagctttgtgtgctagtctaatctgcttaggtaactgtaccaaagtactaatagactcgcatcctgtcttacatcatctcttctgcagcattgtcgctgatcctctagctgaccactgtgggtaggaactgggaagctcaccatgctgtagaaaatgcctgtaaaatgatatacttccatttgagattcttctctaaggaaaaaaacaaaaccttgggccatgtaataattttgtatatgcatatgttggttcctgttttctatatgctattaagaaaggaatttactatactgcaaaatcttcctagggagtatgagtatttttctctttttaatctttctattaacttcatctagatttaataagaaaccaaagagaggaatacaatacctccaagaacaagggatgcttggcaccacacccgaagatatagctcagttcttacatcaagaagaaagattagactctgtaagaataccgtttcattacattctaacccttcctatagtttatatgtatatttaaaacaattaacttgtagcttcagactggaatttgtgtaaccatatagtcaaaacttacagttcttaggattttctgatttgtaaatagttatgttgcaaatggaacatgccattgaatattaatttctatcctttgtttttacattagactcaggtgggtgagttcctgggagataatgataaattcaataaagaagtcatgtatgcatatgtagaccaacatgacttttcaggaaaagactttgtttcagctcttcgtctatttctggaaggattccggcttccaggagaagctcagaaaattgatcgattaatggaaaaatttgctgcaagatacctagagtgcaaccaagggttagtaagacttgagtacttttgactgtcagttatgttcatgatagtcagaattcaccccttttcttaacagcttatattatctactattttgaagtggtaacacactgacctataattgtactacatgacagaatgttaatcctaagggagaaaattaaaaatattgtttgaaatgacatttttatgaaacaacacttacaatgacatacatttattttttttcagacaaaccctttttgctagtgcagatactgcttatgttttggcctactcaattatcatgttgactacagaccttcacagtccacaggtatgttttcttctacatcaagttttacaataagaaagaaaattaaatacagtcttttgaatctgtaaagtactagctaaaatttaaatttatgtggcttaaccaattgccagaattaaaattatatccatttggtattaattctagtgagacttaaaagtatttgtaaagaatttgtcagtctcatgattgacagttgtacaaagcttaaaataaattttaacctaaaaagatgttttaggtcttctgaatattctttacatggaaaatactatatatgatctgtctttttaaaaagacatttaaagtttgaacagcagtggtattagtattagagattgtatcgttagcatagattagaattgcaccatttctcacagttactgaggacagcccaggtggtgcacatgtcagtatattccatttctttctctctcagtatgtgtctcttaagagtcactgtaagcataaactacctcccaactgaaccctgaacaagcatttcaaccacagatgtgtagcaagtcccaaccagtgtaggcttaatacttatggctccttagtgtttagtaaagaactgtcacctgatttctgatgccctctttaaagtgttgcacttgaagtttggggttctttttgcttgacttctaaaaaatacattttggtattattcagtaaaattgtttctatacgttatttataagaaatcctgactattaactgagtgtgatggtgcacatcttctatcccagcattcaggaagcagaggcaggttaatctcttaagttcaaagccagcctgttctatataacccaggcaggactacaaaatgagacctaatagagaaaaaaaaaaaaaaaaaaacaagattttttttgatatttatcagtcttgaatatatgtagaattgtgtgctagatggttttaatgggacagttaattcatttgaagtttgctgtggatgtaactttgctgtctaagaattattttttatgtgttttgaaatattcaaggtgagattgatatggaaagtatacagcagaatgtggaagcattatatatgaagttatacctaccttaaactccatagttgaatgaacttaattagtttagtgtaggattttaagaaggctttaataatttacatttgcttttggtagttccttaatactaataagtactattaataatactattgtcagaacagctcaccttcaggttttgattatctgtcttcatttctccctctgccccatgtttctgtaaagcttcccacacctatgcatttagctatctttccttcagagtttgtttggtttctcagctaattttttttttaagtatgaagtatataataataacctgaagttacatacacttcttattacagggtttttttcctttaaaaacatttcacttatttggttttagaaacaagcaatgttatataaagccatgtccttttgtatgtagctataaatgtattaaaatgtatattttaaatatttttaaatttttctcattttttcattagtcctcaaaaattaaaattttatttttaaacagtgtgtggagacataatgactcagagggtaagagggcatgctgctcttgccgctgattccaagagcctttctgtcaggcagcacacaagtgcctgtagctccaggtccagggcgtttaatgccctcttctggcctccatgggcacctgcactcatacacatacacacataattaaaaaataataaaatcagtttctaaaaggttctgaatatacacatttaaggtacatcatcttgaaaactgtcttgtcttcaggacaaaagctcttgtccatgaaatatatttgcgggtgtggtctaatggtgtcagtaactcactctcagatggcttcacagcagactggatgccatgttgatgcccagcctgtatctgtagcttttgagttctgtgaagtcacgtatcctattagaaattaaactcatagtccttgtcccaagggatttgtagttaagaaacatatagactttaaacaaatgacattatttttgaaggctatagacaaatttaaaagcactccttaaaaaccagcttctcattattaatggtttacaaatcaaatatacacgatctttaccacattctctttggtgcttatttacctttaacaatatttatggttaagttcccttccatattagagcaaatcagtgacttgtttatttaaatctgagtatatttacatgtttttatactcacaattagccgttatgtagttaatgccccagagtatgaacagcttaatttaaacatatgggaataaaattcaagagtagtgtgttctgtacaaaatttcaagagaagaaaagtagaattactttacactgcttccagaatcctaccatggtattagaatgcagtatgttttgagtggctaaaatcaatgtttattcccaagcgagcccttacccagatgcagacacttaatagttacttcatatttttcatttttagacttcacgatacacataaaatctcttaaaaggatattctaattcttaaaaatgaatgaaatttttatgttaatttttaagactgataatggtttttcatatctaggttaaaaacaaaatgacaaaagaacagtacattaaaatgaatcgtggtatcaatgacagtaaagatctccctgaagagtatctatcagccatttataacgaaatagctgggaaaaaaatatcaatgaaagaaacaaaagaactaacaatccctacaaagtcaactaaacagagtaagtaccacattaatcacgtctgattgttcaaggggagacatggttgtgtgacttgctttcttctggttttctgggtgtttgtttaagacagggtcctctgtttttctcaaactgacctggaacctttctgtctcaatttttaaaaaacagagaggtatgtgcttaaggggctttttattttgtttgcttgctttttgcttaatttaaaataaaaaataattcctataaaagtgttaaaatggtgaatgactacacactaagtaattgacatgtgttgggagtgtttaaatatgagattgttcatttcagcagggatttagacattaaatttcttagagggcactgaagagatggctcagaagtcaaaagcattaaacatattaattaaagctttccacttaagcaagtgttgtctgatttgatttcattttgcctagattatagcatccccatatcatactttttctgtcctcacttgatatgtgatggttgaaggcagtgagaagtgagatgggaaaaggtggtacttttctggatatgctaaaatgactgggagtgtacagggccagtgctttttgttttgctatctcgatataaagaccactgtctttacctctcttctcttctcctgttccacatttggttggcttccttgacaattttattttgagtgttgtactctgagattttttttacaggttttacttactcctgactagtagactattctattcccacaccttcccaccccccaacccccaccaaggtgcagttcacccttttaaagggaaatttcaaagggagatgtacctcagtggtgtagcacttaactagcaagagcagggcccttaagcttcctattgttaaatggtaatatttgttatttcagatgtagccagtgaaaagcaaagacgacttctgtataacttagaaatggaacagatggccaagacggctaaagcactcatggaagctgtgagccatgttcaggcaccttttacaagtgcaacacacttggagcacgtgaggccgatgtttaaggttagaattactggtaactttgctacagtatatatttttacatagttttgcttagcatattttttaagtataataataggacctatttgatgaacaagatattccctggttattattagagtttaatacaaattatttctgtgttaaaggaggtaagagagatggttcagtggttaagagcactgactgctcttccagaggccctgagttcaattcccagcaaccacatggtggctcaaaaccatctgcaatggggcctgatgccctcttctggtgtgtctgaaaagagcaatggtgtactcatatacataaaataaataaatcttttttttaaaaaaaaaagaggtgagagacaacagtatgcggcttaagtagttggtggaagtataatttcaagaattaaaaataggaaggtatggagaatggtcactaatcccttggcttgttttttttcagttataaataatttattcctaaatcttcattcattccaatttcaaagtgatcctaagactcacactctcatcagaacttctagcccaggagttctgaaggtactgagtaaaactagagctataagtttacataagaaatacacttcactgtcacttcattgaataaactatcccaaaaagctatcaattgtgagtaacttcatggccactactctttcattgtgccacaattttgtgtaggtttttttgtgtgctgtaacacagtccctgtaatgtcatatgtgcacctacactattgtgtctagaaaacactcttttcttgaagtcatccaccacttctgggtcttcctacccctcttccacataggtcccaatcttgagggaagggagttgtcatgtagacattccatttaaagcagagtatttcaaagtctctttgacaatgtttgttatccagatgtggctcagtagactgcaagaagcagcttctctggtaagaattgagtaatgcacttatatatggatatagaaataagtcaccaggagtcactttgttgctgtgttcatttatcagagtaatggtagaaggtttccacctagagcccatgaactatctagtctcaggtacttagctttattgacagtatcaggtatgcattctatctcatggagttggccttacttccatttaaaaaagtgattgaatactcctgtaacatccatgccactattgcactagtgagcatagcttgccaggcaggccattattatagctgggcaagatgattgcttttctctttcagtagcatatctagcaacttaaagctctataaactcaaggccatagagtcaaaacttctagttgagcaccaactagattgttctttttctgtgacatacatatgtggtgtcttcagtaatagagtattaactgtcaagttgtggaacataactgtcttagttagggtttctattgccgtgaggaaaaaccataaccaaggcaactcttaaaaaggaaaacatttaatggggactgaaacattgtcttagggttttactgctgtgaacagacaccatgaccaaggcaagtcttacaaaaaacaacatttaattggggctggcttacaggttcagaggttcagtccattatcatccaggtgggagcatggcagcatccaggcaggcatggcacaggcagagctgagagttctatgtcttcatccaaaggctgctagtggaagactgacttccaggcaactagggtgagagtcttatgcccacacccacagtgacacacccattccagccaggtcacacttactccaacaaggccacacctccagatggtgccactccttggtccaaggatatacaaaccatcacaaacatctagtttcagagtttccattatcatcatggtagcttgcaggcggacatggtgctggagaagcagagagttctacatcttgatccaaaagcagccaagagtagggtctcttccagactggacaaagcttgagcagtaggagacctcaaagccagcatacacagtgacacacttcctctaacaaggccacacctcctcatagtgcaacttcccatgggccaagcatattcaaaccactacagtaaccagtagttaccaatagttttgtccatagcctgtaatattaggggagggagggatagggatcctatgggatcacattagccaacaactaaagagatgacactcattcctggtgttttacttcatagcatatgatgtctaatggagtattattccttccattattatagaaactgtatttaaactccttttacacatgtatatatatatttaagaaacttctatagtagatttccatatagcttttcgaagggcctttagtgctagttattacccatccatacttcttcttccaccctgccctccaaccaccagcccccattgaattctctatcctcattttctctgtaggacactgctctgttccctgctccttggaagattcctccccactggtcctaacctctgtgggttgtttttctaaatgaaacacacatatctaaaatataaaactcatctgagacaaaacatgctgacatttttctctgggtctgggttacatccctcagaatgattctttctaatcctgtctgttttcctgcaaagttcatgatttcacttttcttaacagctaaattctgctgtggaaatgtaccgcattttctttagctgtttccagtctctagctttatgaatagagaagcagtgggaatgaatgagcagtgtctttgtgtaagatgaagtttcctttgggtatatccccaaacatggtagagctgggtattgagctgtattgattggcagcttcctaaggaactgctgtaaagagttccatagtgtcgctacaagtgtgcgtttttgccagccatgcgtgagcatttccttaacctacgtcctcaccagcatgagctgtcatttttattgatctttgccattctgactggagttggacagaatctcaaagtagttttgatttgtgcttgtctggtggctaatggtgaacagttctttaagtatttcttagccatttgtgttttgttttttaagaattgtgtgtagttttttaccccatgtttcaattggatatttttttgatgttccttttttttttttttagttctttatatattctaggtactaaccctctgtcagatagataattggtaaagatattttttctttctctttactgtaataatggtgtcctttgctccacaatcccccacccccgcccccgctttatttcatgtggtcccagtaattaactgtcagtcttaatgtgtctgctatcagggtactgttcagaaagtgttttcccgtgctaataatattggcacaatattattgttcaagaatatttcctaccttttctttgtccaaatcagagaatcaggttttatgttgaggtgcttgactgcacatcttttaatccaagcattattattttgtgagggaagagatcatgttcatattcctaattgtaaaaatatcttttattctcctgatgcaattgtcatctcatctccaagggcttattgcctctgtgtgctaacctaggcctaggcctgaaagcttttagcctccatacaatttaagaatattttcagtcttgagactccctgctgaataagcttaccctttctagctctttctgaactctgactgactggtctggctcaaaactcctatttaagctaacctgattcaacctggcttctctcagcttctcctgaattgttctgctaggcctcttactaactttggcaatctgttctcatcttatggttccttcccattctctggcttgttctctcttcacctgtctgtagcttgttctctttctgcaacctgtctctgtacaactgtcccagtaaaactgcctccttatctttttctttgtgtgctctcttaagttaccctgtttcctctgttcttgtgagagttgagcagatcctacgctgtcaaatctttctctgactcatcactttttctgcaactcaatccctttcaaacatgagtgcttccttctacaaactaacttcacctttgttgtttgggattaaaagtgtgtactaaaggcatgtctgtattccagccagaagggttaaaggtgtgcgttaagctgagccacaccacagtctcggggttcacagtgtgatcaaatatcctgcaacatctaatatctagtacagttcctagtttgtaattgctcaataaatattggttgggagaaaggactacataatttctaattttttagtgtgtgacttaggatattgaggaatataatataataatataatatattcatgagaacatttttatatattgctaaatcttatttcagaaagatttatacaattatatggagaaaatagtttcactatctgcttaatattatttagggataatttgataaagaaatcattgtcttagattaatcataatcctaatgaagagaaatgtttttcctatggacttaagaactatgtgtattttcttcttaagctataacacaggttttcaacttgaagtattttctctgtcacagaatgtgtaatttattgttttcatgggatattttgtaatcagtaaatactatgcttgttgcttgcacatcatgactgaagcagcatcttcaagtgttatagatgcagagtgaggcctaggaagaatctaggtactgtagcttgtgtgctgtgtatggattttaagctcttactttaaactttctgaaccatagggaaaaagcttaaaggaattgtttttccttagaactgctataagtttcattaccctattaaaaaatctcatcatttctataatgcactggtaaaataacattttttatctttataactttatgtacatattgctctgctgctcagtgaactactaaaagcaacataatttaatatcaggcacttgagttatgtagatttctgttgtttgttgtccatgataagcaagtgctctaccctttaactaccttaccaagtcctttactctttgagaccgtatcacaagtatctcagattggccttgagctcacagtcttgactctacctctgaagtgcttgaatcacagatatggaccagggtctgctgagtataaaataagtactctcttccaaatgtgtagtgaatagtttattgaatattttaacatactgtccaactaggaatcaattattgctttattaatgtaagtaaatagacaggctgagtgatatttggaaatcaggcaatgaaaaatgtagggtaacttattgtaagtaggaaaataattcaggggattatattgaaactaaagaatctggattattgtaaaagtcagtgcttgtaaagagaaattaattttaaaccaatgataagactttatacatggatgttgactatgtctgtgttttcttttttgtggatagtttatagatactgttattaagatacacctaacgtcgttactgagtgtattattgtttccatttatttaagcccagaaacgtaattttcttttttctttacgaaaactttctcacttattatgccaagatgttcaattatcacttgatgcatatgttattttaaatttttaattcttctagttggcttggacaccttttctggctgcattcagtgtgggtctccaagactgtgatgatactgaagtagcctctctttgcctagaagggataagatgtgctatcaggattgcatgcattttcagcattcaggtaacaaagaattttaccttaatagccagttttgaaaatatacaccatcaatatagttcaactcatatcatttttctctgactttcttaaaaaccagcttcaaatttatgataagtttaaataatttttaagagactgtgatagagcaattctgtatgatgtttctaaacattgtaagtatttattttagatgcctcttaaacgtcagaactagttatctttaaaagaaccaagtacctaacatactctccatgaagacagtccttttagagagtttatgaagtttaagcatgacctttagctagactcttctatttcttaacccattttatatttcattgagaatgttatgacttagtgtattacaaaatacagcctagctatagaggaaataatgaacaaatttataaataaaggttttgctaatataattaaaacaaaattttcagtaaacttattttcactgtataaattcatttattgactactgaaaatctcatttggaattgtcggttcaggttgtgtctagaattaagacatttatgacctttctgccttacttgaagattataacaatttttagttttgtgtgtaatccatgacatgtttgctaagatttactaagcgcatagacagttggtttactaaattagaggccagtgtgctgtgttttcaaccatgtaaatacaattctctctctccccccgcccccagctggaaagagatgcatatgtccaagcactagccagatttaccttacttacagtgagttctggtattactgaaatgaaacagaagaatatcgacacaataaaaacactcatcacggtggctcacactgatggaaattatttaggaaattcgtggcatgaggtagaaacacttttaactttgcaactcaatttttaaagttagttgatgctaaatgttctactgtaataagctttaattgtgggaaataatttattttaaataaacagcttgcataatgatttataatgtaatgtttttacattctaactgcatatattttaagatacatacttttaaaacctcactttttttttctttctgtgctgtagatcctgaagtgcatcagtcagttagagctggcacaacttataggaactggagtgaagcctcggtacatttctgggactgtgagaggcagagaagggtctctcactgggacaaaagatcaggctccagatgaatttgttggtctagggctaggtgagaggttttaagttccttttagaaagtgtcaaaacttttttttaatcatgctgtgttatttttattatgacaatgaaatataattagagaaattgccctttgtctaacatgttatagagaaaaacaagataataggaaattagtcttttttcacttggtctggtttacagtattaaatgctacttagtttcttcctcctaactatgtaaaggatacacttcaattcacttgcttctaagactggacaagtaacatgtagacttacgattaagaaatgattggagcaaggagaaatcagtcacactcaagcatttgaaagccattgtgtaggcccatgcaaactgttctgtcagggtggaacctcttaacccaagctttcagaagcgctgggagtggccaacatattagcaaaagtaaaagccaaaaaaatgaaagataatatatttttagtcaaaaatagaaagagttcagccgggcgtggtggcgcacgcctttaaacccagcacttgggaggcagaggcaggtgaatttctgagtttgaggccagcctggtctacagagtgagttccaggatagccagagctacacagagaaaccctgtctcgaaaaaacaaaagaatacaaagagttcgaatggggtggagagatgattcagcggttaagagcgccgactgctcttccagtggtcctgagttcacctcccagcaaccacatggtggctcaaggaagatgtttagacttagactttgacttgtgtacttttgggtttgagttcttctacatttctttcatgcttgtgtgccagctcctttaagttcctgatttgttttccaccattgcaaactaaagacatctaattgcaggattattgggactaaataagaaggtatgtgtgaagaatggatttagcacactcgtattacattagagactggggagtgagtaccatctgaccatctctccctctccacagtcacacagtcagctcttcagaagcatggatcaggagcaataaggagtatgccagagacccagcagtgttaaatttttaagactttgtaatataaaattatattgtgaatatttcctatctttatcctttagtaatttctgttgttgttagcagtccttaggaaacctaaaatggttaagaggagaagaaaaaggactaggaccatatgttgatttcaatttggattgagtaaaattagttcctggtggtagttaactaaaataatctaacagtgcaatctagcagaatgtctcagtgatgccattgcagaatgtgaagcatgaatctgttggggcttgcctgcggctctcatgttcgggttcgagcctgggaggcagcctggagctgaaaaagaagagggaaactaggctgagagagagagatggaaccaagacaggaatctgatcaaggctcaaatttttaatggtggacaagctttataaaggagaggggaagcccattcccgccaaatcgtccttggagcccagctgcaggtgaccacgtgcagactccggaacagctaggccgactcccagcaggtcgcagctgtgtcagtggcagaacaatagagtgatccagggaggcagctccaccctagctgatctccttagtggcaacaaaatctggctcagcctgcttcaggcttgttggaggctacatgaatccttgctgttgagttcaagtgtattaggtttggtggtccagcagtagagtttagaactgcctcaggagtgccatgggaaacctagaagtctacttctaaacattagagcaatagttactgcataagatggcaaaagatatggcaaaagctgtttacagacaggtgaatgtgcgtcaataactgaataactgaaaagtcagagagaatataggaaggctgaaatgatagggttagttgccaaagtcagctgtggcaagtagaactgcaggattcgattacagcagaaattaaacaccaataaaaacttgcagctatatattttagtttagagaaacagtgatacttgctaacacttagtactgaaagacccacaacgtgaggactcccccacgttctgactcaggagaggcgacaccccaaatcactcacaagaaacagtcttgccacaaactgcaagaggacttttattcaagaacgccctcggggccacggtcatacaccacacaggggtagaggaccgtggcgccccgagtagctgggtaaggaggtatttaaaggaagaaaccacaactcaaggaagtggggagggcgttgttgggaaataccaaagataccagttaagagtcccaaggaagtgcaaagtcaaaaaagtcacaaggaatacctggtaattgtttgggttatctctcaagacagtttctaagagcccctaactatagcacattctttgaatgaacactctttgaacccaggaagcgggtgggtggaggaatgtggctatctgttttatgattaacataccttggagcattgagacacagaggtcacattccaagcctgggcctaaatgcctagaattttgtttttacgttatactttcagtacattttaaagtgaatggatgtttatgcattgtattgtagtgctacttagatttcaataataaaagtgacctaacatttcccttcataaaaataatttacatgaagatacatcagaccacccccccccaaaaaaaaaacttgttgctaggcaactgtagaaaccagtaactcctcttatcctttaattaataactttctcttaatctgtattgatatattttctatttcactatgttgtcaaggtgtatgattctcttgccttcaccttccgagataacagggatgagccattatgtctgctttttgtgtgaactttgtcctttgtcatagttttgatcttgttttttaaatttcctctatcttccattcatttctgtttgtcaagggattacttctaactctgcttatgagaaaactactactgactcaggcttttttgaacagaggcctccctttgagctgccttactagtttctacccagcctgtgtaacaagtgctcacctctgtcccagtgcttacatagatagcaggtcctttgctgagcagagtgctttattcagtatttaacccggaaaagggtgtatacatacacagctgagacgctttaaactactgtttatccatattaactagcatctattcaccaaacattctatgaaaccatattgacagcattaaacacagacatgagtcactgttctagaggccctgagacctgggagaatggaattgataaacaaggtggactaaactctcattcaatagccaactttattcagagcacccgacattttataccaagcaattaaggtaggtcgcatgagtaaggttcacatgagttcaagctgtatacaatcacaaggacaagctgcatgtggcaaaaacatgggtttttcataaaagggataatttaaaacatttaactgaatgataacagagcaatacgaaaatgcattccaagaacaatttcatgttttgaataaacggaggttacaagactcttgttttcttcacaccttctcccaagcactcaggagtctcataccactccattcctagactgtgttttgacagtcaagccttgatgtccttgagatttcattccttacataaagagtatagtatatccctacagccaacacatactattgcagtgcactttaaatcatctctagatggcttataatatcaaatagaaagcaaactatgcaaatagttacacgtaagtagaaataaacattttataaatatagtacagggacaatttttctcccaaatatttttctcatttttatttttaatgattgattcatcttttattttatgagcattgttgttttgcctgtatatatctgtgtatatcatctatctatagatagatagatctgtatgagggtatcaatcccctgtaactgaagttacagtcagttgtgagctgtcatgtggatgcttggaattgaacccaggttcttcggaagagccgccagtgtcaagtgctaagccatctcttcagctccctcatttttattttattttaatttatttatttggttggtttttctagacagggttttctgtgtagacctggctgttttagctggcctcaaactcagagattcacttgcttctgcctcccaaattgtgggattgagagcatgcgctaacaccgccttttatttctttaaattaaaatataattgcatcattttccctttttctttcttctctttaaaccctccaaagaaagtcttttatagatatgaaactaacatgtagagggcaaactatacatgaaagaagtttgtagcttttatgttttaaaaacagaaactttaaattcattaaaaacatcaagccaagggcaggatagcaagatgactcagccttgcttgctgcctgcccagtgtcatgatctcaggtgggtcttatctccagcactgcaaaacaacgaacaatccaccccagacatgaaactgtttagctgaccatgcacatgtatgtgcatgtcataatctcagcatttgggagatggaagcagagagatgacaggtccaaggtcagcctgggctacatagtgaagctgtctcaaaagatataattttgaaatttgaataggccttccatgtacattatttgaaaattcagtggctttgccacacaagtcttgtaagaatacattcagcatttttcttttttttttttttaagatttatttattattatatgtaagtacactgtagctgtcttcagacacaccagaagagggtgtcaaattttcttacggatggttgtgagccaccatgtgattgctgggatttgaactctggaccttcggaagagcagtcgggtgctcttacccactgagccatctcaccagccctcagcatttttcttagcctaaatataagtaatttgataaaatggaaattgtctgttgctactgtactatcacataactctgtgaaagatgttacatgtttattaaatacaatcatgagtttctttttatacattttttgttttctttaattattttaaatatttatttatttttatttcacaagcattggtttggttttggttttttgttttggttttttgatttttggttttgttttgttttgtttgtttgttttttcgagacagggtttctctgtgtagtcgtgactgtcctggaactcactctgtagaccaggctggcctcgaactcagaaatcctcctgtttctgcctcccaagtgctgggattaaaggcgtgtgccaccactgcccggccctaagcattggtattttacctacatgtgtatatatgtgagggtgtcagatctcttagaactagagttacaggcagctatgagcttccatgtgggtgctgggaattgaacccaggttctctggaaaaagagcccatgttcacaaaccaccaagccatctctccagcccctcctttaattatctttataaatgattataagtcacattaagtataaacagtttagaacctctctagaatgtgtgtgtcaattgatgcacaactcaagttatgtgatgactggtactccatcctctgatactgtttgcttccttcagttcctacttgctatgtatgtcagatgctctttggaactgctccccaccacctactgtagtcatttacttcatgccttcgtccttgatttctagtgtcaaagagactgtcagcttatctctcctatctcttcctatttcagtatgctacccagttacttcccgaggaaactgttgagcatgacagtctttaaagggccagtgattcttgtcctaaatgactgcattgccgagtggctggaacatccttgtagtcgtagcacttgggaaaccacagagagctgcacagtgggagtcttctcaagaaaaagaaaaggaaaaaaagtgcttcattaaacgtgacagtcattctaaacatgaaactcacttggtggagtgcttgcctgcatttgtaaggccctaggtttgatcccagcaccaaaacaaaaaggtgtcacaatcttaacacccttagactccatttcttgtttctttagattttgtttggaggttttagtgggaagcagatattcatatgtttttaatcaaaaagctgtctttctctatggggggaaagtcatccttctgacctgagcacatggctactgggagggtgtgctgtgagcctaatagccaaccctggtgaggagtgggtggcagatgtcactgctggtcacctcatattccctggtgtcattacaattccatctcctgctctttttcccattcctatgctttctgctcagttttttattatgactacacagagtaggttaaagtgtgacataggctcacatgcttcctcccattactttaattgtctttctgatgcttttccatcattttccttttccatatatttagccttccaagtgtagcatcagttaatatttcatcatatctaaagagttaccatgcgctattctcttatttatcagcattagtcttgttaacaaacatatatagtctatttcagctattaagtaacctttacattgtattaaaacttactgtgtatctttctctgctggtaaattaactgagtgtagtcctgtcttttgtatactgctgagttcctacagtagaatttgaactcactcaaatgttgtctgctgtcttttcattcagaagagaatttaatatttgatcaataggattaacaagtattcgttaggtacctactttgggtttaatattgattagggtaggaacatatgaaagttgtttatgacttgattctttcagagaatttttagtccgggtgagaaggcaatattagactgtgtgaatagttgtagtgtgagtaatactttgctgagtcagataaatgagaacaacggagtcattggacgctcactttggatactatgattgagcccacatgaataaagacatacactgattaaaatgttaaagaggagtacttaaatggcagggggaagaatttctaccccaacatagtaaataaaaggaaggcctcagtttagaagtgttggtcttgtgagtgaagaaaagattgtagagagaaataattctgggaactttaagcaatctaggactgagactctaagagcctaaactatggaaggaatggaaataaagtgaaaaacagatctaaagatctcaatgtaaaatgaaaaataagctacataccttttgtattccaagaaggaaaaaccaaggcactgttacaaccaagtcaagtaaaaccaaaccctaacagtatgagtaactcagtatccaatgtgtgggcttcactcaaatcttctgggttccagagggcttggacagtgtgtggttcacagcacatgcaacttgtcatagactcaggctggctacactccacagctgctgctgtccttagcaaccatttcatggtactggcatctccaaaaatgctaagtctctgctgcaaaagatctgcatagagcactcttgggctgttttctctaactttgccacatagccacagcctttcactatgacacctccaagcatggggcttctgtgtcagctgaggctgaactatcatcagtggcctcactgctctctcagtgccaagtctcagctgctcttcttgattccttcatgccttatgactggtaccatgtgggaggctcttctgtgtaccaagttcagctgccagcatagcatacagctttagtttcctctggaacacagtagctctgtatgctgactgtgttgaaatacttcctagaagattgtttattaatgatgctggtttcttcctaatcgtcattgacttctcagctcagctatctggtatcaattgttcccatcttcagctccagacaactcagattcttaatacaaagtatcacacaaacagcccagcagagtctgaagtagcccctcaaactaacctgtaaaccttcacaagccagacccacatcatttatattattttcatcattattcttagtttctacaacagtttagtgaagctttgaacaccagtttccacaatcctcccccaaacaacatgaccaagtctgttaaagtaatactctacttttgtaacaatttcttccttagttacagtttctattgctattataaaacaccatgaccaaaaacaacttggggaacattttcaaggaacctggaggcccaaacatgatgatacagatgatgtggaggatgcctggttactggcttgatccatagattattcagctgtgttcctttagtacccaaggaccaccaacccagagacagccccacccacagggagctgagtcctcccacatcaaccgtccatcaagaaaatgcagcataggccaagcattttcctatgctggtttgggcattttctcaattaaaaaatgactctagctgtgttgagctgacataaaacttaccaacatatatcgaagataatcctgaagtatagtttaaaaactagtattgtttcactgtctaacatggaacagttttggaagcaaaaggaaaaattcttataaataagagaatgttacactatacaaagaatattcagtaaacccttgtaaataagaggttagagattaaatgacagtaattctaatgtgaccaaccaaacagaagttagcaatagaacttgttcatttcttaaagattaagggaaactttgtccaggaccactaattttgtgatctaaattcatagtactcttactttgtgtgatttttttgcaaatgggtcttgtaatactaaaccatgccttgcttatgacgtagtttatcacactgagcacatgtgtccttgatttacacctgcctttggtgtctcccaatgcatcatttcttagaaggaaaataactgactttagaaatgtattctagaacttctcattgcattgttttcttgaattgttttctaactaaaatggggtgtgctctctcttatgtgtggcagttggaggaaatgtggactggaagcagatagccagtattcaggagtctattggagaaaccagctctcaaagtgtggtagttgctgtggataggtaaggtgttcactttctcccctattcactgtttcaacactgttttgctccttgtttaaaaataaaaaaattaaaataaaaataaatattgccaaaataagctttagaagtaatgtaagactttggtgacatactatgatttagatgataaagtgataaagcacctttaattttagtttcacaaatgtagaatacaggaaggatttcaattatataaaaatgtgttacaattagtactggaaatattaagaaaatacaattcttgatgaaaaaaacacaaatcattctttatagagaattatctttttttaaacccttggaaaataagtttatctttcctgatacatgatataaaatagcattatggataaagcaaatgggtttggctagaaattttcatttacttctttggaaagctcttcaaaattgtcataatctatacatttctaggtaaatgttcccaaaactgaaactactttttacaacacgggccttcaacattttttaaactacttatatttgaagactttagaaatgtacccgtctttacttgatggtctagatactcaggctaattcattgtttactttacttcagataaaactggggactgggggagatgcatacctgtgctcgttctcactgctagctagttttgtattgatgatcacagtgttctgttttattcttcattgatagagaaatttgggatctgtccagagcccttcttcctctgcacacttacacagctgggtagtagcttcctatcttagtttaagtttcattgctgtgaagaaacacaatgaccaagggacaacatttaattggggctggcttacaggttcagagattcagtccattatcgtgccaggaagcatagcagtgtccaggcagacatggtgctggaaaaggagctaagagttctggcatcttgatcagaaagcagtcaggagaagactggctaggaggagggtctcattacccacccccacagtgacacacttcctccaacaagaccacacctcctaatagtgccactccctgggccaaacatattcaaatcaccacactgccatttttgctcccaggctatcttccattcaggtgtcttctagaaagtcatctttgtggtcattatgagaatctatttagatactacaaaaattagaagaatattgaagaagttaaggcatgactataaatgcctccataggctgctatgctctatacatgggttagtgttagtggaacatggctagaaagagaataaccccttagaggctaccaagccagtaagaatttgaatgcccttacccaacttgtgtgtcttcctaccataatcccgaatggttctccagaacctttgattgctgtgatagttctccttctctcatacctttgctcttcactctttgccatcacagactgtggcaccatttccctgtgactgcagggtctccattttactactctatagtgtgccatttgctttttttttttcttttcaattaaatccttatttctttaatgtcttttctgttgttctcttatattactttaattttttactatagtattttttgctaaccactttttttaactccctgtcaaccctcctcctggtttccagccagccccttcaaacatttctcctaaccattcctccctcagttccccaacaatcacaggcccttctccagttttcccaataccagcagctccaaactgtaacaactgctatagcctatctgctcagctcagcttctcctggctcaactgtgtcctaacaatttcttctgtaccaactgccttctcttctctctctgctagcccccaactccctgtcatagcctcagctagcctttttataacctatcctgttctcaaaaatccaagaggcaaccaacactgaaggtcatagagtcaagcagttctaacacctaagaattcttaaagggccagttgactagcaactggggatcctttatagggacaggcccacaagataagtaacactaaactttgccttctatcagaatacctctagtttgagagaaatcaactgatcatatttgcatagtctagcagtttttactttgggtgagatgagagctttgtactttttctgtatttcatgttttggattcagtctaaccattgggctagaaggaatgcaactttcttgatttttttttttccccatgattgtttttgccaagtttttaaattacttcattttactcaaaagaccagtacaaaaggtcttaagccattccttatcaggaacttgattaacataaaattatcagtaatacttgaaaagcctttcctgggggctggtgagatggctcagcggttaagagcactgactgctcttccaaaggtcctgagttcaaatcccagcaaccacatggtgactcacaaccatccataacgaaatctgacaccctcttctgaagtgtctgaagacagctacagtgtacttacatatagtaaataaataaatctttaaaaaaaaaaaaaaagaaaagcctttcctggtaaaccaactcattgcttttacaattaatacacctaattaattacaattaatttcacctaagaaatgttaatactccaggccatgacttttgagttggcataacagaaataagacttcataaggtttttaattatatgctatttttcccccagaatattcaccggatccacaaggctagatggaaatgctattggtgagtatgaatatttatctgactcctaagctgtccttttgtctaaaatgctttaaagttaagattaaaatgcaaatgtatttattttatagttgattttgtccgttggctatgtgctgtgtctatggatgaattgctttctactacacacccaagaatgtttagtctacaaaaaatagtagaaatatcatactataacatgggaagaataagactgcagtggtctcggatttgggaagttattggagatcattttaataaggtatttgaataaccgtagtatttgtttgcattgcaatatttgttttaattttcctaatcataatatgactgattgctttccttctaagcaattgtttgttacagtttttaaaataaatttagaaaaccttttaggaatcatgctacaaactttttaccagcacttggggaagttgaagcagaacatctgtgagttcaaggctagcttgggctgcgtgtgtgtagcaagatcctgtctcaaaaggaagggcaggagagatggttgtttacagagagacggttgttaccagttcccagtgtccacgtctagcagctcacgactacctatagttaaaaactgtacttccagagggatccagtgaccattctgctctaccttcttgtacacccacacacatgtacaaatacaccacagaaaacacaattatacaatcacctattttttcttaaggaaatgcagaaactctttgagttgacttctttttagaaatgattgctgaaacttttcacagactctttaagttactgagctgtgtttttctcatacttgtgccttgtgaagagcctagaatttgcctctgtgctgcgtactttgtacttctttcttaagtcagaaatgaaaaattacagttttacctgtaacattagcatcttggtcttgttgcccttccaggttggttgcaatcctaatgaagatgtagccatatttgcagtagactctctgaggcagctatcaatgaagtttttagagaaaggagagcttgcaaacttcagattccaaaaggatttcttacgaccttttgaacatataatgaaacgaaacaggtaatatggtttttgagttgaataatatcagtattaacttattatgttctatgccaaggggaaaagtagaaaaaaagagaaagaaatgggttgagttttatgtgatatattttaagcaattatattgctattttaggtctccaacaattcgagatatggttgtacggtgtatagcacaaatggttaattctcaggctgcaaatattcgttcaggatggaagaacattttctcagtattccatctagctgcatcagaccaagatgaaagcatagtagaacttgcatttcagacaacagggcacattgtcagtaagtattttttaactattcaagtgcaaatagaaaagctggatgtacttagttggcaaatgaggtgcagtaagattatgactgtagtatggcttttagacttacaaatgttgtttttaaaactagagtgaaaaaaatcacagtaattgttgtaatagtagtttcagcacaaaaaccaaaggaaataagagatagcttattctggagccattttgtgtgactgtggtccaggggcacagatatgattactccgaattctattttccagaatggaagcagtttcacagggtttttataattttacagagcaaagaaagtcataaatcaaacgaactttacaatatagtggtgggtacatcagagaggtagatacattgagatgggagttccaaggtgctattgatgacattcttcgtcatgaattggtagaagctagtgttctgctaacttaatatcttctaagagatttttgtttattatcataaaatattagttcagatatagagtaggtcaaagaatggttgttccagaaattaaacctagcacaagatacatagtagtaagcctataaaactttaatttgtcttcagtactgaaattccctccaggagttttttgttcacagccatgcacaggttttcaggaattttgttcacagtaggaatggtggtggtggtggtggtagtggtggtggtggtgtttgtaacatatattgaggattactagatgacatgtactgtaatacaactgtccttgtatgcattgtttaaaacaggtatccaagggatagttaattttgcatatctattcaacaaaagctaaaatgcacctattactttattgtgttgtatgtttatagtgcaaatgaaatagacacatttctgttacaggtatcttttgctccctccacctaagctccaggaacaaactgtgctaccagcccccacccagattcccttgaatccatggataaaaaacacagacacacattgctcaatttcagcttgctgtatcggcacaattgctgggctctacttatctcctgcctggagaagcttgctcttatcaagcttagctccacacctctccacctgctcttgactttagttgctcagttacatttagtctcagctcaacattccagctgcctgcctgtaaaattggcctgtgaccacttggcccaagatctcacatggctgctttgcttttctctctccaaagcatggctcgatctctctcctctcctcacatctgtctcctgtggggacccaagcaattacacccctggagaacagaaccttagcatcagaaccacccctacacattgccacttgccttactacttgggacaggctagctgaaaaagacaggcttggacccgctttttgttagatgtcaaagccctgacaacctgtaagaagtatgtacatttgaagttaacgtattttgcgtataattaaaatagttgaaatatgccgttatttccatttctttttctctgttttagctcttgtatttgaaaaacactttccggccaccattgattctttccaggatgcagtgaagtgtttgtctgaattcgcatgtaatgcagctttcccagacacaagtatggaagcaatccgacttattcgccattgtgcaaaatatgtgtctgatagaccgcaggtatacatcatttagtaaacaaaatttaaatattgagtacaatcttatatctatatttgtttgggaagtcagggtagaggaagcatgtattttgagcccaaaaatcagtctgaacttgattctgagttaacatggccagtgactgtacttgccattttactgtagctgtcaggtgttctatgtgtatttattagtttaattttcataacactaagtggggcaggcagtgttacagctttatttagataaggaaacaggtacagagaagttttaaaatgtgcccataatagcaaagcaagtaaaggagagagggtttgaagtctggccctgtttctaagcatcttacctcgttgcctgtctgcctgtgctctgcagcactaagctgtgggggaatgtgtacttaagcactgaaataaaatgctgggttgacaatctggctgctaattttaatttgaatatctgagtctgtgatgtgtatgtgctgagaaggagtatgtgcacagtgtgtaggtaggtctttactgagaccagaagcatctgcactcctggagctggagttaacaggctattgtagaccaccttacaggagtgctaggaaccaaacccagctctgctgcaagagtaggatatactcttaactgctgagccttgaaaagctaactttgtttaaataaaaagaaaaaatttagtttaaggctctttacagacagtgtataagtctttagctttttgtaaattactatgtattatttctcactgtgattggtaaagcacttagtatttttcctgagaaatattaaattgaccatgtgagtatttagctttgccttactgatacctccttttccttcaaaggctttcaaggagtacacaagtgatgacatgagcgtggcacctgaagacagggtgtgggtgagagggtggttcccgatcctctttgagttgtcttgtatcatcaatagatgcaaattagatgtaagaaccaggtaacaatccggatttgaacatttaagctttgcaggatttattttcgttttaattaacttttcttttggatacaaacaagtttacagttcgagaccagaaaattttttttaccaaatatattaagaattagtacaacttagcctaccccggatattacactctatttgcacagccaattttaatgcctattgaacagtaaacatgttatgactaaattgatcaattcaagttttaatcatcaactaaaatgaatgaatttttcaaattccaaatacaattgggggtgggggaagagcaagttcaagagagcacacaagtttggtagcctggtggtggtggtggtagtggaggtggtggaggaggtggtggctgtagcagctgcagcctttaataccagcacttgggagggagaggcaggcagatctctctgagttggaagtcaacctcatctacagaatgatatataggactaccagggctacacagagaaatcctgtctctaaaaatgaaaaagaaaagaaaaaaaaaaaaagaactagataggcacattttatattattacttaaaaaaatgattactagatgttagtgcaaaatgaaattttagtctatttttaacttttatgtttaatactataaacattttttttaactttttctcagaaactgcagttaatgataaaattctttcctggaaaacagtagaaccattttttaaaaataaatgagctttgcaccccgtcctttctgcccctccctccctcccgtgtgcttatgctaggagggtaagccccacatggttaagggatttttaaataattagtcttggattttaacaggttgctaagagggcctctataagcagcttaccctgtgaaagtacagagtaaaatgtctgctacgctatagacagtactgagctttttgagaaacagctactgtctgagcctacattggatcatagcctttttcatcagcatttctgctataacaaataaagctctaacagtgaaccctcccacaactgtaattcccagtttaattttgatgggtacagttttaacatcagaaaggaagtcactttaggtcagtctctgcccttgcttataacataccattaggtgttacaggctgaggtgcacctgaaaagaccaggcttattttacctatccacataacacatgttttgagaatcttctacatctcagacatgtgcaaggcctgggcaatgtaacagcatgtgacctaggctctggacagtcctttggaacattttagagacatttctgttttaactgaccatttaataaaagtattacttcaagaaagataataaatcagaaaggcaatttcagttttagtgcttaaaagcttggcagtatgatctctaggtgttttatttgttcatcacgttctgactgcttgcctaagttgttagcactgcctagaatatagcaggaaccaagagacatgcagatcatggagattaggcctcagtgggttggttaatacatcttttctgtggagatattatgggagcagtatccatactggtagctgaaagtccctgtaacccttggatacagatttttccaaggggtggtggtggtggtggtggtggttgttgttcttagaatgctgtgagccctttcaccctttcccatagttctgcaaaattaatattcactcgaatgatggcgtacttcagtctgcatttctgtcttagtcactgtgcttagacaccatagccatggcgactcttataaaagaaagcacttaactgggcctaactcacagtttcagaggtttagtccattatccccatggtaggaagcatggcgccaggcaggcagacatggtgctggagaaagagccaagagagtacagacagcagagagagagagagacactgagccttacttgagcatatgaaaccccaaagcgcatcccagtgatataactacccccaggaaggctgcacctcctaatccctgtcgcgtagtgctacactgtagtgaccaggtattcaaaataggagcctatggggccattcctaatcaagccaccacagatttatttattattatatctaagtacactgtagctatcttcagatctcattacgggtggttgtgagccaccatgtggttgctgggatttgaactcaggaccttcagaagagtagtcagtgctcttaaccactgagccatctctccagctccatttacagttttaatagctagactagtaggagtgggaaaggaaaaataaatgattttcaggtcagagcttttgcagtttttattttctgaaccttgtgtcctaaaggaacctgtaactttacagcttgaattacatcatattcaatatgcattaacagccagtgttaactttaacaagtattaactttgattttttcgtaactttgtaaacttttaaccctttcttaggaagttttgcttctttacgttacagctttcctaattgtgttctgttattttaggggcttaacagtaatgtttgaaataatgaaaacatatggccacacttatgaaaaacattggtggcaggacttattcagaattgttttcagaatctttgacaacatgaaattgccagaacagcagacagaggtaagagaatacctttagcataaagttagaacagtcttcaggttttcattcagtacatgctcatgtctgaagtgaagcacgttggacatgaaagaattcctagaagttcttcaatacgtgacaaatagtattttctttcattagcaagaacactatttggaaatatgactgaattagtgatttactttttatattcattgcttttgttaaactgtcagcttctcttccatattttgttatagtcacagctaagaaatacccgaaactttcattaatattagattctgaattctaataaaagaaaagaatttcaaagtaaaattagttttgtttattatgacgtactataaaacacttatagttcaggctctgtggctagagaggctcgtttttcctccctgtcctatagatcaatattaagtggagacttttataattatgtttaatgtaatttgagggaggagacttgagacagagtctaatggttggtggacagcatgaccttcatttcatgacctccttccccccccacccccagaaagctgaatggatgacaacaacttgtaaccatgccctttatgcaatatgtgatgtattcacccagtatttagaagttctcagcgatgtacttttggatgatatttttgcccagctttactggtgtgtacaacaaggtaggtgtgtaccagttatgttaacaccaagtatgacatgtgatgctgggatatgtaagtgaattgttcttttcttttctagacaatgagcagttagcacgatctggtacaaactgcttagaaaacgtggttattctgaatggtgaaaagtttactcttgaaatctgggataaaacgtgtaactgcaccctggatatcttcaaaaccacaattcctcacgcgtaagatccacatttacacttgtgtactaacggggtttgagagtgagcagtgaatactgtaacagctgcatggagtgagtgaactgtgagccaaaacagtcggattttccaagatttgagtcataacacgttgaccccactgattttataagattgtatttgaacataccacaccaagtgagagttttcagtcagagaaagaaagcacccttaacctgtatttcagttacagaagacttactagtctaaaggaaattgcttataaatactacactggactcccaaattgtcatctttctgttaggaatgagttataaatagattttaatcggtgaagaaaccaaaacacggcttattcacaggatagactggagtcacacccagtacatccctggtgctcggtctgatatatatatggctttaagtctgtaggtagactgtagaaacattaagtgtgcccagtactgatataaaatcatatgaaaactatcaactagtctacgtttttaactttatatcctgttttgaaatataatttaaatctggtttatgttcttagaatacttttacaaatattaacattgaaaataggaagtaaaatacaagaaatacactagaaaagtggtctatactgaaagatgcacagtgatttctttgaccagcttccaattcctcaatacatttatctggagcagggtaagcagctgacagctgaaacatgtctgtcagtgactgtgtctgtgactctgtcaaagacagtatgaattcttacctaacagttccacacccagcccgtgaactctctatacaaatccgcgggctactgttgtttttagatagacctgcatgtgctttagattgttgagtcacatgctcattataaccttaagtgtcatctagtaagcatttcttggtagaaaggctctatttcctactcgtctctattgcagtggagatgtctgttggcatctgtctacccagagcttatgcttttcagaaaggagaatttgatgctacatcatatttctgctgcaagcacccagttcagcggtggcaaattaatttctctttggtaccttgttgacttatttttttctaaatatttaaaaagctgattctaaagagttatgaatttttattttttttttattcttaattctgtgaaaatttttgaaaagtggcagactttaaaaacaattttgtttttggatgatatttaagattactatttagaagaagtaagtgtaaaatttgtacacttcagaaagtataatttaccgtaaaactacttatccttataacttataattgagtgctgctgaactttttccgaaagtacatcttttaaattttttactgaatggatttcagaaaattgcttttgtcagtagtcagacttttaaaatagagtgtaatgtttttcactttctaattcccatttaaaatatattgcatgtagcgtaagtccttcctatggcccccgtgactggtttttgctttggtatgttaaaggcttctgacttggcgtcccacctctggcgaggccgaacccccatctccatcagctgtgagtgaaaagccgttggtaagtaagtaaatcatccttgacgctgtctgtcgaaggaatttaaccactggcctaattcttcgtcagggtccgagtctgtcccgttgctctgacaaaacacctacgcttacttagtttagaagtgaccaaagttggcttcttgaagctgtgcaggctacaaactgtgagcactcagtctctaatgtaggctagctacactttgcttccacagtggtaccttatacccttccatgacagaaggcagagggcagaaaagagcctccttaatgcctccactgctatgatagtaaggtgccgtcctgtcgatgggacaccgccctcctttgtgttgtccctagagaaccgagtttgagcatgaactctgtctctgagtttcacacagagatactaacagaagacacacaagaatgtttgcatacaaacatttcaactgtgccagggagaccaactctctttaaaagatggtgtaagtttctcatttgaaattctcagattaaagttcctgatggtaaatttaacttgtaacaattttatattgtgtatataccatgaagagggtgcttaaattttctgttttatataggacacagagaaaaatgattttaaggattatgaatgtaggtaccagattatatagagatttttcacaccaatttagatagtattaattttttttaactttttactttgatataatttcattgtgtagaaaatagataaggctattatagtggtttttattattcttggggtttgctacaccccctcgttgtctttaaatatctatcagaggttcctaaataaaagacacagagacctttagatataagaagccctaaagcagcacagatgggcggctctcagccctctaagctgtctcgtctgcttcccctgccaagatccccataaacgcttgaatgtcttccattagctctgctcctgcttcacaaggccagtcctcctggccacatgctcacaatccacattaccccaaggcaacttcctccttcttcctcccttactctgtttcctggttccttcctgagactgccttaccccccgccacacacacatacacacacacacacatactgcagctctgcctacttttcttctacttagcccaggatgtaggcatgtttgctagccaatcagggataacttgggggacaaggttaacacaccacaaaaacccgtgtaccttgggaattcactcattttgaggcagccagattatgggatgcagcgtctagtggttcagtgcatagcccaaccccatatattggtttcttacacagttgtataaaaaacacttgaccagcattaattgaattattactagtcttttacttaaatatctaggacacgggtacttagccatgtccttacaagaagaattcccagacttagccagcctaactccccgttgctccagggcacagcttgtggttatttactgttttgctttgtcccctacttcccctctctcctcactcccttcctctgtccatgtggttctcagaattatttgaaaaaacaattacaaatatgtcctttagccattataagagtctcatgttttatttccttgatgataccagaaggttaagcagataattcttattgagactatttttatctaatatgtaggctttactctgattctgtttttttccattttaccataatgaacatgaaaaagataactattcactttgtttttctagcccttgaaatttttagaaagatttgtctgtctgtttatgggaatgtgttatatgtatttgcctatgcaagtttttgtgctccacaattgtacaggaacacgcagaggccaaaatgttgtcagatcccttagaaattgagttacagatagttgtgagccactatgtggaccctaggaatctagcccaggttctgcactttggatctccagcccatctctccagtccctagcccttgaaatttcatcctaggagaccacagtagcaagatagtgcctactgacctgtttgtttccacagcccttaaatttttcaagtaattgtttacagttaaaacatagattacataccaacatgatattcttttgggaactatagtatctgccacagaggctcatagttgtcccataactgatctatggattctattagataccctaccacttgtgggatatcctgtctatggcaggactgagggtcctctcctgtgtgtactcccccgctgcacagggtagaatctgcaccatgggtttgctttttgcccaaggaaatattggatctgagttacctagctccattctgctctgcatgtcattcaccctctgtgtaaagtaaaacttgtggtatcgacaagtcagataatacatttcacctcaggcttgggtatggaagactgagtcccactcatgtcttggccctgcagcactggttcactctctgttcttgtagctgctgctgttgctgctaccatttctctcccctaacatctctcttctaagtccatctttgtctttcctctgactacttagaccttgccaatgttgtaggaatttcacactgtcattcctagccaaagtatttcttgctatacacttaaggaacatatttttaaaataggtttaatataagtatttatatgtataaggaggaatgcaggccttaaagtgtaccaggttttttatagtaccttgctacttcaactccaattactaggccatttgtttcttttacatttacaagtaattactattacatatttaaagatttttaagtgtaaatatggtttggcatacctaggcagtgttcccacgggtacatgaggaatcgcttacagggctcactggctctgctacagtgccgtccatttctaaaggggatgtgaagctcggtgatcgagttctgactcagaactatcctccaaagggcagagatgacaaaataacacagtctctttttttacgttgcttaatcagaaaaattgagaaaattctacctagtcattcacaaatttctaaagtaacttttcagccttcagtattaccacctagtttaaggattgcctgaagtgtttcctaatgtgtagtttttactttgaaatgtttttttaagtcatcttagtcaaataaatactgatctagaatttttttttaacttgaagcgtctgtgtgtttaaaaaatacttacctagatcactaaaacccataacaacaataatatggctcaataacatagagtgcttgattgtttaagagtattaccataggactagagagattcttagtgtttaagagcaaaaactgaggttgcagaggccccagtttatttctcggcgctcacatggtggctcacaatcttctgtagctccagggaatccagctccctttgtggtctctgttggcatctgcactaatgaacacacacacacacaaacacactctcacacacacacacgcagacacacaattaaaaataaatcttgaagaaaatgttttcatacttaatcctttcaaaaaatataaatatacataaaacccctatttcaaaagctcattaaggttttccctcccactgctattacagctcaagtcagactaccatgtaagtctgtttgacttgtgtccagcttcccttcatgacagcaaactcctgtttagtcccctcatactgacctttctggtccttgatgccttgtgtaacagaggatactttcctaactcctcccacaaaggaaagtcatgtcagctacatgaactctccctccactctaacacatgtgcgttgtgtcagatctggagaacacttgtgaagagtgctgctttctcattcattgcaacatcacattcctatccatagcacatgaaggctatcaagcctgacaccacaaaggctcagaaagggtggtttggcttggtttggtttggtttggtttggttttttgagacaggctatcctggaactctctgcttcttgtgtgataggatcaaaggcgagcgccgccacacccagcctgggtttaggttttgtgcactgagtttcacactctctgtagtccaggctggtctcacatttgcagcagtccttttgcatgaacctcagtcatgtcctgaagacacttatctttatctatgtctagacaattttaaatagaggaaatcttttttatggataatgtgtaaattttatacttttaaaaaactagtataatggaaagcatgtttgtccctgtgatgtgcttatctgatgaatttatcttattaggatgcaatatcacaaaaatctgtagacatacatgattctattcaaccaagatcttcagataacagacagcaagcaccactggtttctgtttctactgtgagtgaagaagttagcaaagtgaaatccacagcaagtgagttatttctgtaaatacaagtaaactgtactgtgtgtatgtaagggacactttgttactcttattaatgagtgtatgccatagttggtcttgatcactttttacttttactctgtctactaccccagtgtggacatctctttcaaaaccttcaccaacatgtgcaatgtcagttttgatcacagtgcctttggctgatgtttgtgttgggcacacgatcttccttctctatcccatctacacttgaacacattttctgtctgtaaaggtgcctgtcttcctgggaactatggaaagcaccccaccatccctccgtaggtaggagctagcccccagctcggaggatcaggctcttctgcactgcggcccaccttcaggctgtccatcacctttgcccaaaaatgggacactcactttttgacatcagttcagttttgtttgctgaaaacaacacatacaaaaagtgacacctccttagaaaagaaagtagctttcttttaagcacactgtaaaacctgaggttgtggccagcatgagggctcagcaggtgaagacacttgctccaggcctgatgcccagactttgatggtacaaggaaaaaaattgactgctcgaaattgccatctggcctccacttgccagaacacagacatatacacatgtgtagtaaacacaaactaaataaatgtagtaaaaattttaaatgggacagaactgattacttgcaaataagcaaccgacttcagaatgctgtgcaaacattctgcctaggcacaaaacgtttccatcatggaaaggaaatcccatattcagtgagcaaccactgttttctctccccttctctagcccttggcagtcaccattctgctttctgtttctgtgattagactcttcagtgggttttatgtaggtgacatcatacaataagtgaccttaagggtcttcatcattggaatcagtaactcagttttaattctgagttagccatcgtgtgtgtgtgtgtgtgtgtgtgtgtgtgtgtgtgtgtgtgtgtgtgtgttttgcgtgtttgcccactcagctctgacattgagcttttgacacgttgattatgagtagtgctggtggaaacagtcatgttcaagcatggtttgaaggcctgttttcacatcttttgtgaatgtacctagaagtagaattattgtacagtgtactgattctttgtaacttccaagctgttcatggtagtaatactatttcacattcctactagcagtcagtacacctcatttgccaaactctgttactagggatatccaggcaccatgagagctctcttaactaatatcctgatgaaactgttttttcttaaacacttgcctactgttaagcccctgttggggtccaggtactaccaagaggcctcgtggtctgggatgtttgagcaagtgaaatgaaggggtgagaatgcacagtggaggctgtgactgtaataagggatgacacacgagacaaccttgggactagttgggttctttgtaacttgtcttcaaccataagaaccaaatgctacatagaacaatatttctacaaacatacctggataggaaagtttcaaatatctcagcaagtaaatttaacttgcaaaaattgataccagaaaaggaattttgtagtaaatgctttttatatcagaaagaaactagggcactgtaaatcagctactgctggagccattgctccaagactgagtaataagtaattcctctcgggtgtctgttgctcattggaacccaaatgtgtccttgccactcggccacatcagtgctgcccaatgtgcatagcagctagcagctgcatcttctttcttggtttctgcttctgaatctgcctaactgtatggtcacagagcaggagcacctcctgtgatctaatctgcagactggtagagcgagggtgaccttggtctcagctgtggtgtgaaaggctacctggggagcacgctgaaactggtgctcagtggcagtatccttaacacacatgtttataacttacttactggtggatcaattgaaaatacgcgttagtttaactacaaacatatatttggacccaaataaacctgttgtatagctaaaccacaatatcacatggtttgattagaatcctggctatcccactttgtttttggtgttgatctggttcctgtagttttcttaaacaggttttcatattatttttaaacattagacttgcacatcagtcaagactctttatttcaataatagcctacatataaccaattagaacacatacactgttcaagtcgcatgttttcatttatttaagcaattattttcctaaacatttcatagatacaatgttactatagcaagtggtacctatgaacaaaggcaggatgtcttcttcagtagagatgtgcagtgtgagtgtgtgacctttgtacatagtaatgtttccttagcattataatgttatagaaattataaaggattcaaaataatgttttgtttgcatgtgcattggggcggtttcctcacagaattcccagaacaaaaattgtttgctgccctgttgattaaatgtgttgtgcagctggaactcatccagaccatcgacaacattgtcttcttcccagccacaagcaagaaggaggatgcagagaacttagctgcagcccaggtaaggagctgtgagaggaggaaagaacttgaggtgtctggacttcaggtgacacctacactcgagatgtctttggacggtcttcttcacaactacctttccaaaccctgagcctgggtggtggcgtaaggcgtaagaatggccctggcagagaaggagggtgagggcacgtgctccggggcctcatgcactacagacaaagcagagtgtaggaactccacagaaaccaaagaggcctgaagagaagctagatcaggtcattgtagaagtcagctacagaaaatggcttaagaacgatgagaacaactactctagataggtcagataacattgtacgtaagaactgccctctgatagttcttaggatttcataagcttgacatggaactcagtttaacaccaaggacagagcctgattttagtaggtgtaagagtagaggacttggagactgttcatgttaactctatcaaggagctttgcttgaagaaccagagtaacagccacaggagcactaggaggcatgaggggagcgcttccttctgcttcccagacgggtgatttgtcagcatgcttagtgataataaagagctttcctccagagattaaaaaccaggtggccttcacttgaaggccaaaggtggatgacctctggcctttaactctctctcaatgttctgtgggccaaaagctgatagcagcagggggttgagaaaagaaacttagttacttaggctctttactcctaaatgagccagagagaaggaaataaaaaggataaagaggaaatcaagcaaacacacacactcatgtactcactctgctgggccctaccacctgtttcatcaatttcacaagtgcacatgcatacatacacatatacccgcatacatatgtatgtacatccatacaaatagacaggcatatatacatttggtggatggagcagactgccagtagccacattttgtgttttttctcagccttttccttcttagacaaaagttgtctataaaattacctcacagataaaacattacacaaaaggggagttacagttacagaatgatgtcaatagttaagttcaaaccagcgtttcattttgtaagctcattataagttcaaagcaacagtttcacatggccttgctttatcatagtgcacatagttcaaggggcctcatccttgaatgtgaccttgaatgaatgtttttccttgatcacaattctatcccaagcctattcctctttttagtgtaatttatgaaagctcattatatttcttattatgcggcctttacttattgtcctgtgaggagggagcacattctattcttgattctaactttaatacatctttcaggcaaaacaactaaaaccatctttttaaactttcttcttaaaattattgaattaaatcaggaattctataaagtcattaatccatctaaacagcattaattgataaaagttatcctcatgttaatctgcaggaaatagcatgagctgagcccaggaatctttaggctatgtaatggtagcaggaaagacacatccgcaatgagaagcagtcctgggacaaagtctcatgcaaaagagcaggccttcaccaggaaacgctcttgtttgccatagccttttctgtctgttttctatggtaaattagtaatttgactaggaagtgggagctggagagacagctcaaaggttaagaatatttgctgttcttggcagaagacccagtttcatttctagcaccctgtctggcagttcatagcttcctatatctctggttccaagggaattaacaatcctatagcctgtgtgggtacctgcatacacatggttcacatacaaacgagcaggcataaacatgtatatgtaaatattagagagagcagaattgggagggatcgttgagtcttcagtttactaaaactggttaaatgtatgttatggctgtttgttttccaaagagagatgcagtagacttcgatgttcgagttgatactcaagaccaaggaatgtaccgctttttaacatcacaacaactgttcaagctactggactgcttattagagtcgcatagatttgcaaaagcatttaattccaacaatgaacagaggactgctctgtggaaagcaggtaagctgtccaggtctcatgctgtcactgagaacacactgatgtatgtgattgtcaaaattccctgagtgagcactttaggtctagtgaaaaaaggcaggcaggctctctgagtttgaagtcagtcaggggtacacacagaaacccagtctcaaagccctccccctccccctccccctcccccccacaaaaaggaagaaaaaagaaaagaaatagatgtcagtgcctactcatagaagagagtcctcagagcacagccaggaaaatcaaggggctgttgtctagtatcaccttctgtacccactacagtgctggccgtctttgttcatcctctccccttggtgacccaacgtagagaagaactgaacggcacttgccttttcccctccccttattgctaccctctgactaggacatccctgtgagggcctgggttcctctgccctttaatgtttctggcttgcattatggagccctgccataggcagagcactgcagctgcgttctgcctgaagagctgcaggcgtagctctttaggaggcttctgctttcccaacctgttttctatctaagaccttcacagtgattctcaacattcctaatgctgtgactttaatacagaccttcatattttggtgatccccaatcataaagttatctcattgctacttcataagtctaatcttgcaattgttatgaaacataatgtaaatagctaatatgcaaccaccaagggttcatgacccactggcctataggatctgctttataaacagccagtagtgacacctgaacacagacagaagatccccccgtgagctgtttgacctttctataaggggccttttgtctaactccagaaactcccctttctgcaggcttcaaaggcaagtccaagcccaatcttctaaaacaggagacaagcagcctggcgtgtgggctgcgcattctcttccggatgtacatggacgagagcagagtcagtgcctgggaagaagtccagcagaggcttttaaagtaaggttctcttggatggcagctatgtgaaatatgaaaggcatagtagcagcagcaaacaggtagctgaacctgtgaacctggaagccccatctcacagatgagtgtgaaaattcagtcaacggtgtggctgtccagtccctctcccctgcatgtgtggcctctcacctgtgtcacacaggctggctgtgaacgcccaccttcgagtcctgggtgtctgggccggcggcagcacctgaggctagctgaggtgaaagctgtttcgtgtccacctgacaacggagcagattgcgtctcacacagaggaacgagaggaagtctgtaacgctcagagacttgatgacagttcttgagtctttgcagtgccgtaagataggtcttttacaaagcagttgggaggtgacaggttgccttacctgctggcattttattattatttttaaaagtatttggaattttgattagttggatttcattctgttttacttcataataactaaatatagtttgtgctgagactgaattgttatttaggaagaaaattgcttgtgcattgtttgttcctgtcctgagagcagtggttcaatacatctcagaaatcgatattccggtcgcctattttaggaataaaactaatcaggtgcagaaaaatttaattcttttatcagtgaaagaaaacaccacaatttgaagccaagtctcagtatcaggcctgcacagccactctctcagggactccatctaagtaaaacttagaaaatggagctgggggttttctaaacagtcccaatagatcccctcagtgtttggttttcttcctcatttgaaaaccgtgtgttggtgctcgagttcacagaaacaaatagggtctaggcagttcagcagtaggtgctgctcactcccctttgtcttgagggctctgtgagtgcacagcagtcacttcagtatgtaaaaggcagccttctcttttacagcgtctgcagggaagcgctgagctacttcctcactctaacatccgaaagtcaccgggaagcctggactaacttactgttactgttcctcactaaagttctgaagatcagtgacagcagggtgagtttgcagcttctgtccactcatagcctaagctatgcaaactctcacttagctttgttttctaacagttttagcaattcaattagaagaggacttagagtcccattggatacttggataggtacctcgacagtgaaatccccattatgacccctagagtcacttaaattcccccaactgaaaacatgtattgaggccacacagtgtgaccttgccctggagcctctgccccgtggtctacttcttggggctcagctccaggctgcatccagcctttagtatatttagtagctccaggtgactagagcctctagtgaacaacttaggccaacagatataaaggtagaaattatctatatgtaaatgtatagatacatatatttacatataaatgaatatattacagtatttttgaaactatatatttttattttttgaagtaatttacagtatttttcaagataatttaaatataagttgctatgggtcctaaatttcaaatgcccagttaagtggcctgacacttgaagctttagactagcagatgaaagcctatggggccaggccatgccactcagtactgtccagcgtcttccctcttgtctattctctggccacagtagactgtactgtctctgcctccctgtctgtgtctgctgcagtgtggaagagcatgaaggagagaagagagagaccagagttcagagacaaaggaactaaagcaataatgagtccaagtataagtcactggagctatgaaagtggaatgtcatgctgcagttgctgttagtcagggttctagaaaaacagaactcagagacagactgatggactgtgtgcatgcctgcctgcgtgcgtgcatgtctacaagtgcatgtgcgtgcttgcagccgtgcgttgccttgactgggttacaggctgtggtccagatagtctagcagtggctcccctgcccacagaaaggcatatgggctgctactaggaggtgtggcccagacttagggtgagtcctcacacttcagatgatccaaccattttgaaatgcctcatgggtgtgcacagttgcttgaattttatccaggtatgagaccattctaccacagagctatgtagagtgcttgaaatctaaaagttgtatttaataatcagaggatgcaatttcaataacttaaattataaaattcaactctccttcctattctgcttcttttgctctatgcaggaaaaacatgcttatttattaaattttgtcatacgtggaattgaaattgtttttaaaacaatgatgaagaaccaagtgtcctagatatatatatatttttttaattcatcgtaggttttcagttgtataatccatgtccttaccacttgggcagacttgcctctctgcagtcacttttaatgtcaggttggtttctgtggtgtgtaacagaagcagtgctaacaacgatgtttctctccccccagtttaaagctcacgcatcattctactaccctctcttatgtgaaattatgcaatttgacttgattccggaactgcgtgctgttcttagaagatttttcctgcgaattggaatagtatttcaaatatcacaaccacctgaacaggaacttgggataaacaggcaatgatgagagccgatgtttttctgttggtgtttacattgctctgctctgtgaaaggatcctgcagcagaggcttcctacctgaaaaatgtttctctcaattgtagtgtgtgagttactggtaagacgcttacacctataactcaaggtcggaatagtccctccagtccctttagtaacccagtggcctctgtctcgtgttgggctcatgttgagcagaaaggctgttcccacagcatcagcctacctttagggtccttccctgtcctctaagcagggtgagcccacactgtggcaggtacggaaattacccaaagaagtatagatgtaaagactgagcttctgcgagaagtacaactcaggagagctgtattttgaaggataaaatgtttataattgggggtgggggaagggagaaaaaaattattgctcatggtaaaagatatttagcaactatggtattcttactctgaagatttttgcacactcaggctatctgagacaccggaaatcatcatctttctgtgaaaatgtacagagatgcaggtctgtaatataaaaatcttaaacatattgttcctcctgcactgttttatttctttattttcttatctacttgctaaatacccataatattttgtcaaatgcactaaaacatttgggttgaacttttagtctttgggggagtggtggtcattttgagggcttgctgtgccctgaatctgttgtggctgatgcctgtcaagatgacaacaggaggggatccaccaaggtagaaaacatccctgctgacaagacctacctgtgacatactcactctcttagggcttttaaagacaagccattaaaatagatgacctttcacagactgaaacttgaatcactgcaaaatgaatctaggttgctgtcactttttcttttgggtggcggggcttgatgtagattttattctatgtacagaatttaatgttgaatatattaaaaataacaaacctggcatggttttgggaggttagatttactggaaatgtattcatactgtgaactgtgctctgatggttagaatgaaaagcttatcaagcattccatataacagtggatgtagaaaatgttttcaggtggatatgtatatggtacagatgtaaagttttctatgtaaaaaattctgtacaactttctgtacaatattgattctcatctggcatatctaatcaggttataggtcaataaagtttttgaattatttcatcagtgcagtgtaacccacagccctgt

SEQ ID NO: 69 - DNA, 6986 bp, Mus Musculus
cggccgctccgcgtcgccggccgcttcctggtgccgccgctgccctccacgcctcctcgcccccaccgccacctcctcgcctttctccctccccgtcctcatcccggtccccgtccccctcctccgccttccctccagccgccgggaccgccgccgccgccgcctcctccgcgtccatgtatgagggcaagaagacgaagaacatgttcctgacccgggccctggagaagattctggccgacaaggaagtgaagaaggcgcatcactcccagctgcgcaaagcgtgcgaggtggccctagaggaaataaaagttgaaactgagaaacaaagccctcctcatggagaagcaaaagctggatcaggcacccttccaccagtgaaatcaaagacaaattttattgaagcagacaagtactttttaccctttgagttggcatgccagtccaaatgtccccgcatagttagtacatctctagattgtttgcagaaacttattgcttatgggcacttgactggcagggctccagatagtacgacaccaggcaaaaaattaattgatagaattattgaaacaatatgtggctgcttccaaggtcctcaaacagatgaaggagttcagttgcagataataaaggctttacttaccgcagtgacatcacaacacatagaaatccatgaaggaactgtgctgcaagctgtgaggacatgctacaatatctatttagccagcaaaaatctcatcaatcagacaacagccaaagctactcttactcaaatgctgaacgttatctttgcacgcatggaaaaccaagcattacaggaggccaaacaaatggaaagagaaagacatcggcagcagcagcatttgttacagtctccagtaagccatcatgagcccgagtcacctcatcttagatatttgccacctcagactgttgatcatataaaccaagagcatgaaggggatcttgagccccaaacacatgatgtggataaaagtctccaagatgatacagagcctgaaaacggatctgatatttccagtgcagaaaatgaacagacagaagctgatcaggcaactgcagctgaaacattatctaaaaatgatatcttgtatgatggagactatgaagaaaagccacttgatattgtccagagcattgtagaagaaatggtgaacatcattgttggagacatgggagaagggatggctatcagtgcaagtacagaaggcaacactggaactgtagaagatggtagtgacagtgaaaacatccaagcaaatggaatcccaggaacacccatttctgttgcatatacaccatcgttacctgacgacaggttatctgtctcctccaatgatactcaggaatctggaaattcttcaggaccttcacctggtgctaagttttcccacattttacaaaaggatgcctttctagtgttcaggtcattgtgtaagctgtcaatgaaaccactgtcagatggaccaccagatccaaagtctcatgagttacggtccaagattctttcattgcagttgcttctgtccattctgcagaatgcaggacctgttttcaggacaaatgagatgtttattaatgctatcaagcagtatctatgtgttgcactctcaaaaaacggagtctcatctgttccagaggtttttgagctttctctttccatatttcttactttgttgtcaaacttcaagacacatctgaagatgcaaattgaggtattctttaaagaaatcttcctgtacattttggaaacgtctacaagctcatttgaccataagtggatggttattcagacactgacaaggatctgtgcagatgctcagagtgtggtggacatttatgtaaattatgactgtgacctaaatgcagcaaatatatttgaaagactagtaaatgacctgtcgaaaattgcccaaggaaggggcagccaagaacttggtatgagtaatgttcaggaattgagcctgcgaaaaaaggggttagaatgtttagtttcaattttgaaatgtatggttgaatggagcaaggatcagtatgtgaaccccaactctcaaactacccttggtcaggaaaaaccctcagagcaagagataagtgaagttaaacacccagagactataaacagatatggaagtttaaactccttagaatccacatcatcatcaggaattggcagctacagtacacagatgtctggcactgataatccagaacaatttgaggtcctaaagcagcaaaaagaaataatagaacaagggattgatttatttaataagaaaccaaagagaggaatacaatacctccaagaacaagggatgcttggcaccacacccgaagatatagctcagttcttacatcaagaagaaagattagactctactcaggtgggtgagttcctgggagataatgataaattcaataaagaagtcatgtatgcatatgtagaccaacatgacttttcaggaaaagactttgtttcagctcttcgtctatttctggaaggattccggcttccaggagaagctcagaaaattgatcgattaatggaaaaatttgctgcaagatacctagagtgcaaccaaggacaaaccctttttgctagtgcagatactgcttatgttttggcctactcaattatcatgttgactacagaccttcacagtccacaggttaaaaacaaaatgacaaaagaacagtacattaaaatgaatcgtggtatcaatgacagtaaagatctccctgaagagtatctatcagccatttataacgaaatagctgggaaaaaaatatcaatgaaagaaacaaaagaactaacaatccctacaaagtcaactaaacagaatgtagccagtgaaaagcaaagacgacttctgtataacttagaaatggaacagatggccaagacggctaaagcactcatggaagctgtgagccatgttcaggcaccttttacaagtgcaacacacttggagcacgtgaggccgatgtttaagttggcttggacaccttttctggctgcattcagtgtgggtctccaagactgtgatgatactgaagtagcctctctttgcctagaagggataagatgtgctatcaggattgcatgcattttcagcattcagctggaaagagatgcatatgtccaagcactagccagatttaccttacttacagtgagttctggtattactgaaatgaaacagaagaatatcgacacaataaaaacactcatcacggtggctcacactgatggaaattatttaggaaattcgtggcatgagatcctgaagtgcatcagtcagttagagctggcacaacttataggaactggagtgaagcctcggtacatttctgggactgtgagaggcagagaagggtctctcactgggacaaaagatcaggctccagatgaatttgttggtctagggctagttggaggaaatgtggactggaagcagatagccagtattcaggagtctattggagaaaccagctctcaaagtgtggtagttgctgtggatagaatattcaccggatccacaaggctagatggaaatgctattgttgattttgtccgttggctatgtgctgtgtctatggatgaattgctttctactacacacccaagaatgtttagtctacaaaaaatagtagaaatatcatactataacatgggaagaataagactgcagtggtctcggatttgggaagttattggagatcattttaataaggttggttgcaatcctaatgaagatgtagccatatttgcagtagactctctgaggcagctatcaatgaagtttttagagaaaggagagcttgcaaacttcagattccaaaaggatttcttacgaccttttgaacatataatgaaacgaaacaggtctccaacaattcgagatatggttgtacggtgtatagcacaaatggttaattctcaggctgcaaatattcgttcaggatggaagaacattttctcagtattccatctagctgcatcagaccaagatgaaagcatagtagaacttgcatttcagacaacagggcacattgtcactcttgtatttgaaaaacactttccggccaccattgattctttccaggatgcagtgaagtgtttgtctgaattcgcatgtaatgcagctttcccagacacaagtatggaagcaatccgacttattcgccattgtgcaaaatatgtgtctgatagaccgcaggctttcaaggagtacacaagtgatgacatgagcgtggcacctgaagacagggtgtgggtgagagggtggttcccgatcctctttgagttgtcttgtatcatcaatagatgcaaattagatgtaagaaccaggggcttaacagtaatgtttgaaataatgaaaacatatggccacacttatgaaaaacattggtggcaggacttattcagaattgttttcagaatctttgacaacatgaaattgccagaacagcagacagagaaagctgaatggatgacaacaacttgtaaccatgccctttatgcaatatgtgatgtattcacccagtatttagaagttctcagcgatgtacttttggatgatatttttgcccagctttactggtgtgtacaacaagacaatgagcagttagcacgatctggtacaaactgcttagaaaacgtggttattctgaatggtgaaaagtttactcttgaaatctgggataaaacgtgtaactgcaccctggatatcttcaaaaccacaattcctcacgcgcttctgacttggcgtcccacctctggcgaggccgaacccccatctccatcagctgtgagtgaaaagccgttggatgcaatatcacaaaaatctgtagacatacatgattctattcaaccaagatcttcagataacagacagcaagcaccactggtttctgtttctactgtgagtgaagaagttagcaaagtgaaatccacagcaaaattcccagaacaaaaattgtttgctgccctgttgattaaatgtgttgtgcagctggaactcatccagaccatcgacaacattgtcttcttcccagccacaagcaagaaggaggatgcagagaacttagctgcagcccagagagatgcagtagacttcgatgttcgagttgatactcaagaccaaggaatgtaccgctttttaacatcacaacaactgttcaagctactggactgcttattagagtcgcatagatttgcaaaagcatttaattccaacaatgaacagaggactgctctgtggaaagcaggcttcaaaggcaagtccaagcccaatcttctaaaacaggagacaagcagcctggcgtgtgggctgcgcattctcttccggatgtacatggacgagagcagagtcagtgcctgggaagaagtccagcagaggcttttaaacgtctgcagggaagcgctgagctacttcctcactctaacatccgaaagtcaccgggaagcctggactaacttactgttactgttcctcactaaagttctgaagatcagtgacagcaggtttaaagctcacgcatcattctactaccctctcttatgtgaaattatgcaatttgacttgattccggaactgcgtgctgttcttagaagatttttcctgcgaattggaatagtatttcaaatatcacaaccacctgaacaggaacttgggataaacaggcaatgatgagagccgatgtttttctgttggtgtttacattgctctgctctgtgaaaggatcctgcagcagaggcttcctacctgaaaaatgtttctctcaattgtagtgtgtgagttactggtaagacgcttacacctataactcaaggtcggaatagtccctccagtccctttagtaacccagtggcctctgtctcgtgttgggctcatgttgagcagaaaggctgttcccacagcatcagcctacctttagggtccttccctgtcctctaagcagggtgagcccacactgtggcaggtacggaaattacccaaagaagtatagatgtaaagactgagcttctgcgagaagtacaactcaggagagctgtattttgaaggataaaatgtttataattgggggtgggggaagggagaaaaaaattattgctcatggtaaaagatatttagcaactatggtattcttactctgaagatttttgcacactcaggctatctgagacaccggaaatcatcatctttctgtgaaaatgtacagagatgcaggtctgtaatataaaaatcttaaacatattgttcctcctgcactgttttatttctttattttcttatctacttgctaaatacccataatattttgtcaaatgcactaaaacatttgggttgaacttttagtctttgggggagtggtggtcattttgagggcttgctgtgccctgaatctgttgtggctgatgcctgtcaagatgacaacaggaggggatccaccaaggtagaaaacatccctgctgacaagacctacctgtgacatactcactctcttagggcttttaaagacaagccattaaaatagatgacctttcacagactgaaacttgaatcactgcaaaatgaatctaggttgctgtcactttttcttttgggtggcggggcttgatgtagattttattctatgtacagaatttaatgttgaatatattaaaaataacaaacctggcatggttttgggaggttagatttactggaaatgtattcatactgtgaactgtgctctgatggttagaatgaaaagcttatcaagcattccatataacagtggatgtagaaaatgttttcaggtggatatgtatatggtacagatgtaaagttttctatgtaaaaaattctgtacaactttctgtacaatattgattctcatctggcatatctaatcaggttataggtcaataaagtttttgaattatttcatcagtgcagtgtaacccacagccctgt

SEQ ID NO: 70 - protein, 1846 aa, Mus Musculus
MYEGKKTKNMFLTRALEKILADKEVKKAHHSQLRKACEVALEEIKVETEKQSPPHGEAKAGSGTLPPVKSKTNFIEADKYFLPFELACQSKCPRIVSTSLDCLQKLIAYGHLTGRAPDSTTPGKKLIDRIIETICGCFQGPQTDEGVQLQIIKALLTAVTSQHIEIHEGTVLQAVRTCYNIYLASKNLINQTTAKATLTQMLNVIFARMENQALQEAKQMERERHRQQQHLLQSPVSHHEPESPHLRYLPPQTVDHINQEHEGDLEPQTHDVDKSLQDDTEPENGSDISSAENEQTEADQATAAETLSKNDILYDGDYEEKPLDIVQSIVEEMVNIIVGDMGEGMAISASTEGNTGTVEDGSDSENIQANGIPGTPISVAYTPSLPDDRLSVSSNDTQESGNSSGPSPGAKFSHILQKDAFLVFRSLCKLSMKPLSDGPPDPKSHELRSKILSLQLLLSILQNAGPVFRTNEMFINAIKQYLCVALSKNGVSSVPEVFELSLSIFLTLLSNFKTHLKMQIEVFFKEIFLYILETSTSSFDHKWMVIQTLTRICADAQSVVDIYVNYDCDLNAANIFERLVNDLSKIAQGRGSQELGMSNVQELSLRKKGLECLVSILKCMVEWSKDQYVNPNSQTTLGQEKPSEQEISEVKHPETINRYGSLNSLESTSSSGIGSYSTQMSGTDNPEQFEVLKQQKEIIEQGIDLFNKKPKRGIQYLQEQGMLGTTPEDIAQFLHQEERLDSTQVGEFLGDNDKFNKEVMYAYVDQHDFSGKDFVSALRLFLEGFRLPGEAQKIDRLMEKFAARYLECNQGQTLFASADTAYVLAYSIIMLTTDLHSPQVKNKMTKEQYIKMNRGINDSKDLPEEYLSAIYNEIAGKKISMKETKELTIPTKSTKQNVASEKQRRLLYNLEMEQMAKTAKALMEAVSHVQAPFTSATHLEHVRPMFKLAWTPFLAAFSVGLQDCDDTEVASLCLEGIRCAIRIACIFSIQLERDAYVQALARFTLLTVSSGITEMKQKNIDTIKTLITVAHTDGNYLGNSWHEILKCISQLELAQLIGTGVKPRYISGTVRGREGSLTGTKDQAPDEFVGLGLVGGNVDWKQIASIQESIGETSSQSVVVAVDRIFTGSTRLDGNAIVDFVRWLCAVSMDELLSTTHPRMFSLQKIVEISYYNMGRIRLQWSRIWEVIGDHFNKVGCNPNEDVAIFAVDSLRQLSMKFLEKGELANFRFQKDFLRPFEHIMKRNRSPTIRDMVVRCIAQMVNSQAANIRSGWKNIFSVFHLAASDQDESIVELAFQTTGHIVTLVFEKHFPATIDSFQDAVKCLSEFACNAAFPDTSMEAIRLIRHCAKYVSDRPQAFKEYTSDDMSVAPEDRVWVRGWFPILFELSCIINRCKLDVRTRGLTVMFEIMKTYGHTYEKHWWQDLFRIVFRIFDNMKLPEQQTEKAEWMTTTCNHALYAICDVFTQYLEVLSDVLLDDIFAQLYWCVQQDNEQLARSGTNCLENVVILNGEKFTLEIWDKTCNCTLDIFKTTIPHALLTWRPTSGEAEPPSPSAVSEKPLDAISQKSVDIHDSIQPRSSDNRQQAPLVSVSTVSEEVSKVKSTAKFPEQKLFAALLIKCVVQLELIQTIDNIVFFPATSKKEDAENLAAAQRDAVDFDVRVDTQDQGMYRFLTSQQLFKLLDCLLESHRFAKAFNSNNEQRTALWKAGFKGKSKPNLLKQETSSLACGLRILFRMYMDESRVSAWEEVQQRLLNVCREALSYFLTLTSESHREAWTNLLLLFLTKVLKISDSRFKAHASFYYPLLCEIMQFDLIPELRAVLRRFFLRIGIVFQISQPPEQELGINRQ

SEQ ID NO: 71 - DNA, 146536 bp, Homo Sapiens
ccctgcggctgagaacgggcgatgcgggtgttgctgtgacccctggaatgcaaaggactgcacccccatcagaaagttagaaagccagtgcagagtagccaggagtcctgttcactcggcaggagcaggggtgccgagtggggggatctctggtcccgcagctcggccgccaccaagagcccgaagtgctgggcgcggtgccaccagaggcccgccacgccccacgccgccctgcaggcgaacgctggaggccccgccgggccgccgtagcgctgcggctcgggccgctcctcccgcgccgccctccgcccccagcctcccggcgccgcggcagctctgggcagggagcgccgccgccgccgccgccgccgccgcttcctcgtctgcagccgttcggccgctgcgtgacgcgtcgtttcctcccaacatggcggccggggcaggtcggcggtgatgggggccagttcgcggccgcggcgggtgctaatccccacagtagccagggtagcccttctctcgcggtgcctctgagagccgccgccacctcgtccctcagttcccggcagacagccgcccgggccgggctccctcaccgccaccagggccggagggacgagtgagaggggcggccgggacgcgacccccgggccgggagaagcggaggcccgacgggcgcggccctcgaggtacggcttcttgggggcggcgaggacctcgacgcccttcgccgacaccgcggctggtcccgctcgcccgccccttcctgatcctgccgctgccctccacgcctccaatcccccacctccaccccctctcctttctctcttctcttccttcctctcctcctcctcccctccagccgctgggagccgcgggtcggacgagccgccgcctccttctctgcgtccatgtatgaggggaagaagacgaagaacatgttcctgacccgggctctggagaagatattggccgacaaggaagtgaagaaggcgcatcactcccagctgcgcaaagcttgcgaggtggcgttaggtgagcggggaggaggcccgggggatggggtgcttgttgtggggcggggaggggggcgcctgtgggggggtggggtcgcccggggcttgcccgaggcccgcgcctctgacctcgggaagccctcgcggagccctctgttccctgtctggagttgacaggaactcggctggatgtggggcagaggcggggtagaggaggaagggcagtgagctgggctcgggaaacgcggcagggcttaggatcgcggggcacctgggttcgagggatcgacttgagagtgagaggattttgttggtggtccgtgaggtgcggactggataccaccctttgtgatgaagcagaagatgagctgttgtttattagcttggaaattgaggtggggctggtatgtcaagattgggtgtgggaaaggttccgtatcataattaacaataactttttcgtttggcgaggtactttggggagataggctgctgaagttgtttccttgttgacagtcttgagaaggggtttgcaagaggtgcagcccgttctgacatctctccgcctccgccacaggaaaaacatagagtaatattgtatctgactgggctgacctggaagaacaagaccggtggttaaggggtgagggtgggggtggcggcatgaaagcagggaagcaaagaacctttagataaaatggctttaggtgacaagggaagggagggtttgaaatgaggaaaatgaaaaagacaatgacacccaccagccacatgtctggacagtggcagctgctctcaagcttgaattgtgatttatagttcagatggaagagatctagtgtaatgaagcccgcagcagggaaaatccaaacaatacctcctacctatgaggttaggcagatgaggagttgttaaagggggaacattgttagatctattgcatccatcaaagttgaaatcgtttgagagaccagaacatttaacacaaagatacattcctaatgtttacactttatagcactggaaatacactaggtcaaattggcaagaaaaggaagcttgttaaatgggctttacaaaaaagcattcttgaaaggggaaaaatccacaataacttaaagtatgctagagttaaggagtctagacaacttaaaattagcttttaattattaaatggaagactaccatttaatttgctgtaatatactgtagtttttttttcctagatcgttaaaattggtaatatgaaaaacgtcgaagaaatttcatcttaaaacatttgaatgtgtagtattaggggcttaagattattttttcaccttacttatcgaccagaagtttgcattttgttatttttgtagctaacaaaagactgttcccggtgtatgagaagacagttgtctagtggcaaaaactgtatttatatctagatcctgaaaggaataatattaaattggagtgagactggggagaaagtgatttcaggatttttaaaagaattgttatatgtaggtttgtaaattacttgaaggttgaagaactttagagagattcaaattaaagttttaaatttttgtttgttttttgagacaggggcttgctctgtcacccagactgaagcgcagtgacacaatcagtgctcagtgccgcctcaaactcccaggatcaggcattcctcctgcctcagcctcccaagtaattgggacttcaggcacaccaccacacctggctaattttttttttttttttttttttttggtggagatggcggtctctctatatcgcccaggctggtctccaaatctgggctgaagagagcctcccaccttggcctcccaaagtgctgagtttataggcatgagctacctctcctggccttaattttttataattcagatttttcatgttacaacatatttttaatacattaaattgtaagtatcaaactgaagaaatggagtgtgttgtgtgtatgtatatattttccttctccaaagtagtaacataagtaagcatattttaatggagagcctactggaatgagagtctgagatcctaggtttaaatcccagttctgttacgttgtagtattaggcaagtccctgggccttaagttctctgtaaaattagggtattgaacttaatgattgtatggtcacatctcctctaatgtgccataaatgtgattgcactgtcctgttaactcgtgcattgggtattccctaccactcatgagcatcatctttagagggcctatagcgctctaaatggtccttgccatttctggaggtcgggattacttgatatgtgtgccaactgtaccagggttgtctattccagattttgacagtttttacttttttgtcccttctgtatactcaatagaagcttgttacgaggaatgtgactatccagggaagggctaggcaccacagtactttatttacttgagatgtatgaggcattttttcccacatttcgtaaagttacatttagcctccaacaaagcaaaatctcagtaatctcatggtagctaatccctggtgaactttgtttcttcccttgcagtctatctacatcaccacccaaacataaattgataagcataactcattttgtctttgcagaaagtatattttgcaggaagatggtattcccacaaatgtattgtccttgaagaccgttagagacttatcttctccacttcactattgagacctgggccaggcccgctctggtctgttggtaatctatgtggccattaagcaggatgggaaagcaaactgaaaaggcctgatttagtcctctcggttctatagattgtgagtgggtaggtgttggatggtgaagatacagagatcattttgtgggtggtgttataacccttctaaatacccacctgtctgtcttcattctttccccaaatatttattgagcatacagctgaagggagatggacagttaacaggaaaatacatagtatgtcagacatttaatccttttttgtttgaaaatcattgtattggcatgtgagtagatttctgagtattgccattcaaaattaattcagctaccttttaacatatggccaattatagatggattttctgtaaactatactcatgaaattacagcttattgtgtattcttaaaacttttttttttgtcaaaaagtataacttatgaaacagcatgtagattaggggaaattttacttcattaaaacaatccattctcaaagacttctcaaggaacttttattttcacagaaagaaaaataaacctttaaagggatgcagagttaatgtaaaacgtttttcaaattttcttatgtcagacttcattttgaagtaaagaatggttaaaaaagaaagaatccccccccccgccccacactgttacactgttacaactgataagaagcccacaggcccaggaacagctccaggttgccctcttttggtacctgccctactacagctctctgcagagagagggagtctaggctgccctagcttagcctgatccattcctgctctcgagaatcctgacttaaaaatagtctggccatctgctggcagatgagacaacagctgagctatttttagtttcaaagaatttaggattgttgtgggattgggcttgaaggtagcattgtttatctgctagggagggtgcagttgggacttattccagtaaggcctctaagtttcaggagtttcttttatgttagggttgtgactagttcagcttatgctttctgacatcgaatgaagagtatctatgaagatactctgcaaatgttaggatgaaagagttcaaggttggaaactgtcactgatacacaataagagtgaaaaagttgaagagctgaccagaagaaggttttaaagggaagggaggcatatactggcagtgataagggtgggttcccaggaggtatatgggaaaataatggagacaaaattgttagggaagtaatttttgcatcagacagggtatgaatttatattgttcatcatattataaagtgatcctgctgacttagttttcttatataagagtctattacctgtaattatagtttcatccagagatacaatattgagactcaaacttttcagaacttgcttccttctgcccctttaatcccacccttatttttgttggtggagttataaaaaagatacgtcagtggaggggaaattacttgaatgctttgggccctggttttatgctacttttggtaactattaattttcatcactcttcaccatttatgaaaaaatgatttatccccaaacaatatcctgccatcagtgaacaccttaattataatttaaatccattaacaaatctccgtttaagccttctttgatatctaaagtaaaaggtgttttcagtaagccaggctacctgaatttttgagatgggtagaagaaaagagtataattaatgacataaccgaaagattgatcctatttgtatttgttcttttctttcacatttcagatttgtttttaggacacttgctctagaatagtgttgactgaaataaatgttgcagagtacaagttcttagagaagctctttgaagaaaataagtttgggttgaaaaaataagtttggattatagtgtgtaatctgtttccatttgggaaatttataatgcacatgaacatagttaagattctgaaaagtcctccaagaaagacacctgctcaattttgtttaatgaagttcttcctgaatttatgtgatcctttttcattgtttgctaactcagttaactcccctaggatatgttgttccttggaacttactttgggacactggggaaagaaagacaagtacaataaccctaactactggtgagaccatcttctagaagaggtttggggaaatcagtgcacaaacctgtgtttctctaaacacaggtttggggaaagtagtagatgtgttaatagtgtgggaaggagaagaaagtccgaaataaggagcagtagaaatatcgagatcagaggactgtttgctgactagctttctttcccaccccatctaggggcaggtaactcatttgtgtctcttggtaaggtttaacttagagagaaaattgtgaatgggaaataatttggggaaatatttgtcataatattcctcacataatggaggaaggaagatatttgaaaaggaaaaatacatgagtaagttattgttgccattccgaactaggtatatatttcaatcagatatttgttgaactcctcatatgttccagatactacttcattgctgggtatacagcagtgaaccaaacatgctttcatagaacacacattctagtggggtgagggtgatagtaacaaccttatatcatcagaagaaagagttcagaaggttaaagggaaaagggtgggagtactgatttagttagagttgtcaggaaagtcctatctgtgagatgacatttgagcaaagaagtgacataagtgggggatttagtctttcagatacttggatgaaatagaaacaggaaatagcaagatggatgtgtgcttggtgtgtttcaggatgcaaggaggcttgtgtggctgggagagagacagagagaaagatgggagggggtgggcagatttgggattttagtgacagcatgtttatgtttttaaaggctcactgtggccagagaccatggggacttaggctaagttggtggtggtggaaagggtgataattgtgtgcatttggaatatattttggaatccacaggatttgctgatgggttggttaacagaggggatggcatccagtcttgtagccagagcttcagggtagaggaagatggcattcacctcaatgggggacactaggatagaaaaagcctttgggaaatagatttttagacagtaaaacattttcatcctgccttttatatgtattttagaatgttttaatgatagaattttcagatgatataataggatattttctactgagaataacacaaaataatttcaatttgttttgtctgtttttttttttttttttttttttgagacggcgtcacgctctgtcacccaggctggagtgcagtggcgcgatcctggctcactgcaagctccgcctcccgagttcacgccattctcctgcctcagcctctcgagtagctaatctcgtgtagcgctaccgcgcccggctgattttttttgtatttttattagagatggggtttcaccgtgttagccaggatggtctcgatctcctgaccttgtgatcctcctgccttggcctcccaaggtgctgggattacaggcgtgagccaccgcgcccggcctgccttgtcaggttttttgcagggaggtttttttatcaaagaaatgagcctttcacttgtctggttcttttcctggaataggaactttgtggatgtagtgaaagatctcaaggtgaagttgagatcctcaacttagagcctttaggtgggccctaaatccagtgaatggtgtccttttaaggaagaggaagggacacagtcacatacaaaggaaaaagtccatgtgaaaatggagacgagatcagttactgctgccacatgctatggaatgccagaagccaccagaagtaggaagaggcaaggagggattcttccctttggatgtagcatagctctgctgtgaccttgattttagattttgggccaccagaactatgagaggaaatttctgttgttttaagccaccaaatttatggtaatttattaaggcagccttaggaaatgaatgcaagttcccttttatcctaacttttcagacccattttgatttctttattcaagtttccacttacagagtctactgtacatatgtttacacaatcagatcctgtctttggctcatctctgattgtttcatgaatctagaaagcagttattctgaggctttagtgtgttataagtagaggctcttgaaaagcttcttaaaaggtctgggctcaagtatttaagaatatttaaaaagttttgtgttctgcttttgatattttgttttgcttagacttagacttgatgtaactaaatttgtttatataacctatgttatcttttcattcagaaaagtctttgaaaatctttaaaatggccgggcgcggtggctcacgcctgtaatcccagcacttcgggaggccgaggcaggtggatcatgaggtcaggcgttcgagaccagcctggccagcatagtgaaactccgtctctactaaaaatacaaaaagttagccgggcgtggtggcagtgggcgcctgtaatcccagctatttaggaggctgaggcaggagaatcgcttgaacctggaaggcggaggttgcagtgagccaagattgtgctactgcactccagcccgagagacagtgcgagagtccgtctcaaaaaaaaaaaaagaaaatctttaaaatatttcatattaccactggcgtgtctttaggaaacgccatgtgaggctattaatttttcttaacaaaaatgtgtacattgagacttcatttaatcagctgtttaacaatcctcatctgtcagaactttgctaagaaataataaaaatataagcagtcaaagtacatattttgaaggccaagcactttatatagaagagaatctctatggcttttactcagtctgtatgcttttataattccagtaagtttggtaatttgatattttttataaacgaatccttcaaatcattttcaaaagtgtaactacaacaataaaatttactgtgatacggggcccggcgtggtggctggcgcctgtgatcccagcactttgggaggctgaggcgggcagatcatgaggtgaggagatcgagaccatcctggctaacacagtgaaaccccgtctctactaaaaatacaaaaaattagccagtcgtagtggcgggcgcctgtagtcctagctacttgggaggctgaggcaggagaatggtgtgagcccgggaggcggagcttgcagtgagccgagattgcgccactgcactccagcctgggtgacagagtgagactctgtctcaaaaaaaaaaaaaaaaaaaaaatttaccgtgatactcttagctgaagataaataactactgttaactttttgaaaaacaactttctgataaatgatttacatactatagtatttactttttttgagtgtaatgatttttggtaaatttactgaattatgcagccatcagcataaatccagttttagaacatttctattacctcaataaaatctgtagtgcccttgttgtcatccctagcttctggcattcactaatctattttctgtctttagagttgccttttctggacatttcatgaaatgcagttatacacaggtggtcgttagtgtctggtttctttcagtatgtttttgaggttcattcatgaagtttgtatccacacttcatttccttttattgatgaatagcattccattgtttagatatcctatattttgtttatccatttaccagttgatggatatttgggttgaatgaataatactgccatgaatatttgtgtataagtctttgtgtggacgtaaactgttatttgtcctaggtagacaaactgggaagggaattggtgggccacttgataaatttatgtttaactttttaagaaactgctaaattcttttccagcctacatacccaccagcagtgtatgaggcttcccgtttcttcaaattctcaccaatatttgttactgcctttttatttttagccatcctagttgttatgatgaagtgttacttcattgaaacactgttaactttttgaagtacagattaaatatcctttatcagaaatgcttgggatcagaaatgttttcaattttgtttttttttttttttttggactttggaatatttgcatatacataatgaaatatcttggggatgagattgaagtctaaacacaaaatttactaatgtttcacatccaccttatacacaatccaaaggtaattttatgcactattctttttttttttttttttttttgagacggagtttagctattgttgctcaggctggagtgcagtggtgcgatctcagctcactgtaacttccgcttcccaggttcaagtgattctcctgtctcagcctcccaagtagctgggattacaggcatgcgccaccatgctcagctaattttgtatttttagtagagatggggttttgccatgttggccaggctggtttcaaactctgacctcaggtgatccgctgaccttggcctcccaaagtgctgggattacaggcatgagccactgcacctggtcttatgcactgttgttaattttgtgcatgaaacaaaattttgactgtgttttgactgtgacccatcacgtgagatgagattcggaatttttcacttctggcttcatgtcagttctcaaaaagtttcagattttggaacatttcagtttaggaatgctcaacctgtatttttccaaaacttcattctacacacacatacatgggagcatggacatgcacaagcatattcttcaaaaaattgaacagccagatgtggcggctcacacctgaaatcccagcacttaaagaggccaagacagggagatcccttgatcccaggagttcaataccaacctgggtaacatggctaaaccgtgtgtctacaaaaaatactaaaaaaaaaaaattactgggtgtggtggtgtgcacaagctacttgggaggatgaggtggcccagaaggttgaggctgcagtgagctgtgatcccaccactggactccagcctgggtgacagagtgaaaccctgtctcaaaaaaaaaaaaaggccaggcatggtggctcatgcttgtaatctcagcactttgggaggccgaggtaggcggatcacaaggtcaggagatcgagaccatcctggccaacatggtgaaaccctgtctctaccaaaaatacaaaaattagctggctgtggtggtgcgtgcctgtagtccagctgctcgggcggctgaggcaggagaatcgcttgatcccgggaggtggaggttgcagtaagctgagattgcgccactgcactcctgcctggcaacagagtgagactcttgtcaaaaaaaaaaaaaaagtatttaatttttaaggcaataataggaggaaaaagaatagctaacatttattgagtgtttactgtatgccagtttccgtgccaattaaatacttcattgactttatctcagttagtcctcagaacaaccctatatgcttaggttctgttattacctgcattttgcaaatgaagaaaatgagtttgtgtttggcagaattcgaatatgaccttagagcctacatagtcatcttgggagttgtgttgcactctgctttttggcctaatgtgtcagtcctgtgctgcacctttaatcacagtactacatgtttgtaagtaacaatacaaaaaggaaaagaagggcaactgtagaaagaaaggcactgtcaaaaagagaaaaagggccatatactgaacagacatagaaataacagcaatacaggaaaatattgccatgtacatttcagtgaatctccagggtaaatattcatgtgttcatcatgggatccccaaatctgtcgtgtacaatataattttaattctcttttctgcttaagaagtcaggcaaattcgtgtgtatgtatcttctaagatttaattttaaagtaaagtgtcagtaatttaagccatttggaaatttaatgtgccctgtaacacctcccagggattcaggataggttagcttttattgtgcttctatgcctaaccgtttaaaactactctcatttgctttttatattaatattttgtaacatttcaaatcattttaagaattgatacaagaacaaaatcttattaaaatgttatgttatgtgaaattaccaataagactttatcttaaaataactagttgtaaatctcagtgacttcatatgtaagtatataaaagtacttattgtgtaattgtcatgattttctgttctctcatcaatatttcatgtgcattttctatatatctatgttgtcttcctacctagcattttaacagtgtgtcatttgtttaaatatttttgagtttggggacatgttacatttaagttttgctgcacagattttttttttaaattaatcccttgcagagtttgtttagtgtttgttatatatgcagaactgtttaaaataaactcttaagattttgattgttggattagagtgtggtcattcatgactgttccttaaggcaaggttgccatacatagtatacctgtgctaggtacaaataaacaacagagcactgaggaggacaagacagagaatttgctgtctttagatttattggttttgatcagtgttttatcacttcatctttcctttgcattttttttttctgttctaagagtgaaaaacaaagacataaaaattcctctttatagttaggatatctgtactttcattttctatgaatttgatatttttcatcctttttttcttgagggttattagagtatatcttagtctgtttaagctactataacagaatactgtaaactgggtggcttatggacaacagaaatttatttctcacagttctttatttctcactgggaattcaaagatcaaggtgctgacagattccatatctggtgatggctggttccttatagacagcaccttctagttgtgttgtcacatggtagaagagtgaaatacacctcttttataagggcactaattccattcatgagcgctccacccgtatgacctagtcacctcctgaaggccccacctcttaattccatcacactgggaatcaggtttcaacatgtgatttttttgggaggacacaaacatacagaccatagcagggtatataataagtatgtattttaaaagttcattttgtttctctgaatcgatgggtgttttaatagcagttactaagtaattttaaaacatcacatcatattccatcagtcattttcaatttgtattagtatagtacttaatgtggtatctggtaagattgactagtcttcgttgtttcttaatttttttttaataatattacttctttttccaaataacttaaggattttcttttaagttttctaatgctcattcttaacatcttattaacatgttacttaatcagattttcttgccttctcttcttatacattagataaaaagtgttatagttgggaagtagttgattattttgtttcatccaatttgttgggtccccatgcttccattccctaagttttactttttacctgataattgagaatgtgtttgtttaatgcagtatcagaaagcaacaatgtttaatgcagtgacaagcaaagcttatgtgtaatttctgatgtgctttgatctttagaaataagaatggaaccatgtgcatcttctgcaaagatgaagagtaaaaataaggtgtaggttgtttgatactagttaatagtcagtagttaagattttatagtatacaccagtgtccaaaaatgagtttttacaattattagagaaaaaattttttatagtaaataacagctctgtgtctatagttatcttgctagaagatacaaaggcagaaataaagttatattattagaatgtgttttttttactaactgcaatgatgaatctgtgtgtttgaataaatgaagtgaaggtattttgttctttttgtttctaccctcaatccccatttttatgactgttatagaagattccttgagtggtaaagtagaaggaaaggttcttttgtttgtaatatgtacacattctttccttaaaaagtcaatgagtatgccaacatatactctcttaaacttgtatatatggctacctttattgaattgttttccttatgaaatagttaaatatttctcaattcttaattttcttttacatttcaaaaagcaccctttagtaggtaattaatatgcaaaattatggtttctctaagaaaatgttaggttctcaaaattgtcactattatagttctttttgtttgattgctttttcttggtttgaatgaaaaatatctttaagaaagatttgctaatctttttctgttttatcactaagttaaaattatatttatttttactaagtagttttcagttttgtgttattaaattgagtagcctttgtttttttttatttttagcactcccctaaatggtttctaccaattcagtctcattgaagctttctatccttaacatttgtaaaaataatataatctttcattaatagcaaataagctttgtttggttttgctgctcatgcatgcctaatgctgttctgtgtaagatatatctcactagttagcttgactaaaacttcttaatgtaaaggttttattgatttagtaaattaatgtccctaaatattttgtctaagatagtcactgttaataatttggcttttcagaaagtgtataagaaaacaaaaattttttttttgagtttggaaattaaatgttcttaagaatatttgctttttttctagctctttccattttttaaaaaattctttttatttatttatttatttatttatttatttatttatttatttattttgagatggagtcttactctgtcgcccaggctggagtgcagtggcacaatctcggctcactgcaagctccgcctcctgggttcacgccattctcctgcctcagcctcccgagtagctgggactacaggcacctgccaccacgcctgactaattttttgtatttttaatagagacggggtttcaccgtgttagccaggatggtcgcctgcctcagcctcccaaagtgctgggattacaggcgtgagccactgtgcccggcctaaattcttatttttatcctgaattgtttgtttttttgttttgttttttgttttgtttttaaagatgcccaggctggagtgcggtggtgccatgtcggctcacggccatctccgcctctcgagttcaagtgattctcctgcctcagcctcccaggtagctgggattacaggcacatgccagcatgcctggctaatttttgtatttttagtagagacggggtttcaccatgttggccaggctggtcttgaactcctgatctcgtgatccgcccgcctcaaccttccaaagtccagggattatacaggtgtaggctactgggcctggccctgaattttttattttaaaaaattaccacagtatttccattcctttttttgacccatttacgttaatttcctaccggattctccttctttctccttcttttcaaaccctcagaatctctgtcagcattgatttatgaaaacattcttgatttataaagacattttaactcaattcaaacagtttaaaaataatcagagggtaagctgaaatacaaatacacatttagtttacaactcttgatgtatccttacaaatgaccactatgttgcagaaatgagggaaaattcactacatggtagaacagtgataggtggaagtttattgctagatcccaggaggaatgaaaagctaaaaggatgagagagaagagctagatatggaggacagggaacataaagctgtgtaacatatggataactcattttctgaagcataaaacaaaaactagaaattgctggcaaaacaataatcagagagatgctggagaaaacttctgcactaaaaaatacttgtgtgtgcaaactgctatattctaggaagaaaaatactcgatgtaaaaagacttacaaatctcagtctagcaatattttttaatattaaagataaaaaattaatcttgtaaatatccaggcagagaaaataagcttccagaagaatagttcagtttgttaagactgtaaagaattagtagcacccatggctatttaaggaaaaaaaaattataacagtttcagcctaggtacatttaataggaatttgctgaaaatgataaaacagcaactctgctaataaacataggcattctcttttatatcttttttaaaaaaatgtcttatctcacctctctgtcatctttttcccttgttcccttctttatctccctcatctctccacccctttctttcaccccctctatttcaaattcttctagaatattgttagaaaacaatgagaaatgtgttacaaagatatatgtacaagtgtattcatcattttgctgtttataattaataaaatgaaaataactcaagtagtcaacaatataggattgattaaatgatgttgtgttaatacaagggaatgttacaaagtactatgtagtgatgtgcttgaaatatacttactgaaatgggaagatgaatgattggaaaaagcagattatatagtacttttcttagaacaaatatgtgtaggtatacagggaaaaagtgttgcaaatacaaggaaattttgacaaatataatcataccaagtaacacgttttactgtcttgtggtagaactactataaaatattcatggtgtggttagaagtatgtcattgggccaggtgcgttggctcacgcctgtaatcccagcactttgggaggctgaagtgggtggatcacctgaagtcaggagtttgagaccagcctggccaacgtggtgaaaccccatctatagtaaaaatccaaaaaattagccaagctgtggtggcaggtgcctgtaatcccagctacttgggtggctgaggcaggatgatagcttgaacctgggaggcgaaggttgcagtgagccgagatcgcaccattgcactccagcctgggcaacagcgaaactctgtctcaaaaaaaaaaaaaaaaaagacgtacgtcatcgaggagtctgtatgcttctgaagaacttctacaaatgcaaaaatattacctatttatcttctttctcaagcatgtggtatttaaatatagagtaagaggaaaaagaaaacatacacacaagtataagtagtgggcttattgaagtagaaaaataaaatcaaggaagaaggttgctgacatcaaatatagataattgaataatagtcatatttatttacaagcaagtcaacctcatagtgaacacagggataatttaaatgtttttgatattgcttggagtatgcctaactagggtattagatgttgattgtactttgggctttattacccaattagcttctaataataggaaggaaattgttttgttcttcaagtcaagacctttctcactttgatttctcaaaatgaaagaataactggcctgacataggattttgactaggaaatatttatacagtaaatcctgacttaatgtcattgatataggttcttggaaactgtgactttaagtgaaatgacatacagcaggtccttgaataacattggttagttaaacatcatgtcattataaggttgattagaaaaaattgattttgttatacataattttgcttaaaatcacagtttccaagaacaacaatgttaagtgaggacttactgtaatttatgtctttggtaatcttaagtattatataagaaataaaaagtatttttgagagaacctaattggttgctgttattttctaaaacacaagccttagcttcatcacaaaaaagaaacctaagttaagaaaggtgtgtaaggtttcagatctcattttcatgtatgtatccatttaggccttctcaacacatccagaaaaggtatggaaagctaattcaagagtataggttgttttaatgtttgtagaaagcccggtgttaaccagtatagatttactcttgcagatacttcggtttacatcctttctagagatggataccaagttcttttcaattatatggaaactgccatttatcagttattttcctgtatttcatatttgagtcacaaaacagtactgtgagtcatagatgttctttttcttttatttctttttttattttttgagatggagtttcactctgtcaaccaggctagagtgcagtggcacaatctcagctcactgcaccctccatctccaggttcaagtgattctcctacctcagcctcctaagtagctgggactacatgtgcatgccaccatgcctggctaatttttatatttttagtagagaaggggttttaccatgttggccaagctggtcttgaactcctgacctcaagtgatctgcccgcctcggcctgtaatccctttgggattccaaagtggtgggattacaggcatgagccactgcgcccagcctttttctcatatttcatattcataagtgctttcctgaaattagctaaaatttgtgcttattccattataacttgattaaaacttttttagtcctgagtagatgcacttctgtcttccttcccttctttgcccattgggaaatttctcaaaagtcttccttcataataattcaatatttatttatgtttgttactagtatttatttgcagataacctttgggaatattagacgtattagttattcatatgttggtactgtccttagatttttggagagagctttcttgccttcaacatctagctgagttttgtcccactgagagaatgggaaacttgactgaaatgatgggagagaatggattaattttggaacatggggcattatgggacatggtaggactgggacaggcctgatagaggctcctttatgtaatgtaagcatagcatgaggttgtaaggagacaatagataggaaggtgcagactggtgagatgagaaagtattaaaaacaacctttgaagtgatgagatgagaaagcattaaaaacaacctttgctttgcccttaggaataatgtgtattatttaaaaggtgtaagcactcattataatttgttgatgatagtttaagtatatggggtatgcccattagccattttctgttaaaaaaaaaaaaaaagtggatttttcggcctggtgtggtggctcacgcctgaaatcccagtactttgggaggctgaggtgggtggatcacctgaggtcaggagttcaagaccagcctgaccatcatggagaaaccccgtatctactaaaaatacaaaattagccgggcatggtggtgcatacctataatcccagctgttcgggaggctgaggcaggagaattgcttgaatgcaggaggcggaggttgcagtgagccaagatagcgccgttgcattccagcctgggcaataagagtgaaactctgtctcaaaaaaaaaaaaaaagtggatttttttctctctggctctttgggttaacctaatgttttgtattttaaattgtgttactgtgaactccagttttaccatgggattaaaagctaatgtaaatactttttagtcttcactattttatttaacaaacatttattgaacatcttaagtgtgtcttaaaattgtattaggcactagggaaactagggaacacatatgtggttcctaccttcaacagcttgtaatctcttgggggaaggcagatttgcagtaaatagatgttagaattgataaataggcgctatggtagacatatatgaaattgatggaaacccaaaggaagaataattgataagttcttttcaggagtactagggtagggtcatgggtcaggaacagctttatagaggaatcactctggacttcaggcttggaagatcactagatgagtttgccatagaattataggaacatgctgtggcagaactaattgtatgagcatagagaggtataaggaagcatgtctgcacttagggaactgcagggagttcagtatgactgtgggaatacagtttggcaaagaaagcaaggatgagatcattgaagacctttttttgttttgttttgttttctttgagacagagtctcactcagttgccaagctagagtgcagtggcgcgatcccgcctcactgcaaactctgcctcccatgttcaagcgccccaccttctattgtagacagtagaatgccaagcaaaggagtgaaattgttgttgcatttcagagaaatcattctactctgattggcatattgaaaagtaggttgtggctggctgcggtggctcacgcctgtaatcccagcactttgggaggccgaggcgggcggttcacaaggtcaggagattgagaccatcctggctaacatggtgaaaccccgtctctagtaaaaatacaaaaaaatcagccaggcgtagtggcaggtgcctgtagtcccagctacttgggaggctgaggcaggagaatggcatgaactcaaggggcggagcttgcagtaagcggtgatggcaccactgcacttcagcctgggcaacagagcaagactctgtctcaaaaaaaaaaaaaagtagatttctgggattcagaactgcaggcagtgagactgttaataaactgttgccttagcacaggtttgaagaagtaagggtttgaacctgaggcactgaatatggaaagcttagatctcagtaaattaacaggacttcataaatgtttgggtgtgaggaatgagagaaaggaaggcatttaggatgattctgaggtttctaatgacatgattttgagaagttggatctgttcaccaaaaatggcagtatgagaaaataagcacattcgacataaatgggttgaggaaaaatggacttatggttatattgagtttgagtgcatatgggacaccagagtaaagatgtttggttgatagtagtttataacatgacacaagcctaggggagagatctgagttgtagatcaacttttaagttatcaggttaagtttaaggtttaggtgttaccaacatatgttacccagttaggtcttttggagaaaaagagatgtatattaagttacctggtaaatttactctctcatttattgcttttttgttgttgttgttgttgagatggagtcttgctgtgtcactcaggctggagtgcagtggcgcgatgtctgctcactgcaacctccacctcctggattcaagcaattctcctgcctcagcctcccgagtagctgggattacaggcttctgccaccatgcctggctaatttttgtatttttagtagagacggggtttcaccatgttggccaggctggtctcaaactcttgacctcaggttatccaccccctctcaaagtaatctgggattacaggcgtgagccaccgtgcctggcatttattgctttctttggaaaacatttaagtatatatttgttcccgattttattctaagcctgatgaatgtaaagatgtggtataaaatgtggtctttgctgttaaggagcagattgaaggagataaatacataaaataatttcaatatgctaaggtaagtagtgatagtaataactggaggaagctatgggaatagagaagtgtaattatcttagcctagaagtgcaggagaagacttttcggtaaagacaggcttttgtttttgtttttaagagacggtctcactttgttgcccaggctagagagcagcagtgcagtcataacttacagcatcctcgaactcctgggctgaagtgattctgctaccttagcctgcctccctagtagctaggactatagtcacatgccatcatgcctggctaattttttctttaactttttgtagtgatggggtctctctatattgcccaggctggtcttgaactcctggcctcaaacaaccatccccactgggcctcccaaagtgttgggattataggcatgagccaacatgcctggctgataacagctatttattctagaaggatgaatggattttagccaggaaaagatgggtggaaaaagtattctggggaagaaggagcatcattagctaaggcatgaatagccgaataaacccaaagtgtgagagagttacctagaaggttggcattttaagagacttaagtgtacagcaggaatggtaggagatgaggctcatggaaagtgttataggtaaggatggttggaaaaccactgaaaggggttttagttgggagtgacagagaacatatgactgaggcaaccttgaaaggtacctgttggacatagtggtggtgggatggaattcaggcagaggacaccatttgagcaaaagcctagaggtatgaaatggcagatctttacaggggatttacaatgttcctttacaattggagtgtggaatgcaaggaagggcatgcagagagatgagagtggtaggcaggagccaaatcatggaggcttttgtgtgccatgctgaagagcttgagctttatctttgtcatgatcactctggcactatgtagaagatggattagagccagtaggcctgatgagagatgaagccctgacctaaagttaaagtggcagaaaggatggagaaattaaaattaaggcattaaaacagaagttctcggccgggtgtggtggctcatgcctgtaatcccagcactttgggaggctgaggcgggcggatcacgaagtcaggagatcgagaccatcttggctaacacggtgaaaccccgtctctattaaaaataaaaaaaaatagccgggcgtggtggcgggtgcctgtactcccagctactcgggaggctgaggcaggagaatagcgtgaacccgggaggtggagctttcagtgagccgagattgcaccactgcactccagcctgggcgacagagcgagactccatctcaaaaacaaaaaacaaaacaaacaaaaaaaacagaagttctcatccttggctatacaaatacaccaagatcacccgtggagcttcttaaaaatacaaccaactacgtcacattactggagatcctgcttcactaagttggagtatggatgtaggcaacctattttgctttgtatttttgttttttacgttaacatacagtaaatttgactttcttttttactgtacaattccatgaattttaacacacatgaagatttgtgtaacttctatcacagttgggatacagaatagttttagcacccccaaacccccccccatacttatagtcacaccatttctcacatacctaacccctggcaaccactgatctgttctctgtcgttttaagaatgtcataaatgtggaatgatacagaatggaggcttttgagactggcttctttcactcagcatgcatttagggtttatccaagttgttgtatgtattagtagtcttgtttctttttttgtttgattttttttttgagatggaatctcactctattgcccaggctgaagtgcggtggtgcgatctgcttattgcaacctcttcctgggttcaagcaattctcctgcctcagcctcccgagtagctggattacaggcgcctgccaccacgcctggctaatttttgtatttttagtagagacggggtttcaccatgttggccaggctgacctggcctcgagctcctgacctcaggtaatccacctgcctcagcctcccaaagtgctgggattataggcgtgagccaccacgcctgactgtctgtttcttttttactgctgagtgtatggatgtcgtatagtttgtttaacactcattgaagggcatttgagttgtttccagttttggcagtatggttagagctgctataaatattcatgtacagatttttacataaacttaagttttcatgtttgtctagggtagatacccaggagtgggactgctgggtcatatggtaagtatatgtttaacttcatgagaaacttacaaactgttttctaaagtggctgtgctattgtgcatttctaccaacggtgtatttgcgttcttgttgctccatatccttaccgactcttgggagtgtcagtatttttaaaatttaaccatgttaataggtgtgtagcattaaatcattatggtttttcatttgcattttcttaatggctaattatgttgagcactttttttttttttttttttttttttttgagatagcgttttgctctttcacccagtctggagtgcagtggtgcgatctcggctcactgcaacctccgccaccccaggttcaagcgattctcttgcctcagcctcccaagtagctgggattataggcaccggccacaccaggcccagctaatttttgtatttttagtagagacagggtttcgctctgttggccaggctggtctcgaaatcctgacctcaggtgatccacccgcctcggcctcccaaagtgctaggattacaggtgtgagccactgtgcccggtctgagcatctttttttatgtttatttgccatgtgcatatcctctttggtgaatgtctaagtcttttgcccattaaaaaatttcgttgtttttttactgttgagttttaagagtttttaaagtatatattctagatacaagtctttgccagataaacaatttgcaaatattttctgtagcttaccttttattctcttaacattgtctttcacagagcaatcattttaatcttgataaatccattttattttttcttttatgtcacatgcttttggtattttatctaagaactctgccgaatccaaactcacagagagtttctcctatgttttccgaaagtttgatagttttttgttctaacatttagatctgtcatccatttaagttaatttttgtataaggtgggagttttaggtcaagagttttttttttttttttgcaaatgggtgtctaattccaacactatttgttgaaaagattatcctttctccattgaattgcacttgtacttttgtcaaaaattaatcatctatagttctgtgggtctgtgtctggactctattccattgatctgtgtttctgtctttaacactacattgttttgattattataatttaaaattcttaaaattggagatagggatttctcccaagttattcttctttattagaattgttttgtctatcctagttacattgcctttcctaacaaatgttagaatctgtttatgtgcagaaaatcctgctagaattttgattggcagtggattaaatctgcagataattttggggaaatctttattgtttttatactttcagtcaatgaacttgatatatttattgttttttagttctttgatctttttatcagcatttctttcagtatatattttatatgtgttttgttaagttcatacttaagaattttattttgtggtgagctattgtgaatttttttttgtttttgttctgttttgagacagggtctcgttctgttgctcaggcagtggcatgagcctagctcactgcagctatcaccttgtgagctcaagtgatcctcctgccttggcctcccaagtagctgggactacatgcatgcaccaccctgcctaatttttaaacttttttgtagagatggcggtctcactgtattgctcaagctggtcttgaattcctgaactcaagccatctttttgcctcagcttcccaaagtgctgggattacaggtgaaccattgcacctggctgtagatagtatttttttaaaattttgggtttccagttgttcattgctagtatatagaaatgtgattgatttttgcatgttgcagccttgctaaattcatttatgagttcttagagtttttttcttcttcaagatttcttgggattttttacttaaataatcatgtaatctgtgaataagaactgttgtatttctctctaacctatatacctttatttacttatttacactgtctgggatgttcagtacaaagttgagtagaaatgatgagagggtttcctcacccaaccagctcttggttttgtgtagctactgtttatcattctcctctattgctaggttactgagtttttaaaatcatgaatggatgctgaattttgtcaaatgatttttctgtatcaattgaaatgatcatgtgatttttttcttctttagcctttttttttttttttttttcttgagacggagtctggctctgctgcctaggctggaatgcagtggcaccatctcggctcactgcaagctgcggctcccgggttcacgccattctcctgcatcagcctcccgagtagctgggactataggcgcccgccaccacgcccagctaattttttgtatttttagtagagatggggtttcaccgtgttagccaggatggtctcgatctcctgacctcgtgatccacccacctcagcctcccaaagtgctggaattacaggtgtgagccaccgcgcctggcctgtttagcctatttctatggtagattacaggggttgactttttttttttttttttttgagacagagtcttgctctgtcacccaggctggagtacagtggcacaatcgcagttcactgcaagctctgtttccctggttcaagcaattcttgtgcctcagcctcccgagtagctgggactacaggcaagtgccaccgtgcctggctaatttttatatttttaatagtttcaccatgttgggctggtctcgaactcccgacctcaggtgatccacctgcttcagcctcccaaagtgctgggattacaggtgtaagccaccgctcccaacctttttttttttttttttttaaatattagttctgtgtctttagaataaaccccagtgggtcatggtatttaattctttttataccttgctggattctagttagtatttgatgatttttgcgtctatattcatgagtgatatttgtctgcatttttctatactgcctttgttcagtgcagttctgatgctaactacatcataatttggttctggagttgagtcgtatttcacaggttaaaggcatagtccttggcaaaactgttttcacttcagataccagctaatgcttgagagtttccagaccacaagcacttctgaccaactggctacaaattcaggggttcctgttatctcctccggttacgtagagcaactcacagaactcaggaaagtgctatttcaggattgtggttttgttataaaggacacaaattaggatgattcaaaagaagagaactataggatgagtttggaagggcctcagacgcaaagcttttgtgtcgtcagaatgctttaccctctcagctcattgatgtgtatcactaaccaggaaagcttacccaagctttgggtgtccagggtttttgttggggtgttattacacaggaattattgagtgagtcattggtcacatgattgaatctgaactgcagccccctcccctccttggaggtggggctgagatcatgtggttcaaagcccaaactttactcacatagttggtctttcactaatccctatcctgaaactgtccaaggggttcatcatgaataataaagatgctcctgtcaggaagtgtcaagggtttagaggctccctccctgaaccagggacaaagaccaaccagattcttaattatacaacagttcaggctgaggatggtggcccatgcctgtaatcgcagcattttgggaggtcgaggagggcagatcacttgagcccaggagttcaagaccagcctgagcaacatggcaaaaccctgtctctacaaaaaatacaaaaattagctgggtatggtggcacatacctgtgtcctagctacttgggaggctgaggtgggaggatcatggagcctggggaggtttaggctgcagtgagctgtgattgcgccactgcactccagcctgggcaacagagtggaccccgtctcagaaaaaaaaaaaaattatacaacagtccagttttgttatcaagataatattggcctcttgaaagcaactgagatgtgttttatcccctaatattttctagaggagattgtacaggattgttataaattcttttataaacgtggtagaattctcaggtgaaaccatctggtccaagatatttcatttttggtagtttttaaactatgaattcaatgtctttaatagttataggactattcaaatgatctatttcatattggaagaattgtggtagcttgtgcttcttgaggaattggtctattcatctcagttctcaggtctttgtatgtagaattgtttgcacctagtccctcttaatgtctgcggtgtttgtagtgataccctgctttattttttctttcctcttgttggagtttcaattttattgatcttatcaaacaatcagctttttaaattgatttttcctatttttctattttcagttttgttgatttctgctcttgtatttattatttttccttttttttctgcttgctttgggtttattctgtgctgcttttcctagtttcttaaggtgggagcttagatttgggacttttttctaatgaagtattaagtgctgtaagtctccctttaagctgtatcccatacaattttagctgtatcccataaaatttgttatatttttatttttattgagttccatgtattttttaaaaatttcccttaagacttcctctgacccatggattatttagaagtgtgttgtttaatttccaagtgtttggaaatattagtttttctccatgattcctatttttatttcattttggtagagaacacactctgggctgctctgcctgtggagtaaccattcttttattccttactttcttaataaacttgctttcactttactcggaaaaaaagaacacactctgtatgatctcagttcttctaactttgttgagatttgttttatggcccaaaatatggactgtcttggtgaatgttccatggacattttaaaataatgtgtgtctgttactgagtggagtattctataaatttataccctgccgattgatggtggtgttcagttctgtatccttagtgattttttttgtctagtagttgtattgttgtaagagggatgtttacttcttcagctaaaatagcagatttgtctgtttctccttttagttctatccatttcaatttcatgttattttgaagctctttgttatatacacatttaggattactatgtattcttgatgtatttgacccttctatcattgtgtaatgtcttttgttctggtcattttttgttttcagttctactttatctgatattaatacagccacgcctgctttcttttgatatctttttccatctgtttactttcatcctactatatcatataggtgtgtgggtatgtgtgttttctttttcttaagagacagggtcttgctctgtcacctaggttggagtgcagtggtgtgatcacagcttgctcaaggagtcctcctgactcagcctcctgagtagctgacactacaggcacatgccaccatgcccacccagctaatttttaaatttttttatagagttggggtcctgctacgttgccccgactgcttttgaactcctgggctcaaagattttgggatcatggaggacaggaggccagattagattgcagctccggacagagcagcatgtggaggcttgcattgtgagttttagctccagatcgactgcaagaacaaaccagcaatcctgagaggacccacagaccctctgaaggaagtggactgctttgcaggacccgggagatttccacccaccctggcccccaaatactgtgagtgccccaactgcagaagtgggaaagggagaccctcctctcccaaacacacacccccgctggagaagctgaaggtctgtttgcgggagaagtttctgactttacctggagctgagtcaagttagttgagccaagcgaaatacaggggtagaggaagcagcagaaaggccctgggagcttgctgggtccccaagcagcccattcctgcctggcatcacagggatccatcaggaggttggctagaggagcaggggggtaaaactccacagggagaaggaattctctagctgaattttgtagcaatttgaatgagaagcctcctagtcagaactcaggggaggacttgaatccatctgcggcttgtagacttcacagttagggaaagaactaaagtccttttctttcacagctgggaggcggaaagcctcaggcaagttttcaagctccttttgcgcttcacctggaaacagacttggggctgttgcagggggcaaggtgggagtgagactgacccttcagttttcatgggagctgggtgagacctgtgactgctggctttcccccacttcgctgacaacctggatgactcagcagaggcagccataatcctcctagatacacaactccagtgacctgggaatctcactcctgtcccccacagcagccacagcaagacccacccaagaagagtctgagctcagacccacctagccctgcctccacctgatggtccttccctacccaccctgatagtgtaaaacaaagggtgaggtgtataatcttgggagttctagggccctgtctactgcaggtccctctccacactactacagctgatgctttctggaaagcaccactcctggcaggaggccaaccagcacaaaaatagagcgttaaaccatcaaagctaagaatttcacggagtccattgcaccctccgccacctctaccagaactggcactggtatccatggctgatcacagaactttgttcagacaagcctcagtaccaagcctggagctgggtagactcgctgggtggctagacccagaagagagacaacaatcactgcagttcggctcacaggaagccacatccatgggaaaagggggagagtactgcatcaagggaacaccctgtgggacagaaaaatctgaacaacagccttcagccctagacctttcttctgaccgaggctacccaaatgagaaggaaccagaaaaccaaccctggtaatatgacaaaactaggcctgtcagcatcccgcaaaaatcacactagtttaccagcagtggatccaaaccaagaagaaatccctgatttacctgaaaaagagttcaggaggttaattcttaagctaatcagggaaggaccagataaaggtgaagcccaatgcaaggaaatccaaaaaatgaactcctgggctcaagtgatcttcctggctcagcctcccaagtagctgggattccaggtgcacactatcgcacccagctaaatgtcttctaattgttgtgcttggaccttttatatttaatgtaatatttgtatataagggcataagtctgctactttacttttgctttctgttgttccctctgttttttgttgtccattttcatgcatttatgtggacctcttgaaaaatttttagaattccattttgattgttctgctggagttttgagtgtatctctttatatttgatttttggtggttgtactaggcattacattattcatacatagcttttcacagtatactgatgtcagcattttaccagtttgagtaacctgtagaaaaaccttagctccatttaggtccttttatcttccctctctgtagtattgtcttaaatactttttctgcatacattagcaaccacataagacagtgttttattttttgtgttaaatgtgtaacaatttttaaaactcgaggagaatagtgttatatgtttccatatttttacacttcccattcttcacggtgtttcaaaacttctgatttcctttgtgtttgaagaactttagttattcttttaggacagatcttgtggtgacaggtttgtttgttttttttgttatccttcatctgagaagatcttgattttacctttattcctttaggatttttcacagattatctatataactctgggtgacagatcttttctttcacctcttggaaatgttgtgccacagctcctattggcttccatggtgtccaataagaagtccactgtcactgtaatcatttttcttctatcgatattatgtcatttctttctacctgctttcaagattgttttgtctttagttttctggggtttgattctggtgtgtgttgtttttttttttttttaattttttttttattgataattcttgggtgtttctcacagagggggatttggcagggtcatgggacaatagtggagggaaggtcagcagataaacaagtgaacagaggtctctggttttcctaggcagaggaaacactgccttccgcagtgtttgtgtccctgattacttgagattagggagtggtgatgactcttaccgagcatgctgccttcaagcatctgtttaacaaagcacatcttgcactgcccttaatccatttaaccctgagtggacacagcacatgtttcagagagcacagggttgggggtaaggtcacagatcaacaggatcccaaggcagaagaatttttcttagtacagagcaaaatgaaaattctcccatgtctactactttctacacagacacggcaaccatccgatttctcaatcttttccccacctttcccgcctttctattccacaaagccgccattgtcatcctggcccgttctcaatgagctgttgggcacacctcccagacagggtggtggccgggcagaagggctcttcacttcccagtaggggcggccgggcagaggcgcccctcacctcccggacggggcggctggctgggcgggggggctgacccccccacctccctcccggacgaggcggctggccaggcggggggctgacccccccatctccctcccagacggggcggctggccaggcagggggctgacccccccccacctccctcccggacggggcggctggccaggcgggtggctgacccccccacctccctccctgatggggcggctggccgggcggggggctgaccccccacctccctcccggacggggcggctggctgggcagaggggctcctcacttcccagtaggggcggccgggcagaggcgcccctcacctcctggatggggcagctggccgggcgggggggctgaccccccccacctccctcccggacggggcggctggccgggcggggggctgacctccccacctccctcccggacggggcggctggccaggcagaggggctcctcacttcccagtgggggcggccgggcagaggcgcccctcacctcccagacggggcagctggccggtcgcggggctgacccccccacctccctcccggacggggcggctggccgggcagaggggctcctcacttcccagtaggggtggccgggcagaggcgcccctcacctcccagacggggcggctggccgggcggggggctgaccccccaacctccctcccgggcggggagctgacccccccacctccctcctggacggggtggctgccgggcggagaggctcctcacttcccagatggggtggctgccgggtggagaggctcctcacttctcagacggggcagctgccaggcggaggggctcctcacttctcagacggggtggttgccaggcacagggtctcttcacttctcagatggggcagccgggcagagacgctcctcacctcccagacggggtcgcggccgggcagaggcgctcctcacatcccagattgggcggcggggcagaggcgctccccacatctcagacgatgggcggccgggcagagacgctcctcacttcctagatgtgatggtggccgggaagaggcgctcctcactttccagactgggcagccaggcagaggggctcctcacatcccagacgatgggcggccaggcagagacactcctcacttcccagatggggtggtggccgggcagaggctccaatctcggcactttgggaggccaaggcaggcggctgggaggtgtaggttgtagcgagccgagatcacgccactgcactccagcctgggcactattgagcactgagtgaacgagactccgtctgcaatcctggcacctcgggaggctgaggctggcggatcactcgcggttaagggctggagaccggcccggccaacacagcgaaaccccgtctccaccaaaaccagtcaggcgtggtggcgcgtgcctgcaatcgcaggcactcggcaggctgaggcaggagaatcaggcagggaggttgcagtgagccgagatggcagcagtacagtccagcttcggctccgcatgagagggagaccgtggaaagagagggaaaccgtggggagagggagagggagagggagaggggagcgattctggtgtatcttaacttggatttctatcctgtttgggtttgctcagctgaatctataggtttgtgtataataccaaagtattttgtattagtggttacaacgcaaagttggatcgtgaagtcaattttgtggcttatgactagtattatgattggtttttaatagaatagaaaatgaaaatatatcccagaataacaaggataataattaattttttattttcataacatatatgtaggtgttttctgggatccaggatagtggtttgcagtcagaaacgttggaaaactattgattaagaccattcacaagattttgttttgtttgacaaaagaggctagttaacacccctgaatctgagactctgatgctaatgagcaaaaagtatttttttctccaaatcacctgggcttcatagtttgtttcttctaaccagttaaattgtttaaaaacttatgaatctaagtagaggttacactttgtataaactcaaaacagatggctttaggaacagtgtcactttctgcccctgatgttatatgtaataatcataagtagggaaggtatgcgaaggaaaaggaaagaaaatagcaaagaagaacaagatggtattttttctttctcttttagttctccagaatatggtagcatttattaaatgtctgcatactatgtaactcacactgtgctggatgctaggaatgcaaagaagaatgaaaaatgtccctgttctatgtaacagatcactaaagcttattcttctggtctagctgaaattttgtatcctttgatcgctatctctcttttccccatttatgtacctcctctaacttctggtaaccctcattctactctacttctatgagtttgacttttttagattccacatacaagtaaaatcatgtgtctttctgtgcctgacttttttcacttagcgtagtatcttccattttttcacttagtgtaatatcttgcctatgttgtcgcaaatgacaggatttccttctttttaaggcagaatggtattccattgtgtatattttattagattgtctttatccattcatctgatgatggacacctaggttgcctccatatcttcgctactgtgactgtaataaataataatgcattatatatttcagaattactaaaggtagattttaaatatttttacaattaaaaaagtatgtgagttggatttgttaattagcttggtcattccatatagtaaaaacataccaaaacacctcattgtaccccataaatatataatatatacaattaatatgtgtccattaaaataataaaattaaaaaataaaaaaatttccttgcattcaagtagctcagaatcaaaggtaagcaaataatctcagtgctttataaataagtgccttataaaaataggtccttgtttctatgggagcacataagcagggatgatgagtaagaatggcaaatgggcaagaggctgaggctgtggaatatttcacctaagaggtgaagttcagcctccatcttgaggggaggagtcagggattgccaggcatattacaaaggaattgatttaggggacagagccctagctgcattttattaagctctatatctgttaaccatgtggtttccttatctagattttcacaacacattaaaagagctttccatgatcctggcaatccttttgtacctctaggtagctgtctctcccatttgccaagaagttatttcaaaccccattctctctaagcctctttaacttttcctattccaggtgtccatcgctgtataataaaccacccaagacttagtggtgtaatgcagtgatcattttattatgcttacaggttctgtgtgtcaggaattcagatggggcatgctgctgctccacagtgtctggggcctcagctgggcaaactgaaatgactgagggagatgtgaatggccaggaactggaatcctctggagccatctttacttacatgtctggtgcctggatggtgatgactttgaaagctgggctcagctgggactggtgacggaactattttttgtagcctccaagtggcttgggcttctcacaacagggccattgggctccaagagggggtgcctggaaagccagtattctattctaagagaatcaggcaggagctgcttggcctttctgacctaacctcagctgttgttcactgtcacttccactgcattttgttggttataaatgaatctctaaggccagcccagatttaaggggaggggagttagaatatctcctggtggcaaggtcactatgtagaagaacacgtggtatggcagataccatagtggtcgttttgggaaatatagtcagccacactctctcccagttttcaaattcataaatcttgattcttgctgaatattgccacttgaatatcccacagttacttaaaatgaaacatgaccattaactcttcttcactcctacccctccagctctacccctgcacattgagaaaatggcattgtggctaagtacgtctattatccagttatgcaagccaaaaccccttttcttcctaacatgtccctgccttactaggttaatgagattgttccattcttcttccttgtccgtggaatttacatttactcatccctgttgtcaccagcttttcttagaacagtgcttgcacacacacagtttgagacagatcacagaaatactgaacttttgttttgcagtcacattccattcttcagacttggctcaaagctacttgtgattaattggtggctggtttgattctctttctagatgattttcctttgtgagtttattcatttaaaaggaggaggcaagcaggaaagaagcacaaaaagatgaattccataagtatttttgaatactagcggcattatggtaattgatatatagactcccagagttactgctttgaaggagacaatgctttggatgtgtaggttctcatgtgtttattaaaaactatccatttgtggctgggcgtggtggctcacgcctgtaatcccagcactttgggaggccagggcaggtggatcacctgtggtcaggagttcgagaccagcctggccaacatggtgaaacctcgtctctactaaaaatacaaaaattagctgtgcttggtggcgggcaccccgtagtcccagctactcaggaggctgaggcaggagaattgcttgaacccaggaagaggaggttgcagcaagctgagatcgcaccactgcacttcagcctgggcaacagagtgagactctgtctgaaaaaaaggaaagcaaaacaaacaaacaaaactatccatttgctttcgagagctttccttaaattaccacttcagtttgcattgagtagctgctgttactttgtaaactatactatatataagacaaaattgatgtaatgagaggtaaatacaaataattcatagtgtacagataatagaatttgttgaatccatataaatattattttgcgggttgtatttgtactgtcagtggaaaaagcagctaaacaagttgatagtaaaaataatattatgaggggagatgtttaatatacttaggagatcaggtataactcgcatatactcagtttaaaaaaaaagtctttcctgtttattaaatgtgtcctgtgccttataaacagtgttgatttggctagaaaatattacatagaaattccataaataagcaattgttaagttttaaattgtacaccattcttagtagcatgatgaaatcttgccctgtcccacccaggatgtgaatctttgtccagtgtctccatgctctataagctaccttcccatttagtcacatagtagccatctcagttatcacaactgactgttgtagtagggcatgcttgtgttcaagtcactcttattttacttaatacccccaaagcacaagagtggtgatgctggcaattcagatacgccaaagagaagcttgtgaagtgcttcctttaggtgaaaaggtgaaagttctcaacttaagaaaaaacaatcatatgctgaggttactaagatttgtagtaagaaagaatcttctgtctgtgaaattatgaagaaggaaaaataaattcttgctagttttgctgtcgaacttcaaactgaaaattacggccatagtatatgataagtacttagttaagatgaaaaaggcattaaatttgtcatgaaagacatgaacagaaatatgttctagttgacagaaatcaagtttgatttaatctgaggtttcaggcatccgctgaggtcttggaatatatcccctgcagataaggggggaatgtaatcctgataattgtagaatgatatttttcacttcatttgcaccagttattacaagtttgcttaaatatagcacaatgtattgggtaatacactagtttaagactagaaaaacaaggccgggcgcggtggctcacacctgtaatcccagcactttgggaggctgaggcgggctgatcacctaaggtcaggagttcaagaccagcctgaccaacatggagaaaccccgtctctactaaaaatacaaaattaactaggtgtggtggcgcatgcctgtaatcccagctactcaggaggatgaggcaggagaatcgcttgaacccgagcaacaagagcaagctttatctcacaaaaacaaacaaaaacaactagagaaacaagtttctggatcaccgcctatcagttatctgaccttagaactggccattatttattctgatccttagtttccctatcaagttgattgcagatgttcagctgtaaaaactgttcttccactcgtgggctgcacaaaaacttatggtaggcttctgttcacccatgttttagaatataaggaacctttattatctagtagttagtgaagttagagttgtttctcatgctcacagttatttagtgatatttggtatcaaaacacagtgctctttaaaatgtttcatttcctctgatattcctagttagcgtataatttacttaactagaatatcctattctgtaattattttacaaatgggaattcaccttataacaaaaactgccagctcctcttcttcccctgccttgccttttttcctgccttactggtttgtagtagtatctcagcctcttaaataatgataatttttttaaatgaagaatacttaaattattttatgatgatttaggtcagtcaacacagcatttcctccttatccatacatttattttattttatttatttttgacacagagtctcattctgtcacccaggctggagcgcagtggcgcaatctcagctcactgcagcttccgcttcctgggttcaagcgattcctgtgcctcagcctcccaagtagctgggactacaggcatgcaccgccatgcccggctaatatttgtatttcatggggtttcaccatgttggccaggctggtctcaaattcctgacctcaagtgatcgatgtgcctcggcttcccaaggtgctgggattataggtgtgagccactgcgcccagcccacacatatattttcaagtgataaagattatttttgattgtatctgttggtgagccgtgcaattttagtaactgatatacagatcttaaatatcattgtgaacctttattaaagtggtattttaaatagctgcagataatatttttatactatctgccttctagttctaccagtaataaaatggaaaggggtttggttcacagaaaactaaactgaaatactgaacatcagatgcctggcacacagtaggcaatgagtaaatttgtatgtattgtatgaataagttgtatggattgtgcgaatgaattgtagaaattgtatagcaaggtgatttgtcaaagtcgctttttaaagggtttaatacagtatctggtacgtgaaagatgctcagttagtgatagtgttaaaaatgtataggccagtagttgtttatcataccccaatttagcacagtttgttcagtttctcagatacacctatatggtagaacggttaataaaccagaatctgtagttagattacctaatattgaaacctgattagccatacgtccaagccatgcagcctttggacaagttgttcaacctctcttcctcaattttccagtctttaaaatgaagatataatagtacacacctcataggattgttgtcaaacataaatacattagttgcatgtaaagtgtaatagtctatgtaaagtttagtatatgtaaagtgtagtagtacttggcacacatttgaataccttttttccaaatttcaggcagatttagtcaattagccagattccccaatatattaattaattattatttttttttttttttaagagatggagtctcactctgtcgctgaggctggagggtggtggtgtgattttggctcactgcaacctccgcctcccaggttcaagtgattctcctgcctcagccgtccgagtagctgtggttataggcgcgcaccaccagcacgcctggctaatttttgtgtttttagtagagacgatgtttcaccacgttggccagactggtctggaagtcctgacctcaggtgatccgcccaccttggcctccccaagtgctgggattacaggcatgagccactgtgctcagccaattaaatttaagggtcttctattacgggtaggatttgtctaatttatctgataccttatagtataaatagtgaaagggaaaatttcccattaaattgagcatgtgtattttatagggccttgtatagtcataaatagaaaaatgagttaaatatcaatgcacaaacatatttaagaagttatagttctggtctgataatctccctggggtaatcacaaggttggtgcattgaggtgtttttcctcctgtccccaaacatctgccgtacattttgtgacttcattatagcatacacattattctgttgtgattttttttttttggtgggaggacagggtcttgttcttgtgcccaggctggattgtagtggagtctagtggttatagctcactgtaacctttaactcttgggctcaagggaccctcccacctcaaccccctgccccacatagctaggactgtaggcatacaccaccatgcccaagctgatttaaattttttttttttttttttttttttaagagatggggtctttgttgcccaggctgatctcagactccttgcctcaagtgatcctcctgcgttggcctcccaaagcactaggattacaggcgtgagccactgaacttggccctgttcttaatattaatgcttctgcttaatgtaactagttacttgacgaaaaaggaaatgctttgagaaaaggaaatgcgttgggaattaataatctgtaacttcacctatccttatgtttgttaatgtacctattcatatagttttatgttatttgtgtaaattaaaaaatttagatgaaacaattttagcatctaatttttattaaatttgcattctttccaactttttgtagaagttccaaatgagtttatagaacttaagaaattactcagtctttctgctgtccagttttctaatgtatgcttctttttttttcccctcagaggaaataaaagcggaaactgaaaaacagaggtttgtgggatttcttttctttagtaaaaataattttcaaacttgtcagtcttggtcaaaataatatagtcatctgtattttagtgtggcaaattctctgcatgtgagttttatagtaaaatcaactttaaaaataggttttaagaaatacaattatataaaaacaataaatacaattatatttcttaaaacctatttttatatatatttataaaaatgtatgcatatatttttttggagacagggtctcgctctgttgtccaggctggagtgcggtggtgtgatcacagctcactgcaacttctgcttcccaggctcaagtgatccttccacctcagcctgccgagtacctgggactacaggcgagcaccaccatgcctgtctaattttttgtagagatgggattctgccatatttcccaggctggtctcgaactcctgaactcaagtgacccacgcacctcggcttcccaaagtgctgggattacaggcatgagccaccagactctgctctaagcatacttaaaaatacaaaaagattctcatataaataagtatataaagatacttctgaaataccataagataggcttcagagtcttttcttaaagactttgattcatatttggaaaaattactaggttttttgatagtgttggcatttttaggacaatattgaataactaaaaaaactcactttgacttaaggacaaatagaaaggccattgctttttaaggtattatgataccaaatttgttaagtgacaataaaatatttctgtaatagaagcaacttgaattttacagtttttgtagaccagttttgcagacaagatttcagcgtcttgtggttagtcacagctctggccactagcttttgactatgtggcaaaccacttcacttctctgggcttgggtttcctctcgaaatatgggaagatagaggactggtttagcaagattccttttagaactgaaattctgtgtttctacatgggtttattatcaatattataaatgtgatacgctataatcagacttttctttctcatttagtcctcctcatggagaagcaaaagctggatcaagcacccttccaccagtgaaatcaaagacaaattttattgaagcagacaagtacttcttgccttttgagttggcatgccagtccaaatgtcctcgcatagttagtacatctctagattgcttacaggtatgtctaaaatggcactttctaaaaactgtgtactttgaatgtgtttctaaaacattactcacattgatgattcagacatttccatgaaagctttgaatactcttttttgtggtaaaaaatccaagtgattttttatatttaagacagataataatagttgcaaaaagatatttctagtttaatactaacaatcattaacttagtgggatataaaatctttactaagtttatcaataatgaaaagtgttgatttggtctcttctcatcagtgaaatgcaagacctgtaatacttttaacctgctgccgactttacatacatcaccatttgcaaataatttttctaagtgtctgctgttttttttttttttaattttttgagacgaagtcttgctctgttgcctgggctggagtgcagtggcgtaatcttggctcactgtgacctctgccccctgtgttcaagcaattctcctgccccagacttctgagtagttgggaatacaggtgtgtgtaaccatgcccagctaatttttgtattttttttttttttttttttttgaagagacaagagtttcaccatgttggccaggctggtcttgaactcctgacctcaagtgatctgcctgcccgtcttggcctcccaaagtactgggattacaggcgtgagccactgtgcctggccagtgtctgttttatatgaagcaataggttaatattggcagcttaatataatttaatatttaactgctatactttagcgatggcagtcatttatgtcagaaaaatttctgaactctgttaccctgtttgacacatatacagaggatcttcatagatattatatttgtaagacaagtttctaagtagaggaatacttctcttttcagatgttctcactatttgggaattatatgtattcaactataattcagtagctaggaaaagaccatattatttgtccttaaggataggttaaagataagttcatctgaattgtgatcttgttttcactggaaaattagaatgataatatgtaaagccttccttccagggtatactgataatgatgaatgaacaaatctatgatttatctcagctagtatatggaaactgggttttatacatattgatgaatcatttggaaagagattgggggtcatataaaagcatgaagataattttcacaaaagcagtatcaataaaaccttgtttatgtggaaagcaataagcaattttttttttgtttttttttgtgacaaggtctcactgtcacctacgttggagtgcagtggcgcaggcttggcttactgcaacctccacctcccaaggctcaagcagtcctctcacctcagcctcctgagtagctgggactataggcatgtaccaccacacccagctaattttttattttttgtagagatgggctttccctgtgttgccagctggcctcgaactcctaagctcaagcagtccacccaatgtggactgacaatgtgggaggcaagcaggcctcccaaagtgctgggattacaggcatgagccactgcgcccagcacagtaagcaattctaactcatcagagacaggttctccaaggcctgactttctcaaaatattacctgatggttttattgtggttattgttctgtttttgtgattattacaagtataaataactttgcatatttgaataaagtttctacagaaaaagttggtatagctttggctttgataatacctttatgtttttgtgtaaaaattttatgtatattcaattgtatactgtaattttaatgtatattgcattagtatgtataatatttgttaccttacttaggatctttgttttctttctccattttagaaacttattgcttatgggcacttgactggcaatgctccagatagtacaacaccaggcaaaaaattaattgatagaattattgaaacaatatgtggctgctttcagggccctcagacagatgaaggagttcagctgcagataataaaggtaattattatataaagtaaaattgttattaataatctgtatcttcaaaattcagatgcctttcaccttaaaacattaggaaagatcattttatgtgcattccagctataatacaggttattcgaggccgggctcagtggctcatgcctgtaatcccagcactttgggaggccaagttgggcggatcacttgaggtcaggagtttgagagcagcctggccaacatggtgaaacccccatctctactaaaaatactctactaaaaataccaaaaaaattagctgggcatgatggtgggcacctgtagttccagccactcaggaggctgaggcaggagaatcacttgaacctgggaggcggaggttgcagtgagccaagaccatgccactgtgctccagcctgggtgacagagtgaaactcagtctcaagaaaaaaacgaagaggtcatttggatgctttctagactccatattaggggattttaatgttgtatgccaagagtttgttagaggaaaagtatgttctcatatctcttcttttgaaggtctcagtttagacttagtccctagagtcttccaaagtttttctgtttctggcatgtttttcatatgtatatatatattgcatccatcaaactttagggtagttcttaaagctgtgacccctctagtttcttctgtactgttggacctttcatagcttgtcctctcaactcacaaattaccaggtggacactacttatccgccaattctcctgatatcgttgcacccatccatctatagaacttgctcagcaaaaccctgttctgagtttgtgctgtaacgtacttgtttgattgaattcctttggagaaaaattagtaatgttttcattctgttacagatactgagttcttaatgttattgctaatggtagtggtggtatatttttatagcagtaaaattttcatgtgctatatatagtacagtacttttgaaattgtttttacgtgtatatatgaagtgttctttcatgtgtgaatacaacccttttggagcctttcagttttatagttgtgtttacttcagaagccatacaatatctttattctaaaaaaaaaaaaatactgggcatggtagctcatgcctgtaatcccagcactttgggaggccaaggcaagaaggttgcttgatcccagaagttcgagaccagcctgggcaacacagcaagaccctgtctctacaaaaaataatttaaaaattagccagatgtggtgatgtgtgcctgtggtcccagctactcaggaggctgaggtgggaggattacttgagcccaggaattgaggctgcagtgagccatgttcactgcactgcacttcaggcttggcaacagagtgagatcctgtctcaaaaaagaaaaaaaaaaaaaacgggttgatcattttgacctatcatgtatagtttcatgtcatttatggtttaagataatgcccattaatgctgaccctgcatagcattgtacaacataaagaagacaaaagataagagtctttgctcttgagaaattggaagtaacccaatatgtgaaaattcacataggttaaatttgttcattttattgaaatatttgccttaggaatttgttttttaatttgggacagtctcactctgttgcccaggctaagtgctgtggcatgatcacagctcactggagtcttgacctccctgactcaaatgatcctcccacctcagccttccaagtagctggggccacaggtatatggcacttacgcccagctactttgggattattttaaatgctttattctaaaacatttataaacctcttcaacaataacaacaacagcacagctattgagttcagtgtgttaaaaaaagatctcagaaaaatttagaggcaaataagacacagtgtgtatcttcccaagttgatggtctagttcaacagatatctcatgtgacgtatctgtgctctgctgtaacagctttcatgctgtgcattttagtaagttaaatagtattttcattaaaatgaaaccttggttgaaacaaatcagttaaatggttttcagattatgtggaaattactgccgcagtgaggaaaacatcaaatattttaacagttgatgatatattcaaggccagtagaaattctgtgtatactacccgcaagtggtaattgtttctgaaagttttaattgtaatatgaaaatgcttaatttttgtgctgaaactctagatgcagaaaatcactttaaggctgggtgtggtggctcatgcctgtaacccccgcactttgggaggctgaggtgggaggcttgcatgaagccaggagtgagaccagtctgggcaacaaagagagactgcatctctacagaaaaataaaacaaaattagccgggtgtggtggtgctcacctgtagtcccagctactcaggaggctgctgcgagaggatcacttaagtccaggagttcaaggctgcagtgaactatgatcacactactgcactccagcctgggtgacagagcgagaaagactgtctccaaaaaaaaaaagaaaaagaaaatctctttaactttttcctttttttttcttaaaggctttacttactgcagtaacatcacaacacatagaaattcatgaagggactgtactgcaagctgtgagaacatgttacaatatctacttagcaagcaaaaatctcatcaatcagacaacagccaaagctactctcactcagatgctaaatgttatctttgcacgcatggaaaaccaagcagtaagtattttaagaagagagaggttgtatagaacacaacaggcattaaacatagaaaggagtttacagtaattagagtgaaatctttgtacctgtagaaaagaatgtcttttatttacatttccacttactggagatttgtgggattgtgttttattttgttttgttttaaggtttaccgacttaactttggacaaagtatttttagttgttcacaaatagtatgtgaaatatgctgattgccatcttccttgtggaagtacttatgaattaatacttttattgcattcaaacttagtagagtgtaatgtagctataaaatacttaatctaatctgaaataaaattattcattaagccttaaaaaagtatatttccatattgatgaaatacgttttttcccctgtatgataaaggggcatgatattccttatactttgaactgcttcaggttgattgttaagagatcagcaactagagaattgtttttaaatgcataagtcttcactattaaaaatcaacatcaagcttcttattttgaactctttttaaacgtagagaaaagttgcaaaaatttttcagagcaatcccttttacccttcaccctggttcccttaatgcagttaacttacatacctacatagtacaattatcaaaagcagaattaacactggtacaatactgttaactaaaccacagaccctgcttgaatttcaccaattttcccactaatgttttaagatttgacccaggatcccacattgtgttcagtatgcatttagttcttatgtcttagtcttctccagtctgtgacagttcctcaacttttccttatctttttcatgatcttgctatttttaaaaggatactaataatttattttgttgaattttcctcagtttactttttgtgatgttttctcgtgattagaatgaggttgtgcattttttgccagaatatctctgagacaatgttgtgtccttttcagtgcattttgtcaggacttcatgatgttgatataccttaatgttggtgatgttaaccttgatcacttggttaaggtagttatctgtcaggttcctccactatgaagttagtagtttttcttttgcaattaataaatatctttggggagatattttaagacagtgcaaatactgtttctcttcagatcctcccctcacttgctcagttttaatatctgtcagtggatcttgttggcaacagttaattattgtggcgtttccctaatgattttcctgtttctctcttctgtatttattaattgaatttctcctcccttaatttatttatttatatcaatctgtaatcacagatatttattttattttatggttgtaatgtgtgctacagttacttattttgttgcccaaattattacacttttggccctgtgtccttgtgaccagctcccatccttttttgagtacttccatgctttctggattctcaagattttccaggctcattttgaattttcccagcttcagccttggaatcaaccacttcaataaggagctgtagctcttttgattggagaatggtatttagaaaccaaaatctgagtgctagttgtattcattgtcactctgtgttattgcttctaggcctctcagcagatagagttaggaaatatatgtttatatactatcccttccgtcccactcaattcctacacctgtatgtgactttccatatgtaggtaataaaaccatgtgttcatactgatatttctgattccagtgcaacaatacagggttcatttcagtcttctccctttatatgtaaacttctttctctaaacaatgagaaatatggcttttgtattctaaatacattgattgttcaatcctattatacccattagttttagaattgctaatcattaccagtgtgagaaacaaatttactaagtagattatagcatttatattcaggtttttttgtctttagccttatccattcaaaatattattttctagttacttagattagttcctttcttccccacactctgcaatagggtaatgctattcctttgtgataatagttagactcatttgttactctctgcttttcatttttggtattcgtcacatcctggttagttttaattacagtcatccctcagtattcatgggggattggttccagggccctcccatggataccaaaatctgtggatactcaagtctgttttataaaatggtgtaatatttgcatataagctacacacatcctctgtatactttaaatcatctctacattacttataatacctaatactttgtaaatagttgttatactgtattgtttagggaataacgaccaaaaaaaaaagttgtctgtacatgtttgttcagtacagacacagctattctttccccccgccatcagtattttcaatccctgtttggttgaatccactgatgtagaacccatggatacacagagggcgaactgtacttatttattttttaggtatgtaaaacattactgcgatttaagagtcagagctgtacaaaaggtctactcagaaaagtaccaattcctactaattcctaccactgcattcctcttcttcccttctttccaccccttgaatgtaagacggaagccacatgtctaccttataatcagaagcggtcacaccggtacattgtggaaagggactacacaagggagtgaaaattgagaggtggacatcattggtgaccatcttgaagactagctaccacatatgctatacattctcttttgtattttgctcttatcattgagcagtatgtcctagaaagcatttcatatcagtccttaaagaccttcctcattcttttttatagatgatagtactttaggatatagcctattatctattaagtcactctcctctgtagtggcattaatttatttctaatattttgcagccacaaacagtggttttgctgcttttttttgaggacataaaatatttttgtcactttttaataacaaagttttattggtttgatttgattaacagactttttattaagttccttatatgttcctggcactgtgctaggcctcacttatacagtgacgagcaaaaccgacttgactattacctttgaagatcttaggaacatttgaggcaaagagtttcccttaaacaactgcagaactgaattatgataaaggctatgaacatgtattgtgttacaaaggatatttagttctgtgctatggataattatagaaaaggtggaaaagagggagagaaaataaggggaaatgggatacagacgacttaacttccacatttgctaaaatcttctaagccagatgttgaattctttgatattagctactggtaaccttaattttccccttcccccacaaaataaaactccttacaaagcaaatcttgtcagactttattattaaaatcctttaattcaagcttattttataaattcgtgtaattctggcatttccacctaacctggaatattactggagaatatgaaatgttcatatttactactgtataagatttatcttggtggaaattaattctgtgagactcattcttatcaggtcttgaggaccaaaagagatgtgtgaaagcaataaagtgctaaaaaatgaaatcttgtgatcccagttaatgtttctaacattttgtgagccagttttacagatagtattatatacataataatgacagtttttctaaaataaaattcagacatttgtagatatagtttttttcataattattagatggctaggcagagtgatttaagccttcattgtaattctattaaatgtaattttaatttttttattaaaagatatttgacaaggtgacataagaacatgctccagaaggataaacactgaaaagttgcctcccactcttgttttccattttatttcctaatctctaccctctataggtaattgttagtactagcttcttatgtatttttatagactttctgtatgtataagcaaaagtgaatgtgtgtgcgtgtgtttcatccacacaaacaccaaatacagtgaaaatgctatatagtgaaagtctttcatctctgttcttatgtgccaatttccagccacctaagaagtaaacattgttcattgtttttagtatagtttatgttctccatttctgataaactttaatttccaagcgtagagagaatggcaccttatagaaaggattgttggaggtaacattatccttccaaattttaaacaacttattttactaatattggaaattttatttatttccagttacaggaagcaaaacaaatggaaaaagaaaggcatcggcagcatcatcatctgttacagtctccagtaagccatcacgagcctgaatcacctcaacttagatatttgccacctcagactgttgatcatatatcccaagaacacgaaggggaccttgacctccatacaaatgatgtagataaaagtcttcaggatgacacagagcctgaaaatggatctgatatttccagtgcagaaaatgaacagactgaagctgatcaggcaactgcagctgaaagtaatcttcttgaaaagggggtttggggtgtgtgttaagggaaatgtgtaggaatgagagttttgatgaagaaatgttgaaaggataatatgatttaataagtgtgtcagacacattgtggtaattgtggactttcctcattgtaggtggtaaaattaatttgactctaacctacaagatatctatgaatgatactttgcatttattagcatctcatgagcagtatgatttatagatttcctttggagcgcagatatatttctaaagagggtcataaatgtccgttaaatgttatataggaatttcagttttcttaagattggtttcatagcaaacaagtgacctagtaaggttttctggaatatgactgaaaattttaaaaaatcattaccagttttaaaaatatgattatggtaaaaaaaaaaaaaaagtactgaaattaaatataaaaacaaagtttttgagtaaccaactgacagaaattttcattttttaaaatcatgatgcatagtaatcactaaaattgagatgttctctgattttttaagtgtatattataagaaaacgcttataagattataaaaattatatttattttacaaatttgtttctctgtaaaaataatcccatgaagttatttttttcctaaatgttattttcagctttagctgttctgtgaaactaccagggagttggtggtgttctccctttgcccttccttagcttgatgtcatttttaaatgatgagaattctgttgcctctccagtgtggttgtctagaactagcatgttaggagtcagttacagttcatctgaagtctgtgtttttacttcactttgaggaaggatttctgtaatatgttttcagctcttgatttttttttttttaaaccatgccttttccaaaacttagtagtggcatgaatacgtgcctttttacattttccccccagctttctgagaggcatgcttttaaaaacagtactttactatttgttttaaaaaggatgacttcgataagctaagcattcatagtactgaagctaatagtgaatccataccacttaaatgatttacatttgtctagcctgcccttgccaaaatttcccccactttcactgtgagcttataatgggcagattcaaagggctaatctctaataaagctgggactttatttatttttttgtttatatatctatgcatttagcaaaccttcattgagcatactgtgtcttaggcaccatgctaggacttgaggttaaaaagatgatggagatacagccactgcttttagtgtgatcttagcatacttggaagtcaagtgagcataaataaggtataatatgtgataggtgtcctaaaaatgccatgcacaaagtaattctgctgagaagagttaggaaatttctttgtagagaaagtggtgatattttagttgaatcttgatagataggggtaggaaatttccaatcaaggaaacaacatggactaagacccaagaaatgggagcatctgctgtgtgtgaggtaccttaggggtaggaaattttccaaccaaggaaacaacatggactaagacccaaggaatggaagcatctgccgtgtgtgaggtaccgctgtagaagccttgtagaatatagagttagaaagacatagtttcctgtgggattgtgatgattattttggctctaaagatgtttttctcccaatagctgatataaatgaaaattctgtttgacagccattggttcagagtgcatttttggagcacacctctgtcacttaccagctgcgtgactttggacataatagttaacttctctaagcatttcctacatgtaataaatattagtcattgttattctgttctgtttctttcagatacttatgtgaaaattgacccttcactagtcatttcgtacacttttagatagtggttatgtatattaagttactttgaaactctagttttcagacttgaggtaattttagccaactagagcatggaaataaaacacttaagaatggcagaaaaattatctttcaagacatttatgtttttattcacagaagactctaaatgctatttttatttggatattttataaaataaggttgctcatttacatgcatatttatctggttttctcttgtggcattcagtatttttgggatactacagacagtaaattagtaaaagtgaaattatagggaggacaggcacctagaagccactattataagtagtggtcctttttttgtccttttttcctttttttttttttttttttttttttttggatacagagtcttgctctgtcaccctgactagagtgcaattacacaatcatgggtcattgcctgcctcccaggcgcaagcgatccttccatcttagcctcccaagtaactaagactataggcaggtgtcaccatacccagctaatatttaaattttttgtagcaactgggtctcactgtgttgcccaggctggtcttgaactcctgggctcaagtgatcctcccacccagcttcccaaagtgctgggattacaggtgtgaccccccctgtgctcagctgtagtggtcctttatagtagtgggaaggttcaaggagttgaaactgcagcaccatcagctaatatgctgtctgatgccctttggtgtagaacggtagctcaagacagcattttgaatcccagggcattctaaagtgatagttgagctgctttgacatattttcaacattttaaaaagcccagtggaattcctatttttctctgcaatagactgtgcaagctatccagaacatcagatttcatcagtttctcttaggctattcagaagttcgattggcagttatctgttgttggtgattttgttttttttttgttttttttgttttttacattaaattggacaatgaattcttttttagcttcttaaatttagttttacattagatatgtagattatgttggtgaaaaaataggaagggccagaaagtactggggaaggcccagatgcttcttcagggacctcaccatagagtaccatgttgatcttactattgatgagcctaagtaatcgaaacaagctttaattactttttttttttgagacgtcgtcttgctctgtcacccagggtggagtgcggtggtgcagtctcagctcattgcaacctctacctcccgagttcaagcagttctcctgcctcagcctcccgagtagctgggattacaggcgtgtgccaccgcgcctggctaatttttgtatttttagtagagatggggtttcaccatgttggccaggctggtctccaactccccacctcaggtgatccacccaccttggcctcccaagttgctgaaattacaggcatgagccactgcacccagcctacttacattcagtatatttgataagggatagtgtaatgtgtgtactaagtataagtaagcatctgtaggacatgttagaaatgtttcatttaaaatagtttttgaagttttggtacttaaaggactaatctagaaaattcagttaagtgtaataatgtaatagcttgtcaaaggaatcattgaaattgacttgaatttggaaaatatttaagttttggtatacattttgaaggtttagcatataattgcttctaatttcatgttatctatttgattttttttcttttattcctcatgatttaggagttttttcatcataaatgtttagtaaaaagcttccaaaaagttaaaataatgttctgttgaatttttcttcttttaaagcattatctaaaaatgaagtgttatatgacggagaaaaccatgattgtgaggaaaagccacaagacattgtacagaacattgtagaagaaatggtgaacattgttgttggaggtagtatacttcattcaaaattattttactctgtctatgggatttcatctgactgtggagactttgtaatgtctggaatagaaagggcaaaattaaaacgtttggagccaaccaatggaaagttacaaattccacatttaggattttggccttgattctagaacaaatgggttaatatggaagattttagcactgagaaatgaaatgaccagaactatgctttaagaagctaagtctggaaataagaattcccagtaggataccagcacagtattcaaagcctggataggacagaaaccgtctaaatggagacaaaaatatggataagtgatataatgtatattgaatcaagaagactttgtaactgattaagtaggtaaggaaaagagaataaagtgtgtcggaggccttcaagattaccccaaggtttggtgatttcactggaagccgtcacaggacccagcatatagttgtactcactgcatgatttattagtgaaaaagtacaaagcagaatcatcagtaggaagaggtatatggggtgaagcctggagaaaatcaggtacatgctccaaatgtcttctctcagtgaagtcatacagattctcttaattcaacttgtgaagtgtttaccagggaagctcattagagactcaggtcccaaggtttttactgggggctgttatgtaggcacctaccatgtacgaaaattccaggataccagaaggaaggttggtgttcagcataaattacactctttgtacagtttagacacagtgagtcacttttatcagttctgggaatagtgggatccctcccaaaatataagttcccaggtgccagccaaaggccagtcttgcaagtaggcctttctaaggataggcagtctctggcctgctatgttacctctttcctgcacaggtagtgtttcagtttttgagcctaaatggataggtggatggtggtgctattggtagagttgaatcatcttggaagataagtcacttgggaaaaaaggcacttatttacttttggtatactgaatttgaccttcaagttggccatctgtgtggaaatgattatgaaatacgtaatggaaaataaaactctggctcaagagttgccaaggcaggtgctatagatgggagtcattctgttaaaattaatagtgaagccatgagattaccaagtgggaaatggtagagagtgaagaaccgaccatgatttgaagagtatgaatttaaaatatatattaaaaaaataaaaaatagagaagaaaaaatagcagtacatgcccgtgcattctttaaacatataatagtatagttaaggagttggcacattacggcctgtgggccagattcaacccgctacctatttttgtatgtaaaataatactgtgacacagccatgcttatttgtttttatactgcctacagaggtctcctgttgtacttcataggtaaagttgaatagttccagtagagattgtacgacctctaaagcctaaaatgtttatcatctgaccctttataaaaaaaattcaccagcatctaacaatacagagtctgaagtgaaagttttcgtttttctgcaactttttacttaggaaaaacatcaaacctagagaaaagttcgaaaaaaggaacagtgaacacctgtgtgtcctttatctggattcactagtggttaacgattttgctatgtttactttatgtatctttaaataccatgcacataatgtatgtgtctttgctgaaccatttgaaaatcggttgtatacatcatgacatttctcccgtaaatacctcacagcatatatcttctccaataagagcattctcatacaataagcacaattccattttcatacctagggaaattaacacgatttcaagaatatctaatatacatatatttttcagtgttcccagttttcccaaaatgtgtcttatatccttttttttcttttctaaatccagaactcaacctgggtacactcgtatttgcttatctgtctctttggtttagaacaagtcctcttgatttttccccccaactttcatgacatttgcttttttgaagaatcttttgccttgtagaatatttcaaattttggatttattggatggtttctttaccatcctatatgagtagattgagattgtcatctacatgattagtttagattaaatatatttggcaaaaatactgcatggtgatattagtacttaataccacatcatataaattggtacataatgacaggttacccccgttggtggtagggttggatcatttggttaagatggtgattatcagctctctgtaaaggaacatttttcactttgtgattaatagccaatctgaggtgatactttgatacttggagatgatatgaaaatttattcacccagtgtttttttttgttttccccccaagataaggtcttgctctgtcacccaggctggggtatagtggtacagtcttggcttactgcaccctcggtctcttgggctcacgcagtcctcctgccttagtctcctgagtatctgagtctacagttacacaccaccacgcccggctagtttttgtatttttttgtagagatggggtcttgcttgtgttgtccaggctgggcttgaactggcctcaagtgatcctcccacctcagcctccctaattgctgggattacagatgtgaaccacacacctggcccactcaatggttttagcacccattgatgatccttgccttactcagatattgggttgcaatatagcaattttctaattcttaacattcattgacatttttctatagagaagagctctcccaccctgccccacccccccctttaaaaataataccatgggcttaatgaattcttttattatttgatgtgttataatcctgtatcatcattatttttatttttttgtctgccagtaggaatccgttcaagctaacacccacgttcttttgatgtgattctgttagtctttgagcttttcctttatgtttggaacagaaagatgttccaggttcaccttcaacttcccttttcctcagccctggaatcagctagttctccgaagagtctttgtcctttttagtgggcagttgttcttagaaaccaagaattggttacaagatgctcttgttgctagctgctgagatgtccttacttgcaggcccttccagtggatagagagggaaacatacaattagtcttaagttcctatttgtagttctacttcacgtccaataccacaaggttgctcctcatctttctgtactttctatttgtatcttccgtttcctacattgaaaacccagatccccaacaagatgccattactaacagcaaacttataaagttcaagatttttctgtaattatatgtatccttaaatatatcctactaaagatgagtgagagtactgttttgaaaaagttacttgtattattttattggttcgtttttttaaatatgaagaatatttacatgattcaaagtcaaaattacataaaaggcttacttggagaactccatcagctccttccttctctgatcctccttctataggtaatcagtttcactagcttttagtttatctctgggggttagggggttgtgcgtacatgtctgcttgtacataagagatgtaagcaaaggcgttttttatttccctttctctcattttttgttagagtactgcatgtatgtgtgtgttgcattttttcacctaacatattagaaattattctatttcagttgatagagattttcttcttttctctcatggttttctgcataatactaccttatgcagatatatcatagtttattcagccagccccctgttgtacttacgttgtttccagtgttttgctgttacaaataatgctgcagtgaataactttgtacatctgtattgtttcatatttatggaagtttattttgagggcaaattcctagaaatgagattattgggtcaagtggtaaatgaatatgaatatctgttagctattgctaaattcctctttataggtgttgtgccattttgcactcttaccattaatgtatgagagtgcctttctctccacagctggtagtactaaaagattttgagtttttaccaacctgataggtgagaaatgtatctcagtttggttttaatgtgcatttctctatgagtgaaattaaacatcttttcatatctgtaggatcattagtatatcttttagtgagtcatttattcatgtcttctgttcatttttccatcagatttttatccttttccccttaagaatcctttatgtattaggattctgtgatatattttacagatactttctctcagtttatcattcgcccaagtcttttgatcttattatggtgtgttttgctgtacataattttttaaataatttttttcacacatgcctgcatatatattacatatgtttaagataaatgggaatatattgtacttacagtttgataatctgcctttttcacatattaaactatatccattcacatccatttgaatttcattatatcactgggccataatttatttaaataatctcctgttaatactagcatttagattattttcaggtttttgctttttataaacattggtgtgatatacattcttactatagacatctttttgcacttatcttttggctaaattataaagaaggaatagcttgatcaaggtgtatgaatattaaaaaatttgtatacagtgctataatgtcactgtaatgatggtatttattgtattgttttaatttgcatttggctatttccagggtcaaaatataggcaattatttttataggtcaaacattggccattttgtatattccaactaaatatcattggactacttatctttttttgaattactattcttgtcttttgcctattttttccttttctttcttttgttcttattttcaggagttcttcatactaagaaattattccttgttcagtgtattgtaaatattttttctactcagtctttgttttgtttgaacctttgcttatattattttctttttctttctttctttttttttttttgagatgaagtcttgctctatcatcgaggctggagtgcagtggcaagatcttggctcactgcaaactctgcctatcgggttcaagcagttcttcttcttcagcctcttgaggagctgggattacaggtgcacaccaccatgcccggctaatttttgtatttttttggtagagacggggttttaccatgttggccaggctggtcttgaactactgactttgtgatccacccgccttggcctcccaaagtgctgggattacaggcatgagccaccgcgcctggcctatatttttatttccgagcacatacttgaccacaaaaaaaatttttaagattatctttttatttgtggtttctgtttttgtcttgctgaaaatggattttaccaccctaagattataaaatacactaagatacctttttctaatattttgtttttattttttgactttagctctttaattcatctcagatttatttttctgtgtggtgtgaaattctatagctaattataagctatagaaataatcatttctcaattaatttgaaatgaaaactttatcctaaatggttctgttttttgagttttctgtacagttgtaatgagctatttgtctattcctaaccagtgttgaattatgtaaaatattttggctttatagtacattttgattttcatagtgcaaggcctccctcttcaattttttttagtttttaatttttgtattctatagtatcaatttttaaaatatctattaaatgtatgttgttaggtgaactttagaaccactttattaagttcaaaaattaaagcttacttagtaattgaaattgtaatgtgcttataaattaacttgggaagataatatcttctttgcaacagtatcgagtcttctcctccagaaacataaaaagttcatttagtcaagtcttttacgtcattcaggaaagttttattgttttcttcctttggctcatgcacattttttgttaaattatttctatatttttggtttagttttgataatattttggttgagtcctttcttctctattccctaatttaattggaatatagaaaaattcttgtttttccatatttatctcctatttggtcaccttctgaactcatattatttctaaaagtttttcatttggctattttttctaagtgaataatgatatttttatctttgtctcttcctttacagcatttataccttatttttgtttgtttctttttgttacattacattggctagaagctccagaaaatgttgaatagtgttaatgatggcaaggatattcatttttttttttaacattattgctatatttcaccattaaatttgatgattgcttttgtttttggaggatactctttatcaaattaagtaagttttcttgtttgattaaaagatgcttttatcttttgtatatacgtgactgtgtgtgcatgggtatgaattttacttttgtttttttaaatcaggagtagcagttgatttttttatgacttttcatcattttagaaagtttttttgttgttattgttaattcttcttcatcctttctgttcttttccacatctcacactatacagatgttgaatattctagatcatgtccttgattgctattgcagtcttctctaatttccatcattttgtcttagggttttacattcaacgagaatgttacaagggtttttccattttgcaaatattttttagtaatatccattctactgctttttccagtgtagtttttgtttcagtaatgtttttgtccccaagaaccccatttttctctgagcttttttttttttatagcactttgctcttgtgtattattgcaacattccttcgcttatcactgactatactaactggaactatcccagctgtgaaatctaattccccatttgctcagattgctgtcttttgtcttcacttttgagctgtaaactttatgtttttgcctatttgtagaaacagagactagatttgatcaatctactctcagtaattgtatatgttttttctatttcttgtgaggccttcctttccaaaattcatgaggtgtctgtggtccaaaggcagacctcatttctaagctgagatcaaagaagcaggtacctcccttgagcagggtatggctctagtggcccttgggctgtgtagccccttatcattcaccatgttgtcaacacaaaccaaagtcaagcttggggtgaatgctgtacactttttatatattctacactgaggaagatcttcacacttgttgatttgttctcactctcccaacccttgccagggaatcttaagctggcatcattcagtaatggctttaattggaaataattaagtagaaagagagtaggagcctagaaccttagttggttttccttctgtgtttattgcagcattcccagttagctgagatgctgctctctcctttcctggcctacttgttatgttaggagacctactaaacaaataatctactttaattagcaggcagtgatcaaatacagtctagatgatcatggctgtggtcagctctattgatagacattggcatggttccccaagctctttgatttgcatcttccctcttacctcatagcaccttgccattctaggctttgaagtcttttagaacccaagtggtaaaacaatcatatctctcaggttggcctattctttgcatgtgttcagtcataggcaataaattaaataggttttcctttgatttcaacctactttctaggattcctcaaagtttatgatccagtgatatgctccttagtttatcagcatcattaaaagtacatctcttgtttattttttttttgtaatttcagtgggatttgtcaaaggagaaagtaaattggtaggctcaattcaccaccttgaaagtagaagtttgcatctatgtttaaaggataattagaggagaaaacatgagacagttaataatactaactgtattaagtgcttcctgtatatctcaaatgattttatgtgcttgtatttattcatttactcttccctcaaacactgggatgtttaggtactattactatcccctctttacaaatgagaaaattgaaataatgagtgattattccttttgaagaagtgataaagtgaagatttcaagccacgggggtgtggcttcaaagtctaaaaagaaaatcaggaaatgttttcagtttctttgagaaatttcttgagatggaaaggaggaaagtaatatcaaataatattgagtattcatttgagagatttaataaaaagagggaagaaaatgaacacgagctgaggtgtagcaagaggtgaaggaagattttgtgtgtgtgtgtgaaaatatttgaatgtttattggataatggggaagatccagttgtgtgcacaaaattgaaaaaggaatgttaaaatacttagtggaggaagatactgttgaaggcaggaagagatgtatttttgtggtgctgcaagagacagggagcctgtgttaaattacctgatttttagctaagtagtaggtggaagtcatttgttaaggggaggtggggagagaatcataggaagagatgtaattgggtgcagagagaaaacgttttggaataagtactctggggaatgagataggaactcagtttctaataatcattgttagtttttttctgagtctttccacaatctttacatatgtaaattctttttttaaaaaaaattttttgtagcaatggtgtctcactatgttgcccaggctggtcttgagctcctgacctcaagtgatcctcccaccttggcctgccagagtgctggaattataggcatgagccaccgtgcctggcctatgcattttctacatatgtaatatataaaagctatagtggtatttagcacatcaaacattagcatattgaagctccaaaagtcctcttaagaaagcgtctgttttcagtgtaacagttttcataatgtattttattactgaatatatttttcatgttatacttattaatgcaaaacttgcttcggaattatccagtttttttgacctctcaggttcaagtgattctcctgcctcagcctcccgagtagctgggattataggcacccgccaccgtgcccagcttatttttgtatttttagtagagacgaggtttcaccatgttggccaggctagtctcgaactcctgacctcgtgatccacccgcctcggcctcccaaagtgctgggattacaggtgtgagccactgcacccagcctatccagtttaatctattccagggtgttctaatttggagaggagaaagcaacttctgggtaggggaaccagaagctgctactcctttcatattactcaagtcactcaaaagttggagacatgttatcaattagtaacaaaattagtaataactaccacttattgagtaccagttttattctttatgtcttgtatgtgtgttttggtggttcctcatagacctcattatttctgttactcatgaagaaacccaggcaaagaaatatgaaataatttaccccattaactggtgaagacatgattgaaacacaggtctttaatatttcagaatctatgttccttatagtacagcatgtgtctctcgtactatcttatagttttctttcaattggtagcatggaagagtttcattatacctagattagttctggaacttggtattattttcattatctctgtttgttctaccagaagtcacttgtttctgtttatattaattacaagtatgattactcaaagtgacctagtgaaaaattttcagtggtgtaggtcattatttccctggctgtgttccaaagaacataaattgttagagatattcataggaattctaaaaacgggaagggggcttatggtacaataaattttggaaacacaacatactgtatatccttggagagttttgtacatattagcaacttaaaggctacaataaagaaacctatttcccagcatttcctgaactaatttgacaatgagatattttttcgaggaatttgtcttcacatctcaagtcattagcattcatcaaaacccagttcagtaaatgctaatatagactaaaagtaagcttctgttttggcacatcctggttagcctttcatcagctaagtgtgtttcattgccagagcaacttaaggattgtatttggaagtatgccagatgcatacttatttagtagtaagtatgctaacctttaaatggtgccaatacatattttacttcacattgctttcctgccactgtttcattttaaatactctgtgctttttaaatacacttcggttaagtcagatatatttgcatggtttttattcttatcattttagatatgggagaagggactactataaatgcaagtgcagatggcaacattggaactatagaggatggtagtgacagtgaaaatattcaagcaaatggaattccaggaacaccaatttctgttgcatatacaccatccttacctgatgatagattgtcagtctcttccaatgatactcaggtataaatggaggggtggggagggggagaaatcctgttaatcttacaaatttataggctaccaccaccttgtcatgagtattttcagctgatgatgctgcctgatttttatttagtttggggaaataagaaacttggggttttttttccttcatttatataaattacagcgattttttccccttcatattttgatagttacatttccaactttaaggtaggtctcatctatgtttacatcttctccacacccatctaccaattgaattaacatttaataagaacattcttattacatattcacaagataattctggtatgggctgaatatttctaatctgaaattcaaaatgctccaaatccaaaactttttgagtgccaagatgacgctcagaggtcatacacaaaggaaatgctcattggagaattccacattttggattttgggattaggatgctcattcggtataatgcagacagtccaaaatccaaaaaaatctgaaacccaaaacacttctggtcccaagcatttcaggtaactcaacctgtgttgtagggtgagaaaacttttagaaatttagggagcttcaccttaacctttgttcagggctgcaaagaaatcagtaccatggtaatgacaggttcttttcctccttcctaccctatattttgtgtgtaaaagatctgcctttttaggtaaaggagttctccactaagtgtcccatatttaggagtacatttttttttggcttggttgaccttcagtttatatttgcccagagtgagagaaaaaataaaataggataaaagcataaaataaaacagtcagtgacaggtagtagggagtataatttaggtctttggataggatcttgtcaggcatgatatatcagttttttgtcagtaatagtatgagctgggtaaattttaagagtttatttggtttattaataaggaatatttttaaagtgcatttttaaaggtatttattgttgggtgtggtccgtggagtataaaagaaaaacaacgtggcagattccctcatctggttccccttccaacagtgggggaatctccacctgttagtgaattgaatgaaatacagtagaaggctgaagcgattttacactggcaaatatctctaaaattttcatggtatgttaacttgtttaggaatctggaaattcttcaggaccttcacctggtgctaagttttcccacattttacaaaaggatgcctttctagtattcaggtcattgtgtaaactgtcaatgaaaccactgtcagatggaccaccagatccaaagtaagttattaactgttttgcctgacaaatagaggtttttaggcttgaaacttactgttaaggtaatgtttggattttcttttgttctttttgtcctatagaaccataaaaaaaaattgggtggaggggaggtattttacgtttaagaaaaaagtattgaaaaacaattcaaaactgctggagtagataacttacactatttcctaaagggtatgtgacttatactattttctaaaaacaaaaagtttcagcattgctggaatagataacttatgctatttcctaaagggtatgacagcattctagaatagtgtctggtgcataggaggggctcaataagtattaccaaatgaatgaattaatgaattcttatttccatataagtaactttggagctaatgtaaccctgtatcccagccctaggtttctaaaaactgccagtcaaaaggtactaaaacctaaaagaaatcttaaaagttgtaatgaaagataatgcatattcattaaggtctgacaaaatgccctaggatgatgtctttgtctattgggatcaggaagaactttgagttaggagccacttgtctaattttcatgaaatatattagattaaaccctaggaaagtgccatttttgtaagtcataaatggtcaagtatctctcgtgattcaaatgtaactaattacttttgagactgagtttggaagttatatgagtcgcccacctctaatattgcagcatgatgtattgcaatatgacaattttagaactttctggagaaagaaaccttggagcagaccataactttaagaaagggatattgaaatagagatgtaaggaaacggtacttcaatttaaaaaaattctatagagtgtttcagtttctgagtgccagctgagcagaccagagacagttgctgtgaaaacttcatacatatgtggaaactacatttgttatatttgtttaattttgtcagattgtaccagttcagggagaaacatcctttagtcccagaagcctaaaatcataaaatctttttagacccaaaccctaagtcagaaatcaacattcaaaaatctcattaaaaaatcgacagttttgaattttaaaaagtctcattcaaaaatcaccagttttaacatctcattctgaatcaatgaagacctactttgagaaagagataagaatttggtattattgctgaagggcatttttgccatgctttaaaaatgttattgaccattaaagcctcagatgcttttttccaaatcaaatgtaaaaattgtgatttgaaagaatgctagaaacagaaaagaagaaattctttaaaatgctgagaatgaaaaggacacaaaggaaaataatatgaattttgaggagtatgttcatttattcctgaaaaaaagagtgatctggttttgaaaagatgctatctttaatgttacaaaggatttttatgaggaatgatgtaaattaacaagccttatacttagtgggtttaaaccaaatattaggaaattttgtttgaagaccttcttgacttgactgtcagggtcattaaacaatggaattgaatactgaatacacccttagaagctattatttttccaaaagaatatgtagttttctgtttttaatgattttttttttttttgccaaaagtcaagctttcgtagttacatcattttcttttttttgtctttgcttccccttatattttctggtcttgctaaaatgatgatccaggaaatgttcttgaagcctgaatcataatttgaaactaccccatgaaaaactgcagacctgaaatttccagcctcttttgcctatcaaaagtataacttattgtgtcataagacagttgtctaatcatttcttcattcattattgccttgtacacagtaggtatttaataaatggatgaatacaagaataagtccattaattttttttagcatgtacagtgtacaagatattttgttaaatgttgggaatacaaatataaaacatacttagaacaaacactcattgttatagaatggtaagctgcaggatttaattacaataggaattgagcataataggtgataaatgtgagctagaataggaagtagtgtgtaagccttggaagactagaacaggaggggaggtggtgggttaatttgtagttccctgtagctatttgaagtcttagttcttgctgtctctacttgatttatctaagcattttttttggtaattatctatttgctgcatatattcttagattcaaaggaagactcagcacaatggccatcttagaaacatgactgtgtaataatgagccataatattattggctccagttttatttcagagaaagtagtatttttttgtgatacccatttacgtgaaattaacaattccttattagatttacgtagcttcttgaattacttgacacttataaccataaaatttttcaggtggaaatcaagggcaattaagtttactatatagtgtaaatgtgactgaaagcagcatttgggctacttttttttttttttttttttttttttgggaaaaaaaaaaaaaccaactgctagagcattttggtgtgttccgcatttgaaatgttgcctgggttcaatgtccttggtctgttgggcttaagagatcagtttcaatgggaggaaaattgtgtttgcaaaatcaaataattaaaacactagatagtgatcagaagcatgccatagtatattgattgggaaaaaatttaaaaattttaagccaaaaactactttttcagcttttcattacagaattatttagaataagttgctaagctatttaagtttgtatttttattttattttattttattattttttggacacggagtctcactctgtcacccaggctggagtgcagtggtgcaatctcagctcactgcaacctccacctcccaggttcaagtgattctcctgcctcagcctcccgagtagctggggttacaggtgcccaccaccacactcggataattttgtatttttagtacagacagggtttcaccatgttggccaggctggactcaaattcctgacctcaagtgatcgacctgcctcagcctctcaaagtgctgggattacaggcatgagccaccacgcctggccttaaagtttttaattgttctgaatacctctatatttatttcaaaagaaaaaaaaatctttaaatggttaccgaaaaagtaagcttgaattagtgctgtcacttgttaatgcaaccaaaacttttttattattgtttaggatttttgagtagcataaccagaaaaaagtccattggaactgttgtgtattaatactaaatatggcatttaatctgacaagttgatgatgatttgtaagaagtatggttgtgaaagaaaggaacacaacatatatcttcacactatttttttcttttccagtgaaacaatacgttgatgttaaatatttgtgaattttttttttctttttaaaaagtttgtgggccaggcgcggtggctcatgcctgtaatcccagcactttgggaggccgaggtgggtggatcacgaggtcaggagatcaagaccatcttgactaacaccgtgaaaccccatctctactaaaaatacaaaaaattagctgggcgtggtggtgggtgcctgtagtcccagctacttgggaggctgagacaggagaatcgcttgaacccgggaggcagaggtttcagtgagctgagatcgctgcactccagccttggtgacagagcaagactctgtctcaaaataataaatttaaaaagtttgtgaaattataaatatatggttcaggggaacatcagtgaaagcacctgttgttagtgcctaagttgttcatgtactgtactttttttatgttatagaattttctcttcctctccatttacaaagtttatgaaattatgattatgtgtatctggaaatatttttggaacaacctgttattactataatgccaaccttgttcatatactatgccttcttttttacattttaggtctcatgaactacgatccaagattctttcattgcagttacttctatccattctgcagaatgcaggacctattttcaggacaaatgagatgtttattaatgctattaagcagtatctttgtgttgcactctcaaaaaatggagtctcatctgttccagaggtttttgagctttctctttctatatttcttactttgttgtcaaatttcaagacacatctgaagatgcaaattgaggtacgttttgcatttaggcataatgttactattggatatttcatttgtttcatgttaaattatatttgaatacactgcaaagttctccagaatgaaataatatttgtatattgccatgcacttattttttttcattcacctgttcaactaatatgtgccaacgaagtactaggcactggataagcactaagaatgcaaaatgaaataagatggagccactgtcctcaaggaacttatactagttgaataaatggttcttgctctcttgaattaatttggtcctcataatagctttgccattgtctgtgtggtatattcgaatacatttgtttatcttaaaagaaagttccaaatatatattgcatctccattattttaaaccatttgtaagtattaggcattttaaaagatgtgattgaggggcattatattttggggttctattttggatatttgaaaaaattaatatttgctttgtactttttttttaatgtatatattcctaaagttttcttccaggatctttggaaatagaatagcaatcatgtggtcctaaaatattgtcagagatttagtagaactaaattagggatgttttcaatcgtgtctgcatgtgttgtgcaagtgtaccagtttctttttttttttttctttttctttttttttttttttttttggagatggagtttccctcttattgcccaggctggagtgtaatggtgcgattccgactcagcacaacctccgcctgctgggttcaagcgattctcctgccttagcttcccgagtagctgggattataggcatgtgccaccacgcctggctaattttgtatttttagtagagacagggtttctccatgttggtcaggttggtctcaaactcccgacctcaggtgatctgtccgcgtccgcctcccaaagtgctgggagcataggtgtgagccactgcgcccagctttatgtggttttttttttttttttttttaaggtgtaccagtttctgattttttgttttcatcttcaaataaaacttaaaaatagtactttatgttttaccaatttaatgaatgcttttttcaatttgttatttgttgaaatgttgttttggttgtgatgttgtatggttttgaaatactcatttttatgttgtcagtttttaccttcatattatgtttgatatacaggttatattttaatttttgttaattttatatttaatcctaactcaagactcataattcactagcttgttagaaaggataaattatttttccagaatttcgaaatggctaaaatagtcatattatcctttaatgttaatgttctgtaatagctatcaagattgatttagagcattgttatgagaatgaaacagaattaggccttggtattttaagtgaaaagctttttaatttgggccatatttttggacaggaaaccatttttggtgcctatatgatgtatgatgtcaagttttaagagtttgccatatgtctgttaagataatacaaggcgtttaactaggaagagttgccgtttttagatagtttttccccattatctgtaggaactataaataaaagacagttaaaaaaacttttagaacttttgcttttgtaaaaaaccagaagtctttcatctgatgatgagacatttaagttggcattagaaaattttgtaatactttatgtaaccaattacagatttttttggacactgagattctgcttctgtaggtactgtttaccgacagtaaaatataaattcttagatctagatatcaaaaattatttaagttgagattactatttttgcacagcaaattcaactttgcaaaaatgaatttgaaaggaaaaactttaagaaatttcttgtcaatttgtagatgtcagattctcattacaaaattattataatattctaatttttaaaaattaggtttatttcactccttattgtccctcagggggcgataatgagggtaaaatgagataaatatagatatactttcaaaaatgttatacacactcaaattataaatgagttgagcaccgggcacagtggctcacacctgtaatcccagcactttgggaggccgaggcgggtggatcacctgaggtcaggagttcgagactagcctgaccaacatggagaaaccccatctctactaaaaatacaaaattagccgggtgtggtggtgcatgcctgtaatcccagctacttgggagcagaggcaggacaatcgcttgaacctgggaggccgaggttgcagtgagctaagatcgcgccattgcactccagcctggtcaacaagagcgaaactccatctcaaaaaaaaaaaaaaaaaaagctgaacgtggagaaagcccagctatgaaaacctaaatttgcaaaacaaaattaagattgtttttacatgaagattcattttatgagaatattcacttcagagtttctgtgatgtgattttttcatgggtcttaaattatatatctattccagaagatacagtttatgtacaacttttcaggagaacatatgtgaagacagcatacttaagatatagctgttgttccacatacatacattataggtcctcgataaattattaaaaggttgatttttttagagcccctattatgataggcataatatcttatattacagcaatagacttttgcttattagtgcaatttgataaaccattgatagtagctaaaattttttcttccctctctcttccagtctatattatttattttgtcaatcagaggatcccaaaagtttttgattcacaagtctgacttttcatgaaagttgcactttggccagaggaatacctccagttctatgttctatttattaagcaggcagggccaaacaacttaatggatatttgtcttcacagcctactatgtatttcaaagacaatagtatgcataaagtaaaagaaaaataatgtttttattttattctttaccgcaattacttaccactgggatgcgtgtgcctattagaaactgcacacagcttcttagatcttggaattgaatactgtccccctcattcctgtacttcattgattttcattcagtacttggttttttatcatagcaactaccaaaacccagctttgcggagataattatgtcattgaagggaatgtagtgtgatttatttgaaaccatgagcaatcttttgaggtatccaacagatgtatctccctctgaattttgcctcagaattttttcagggcaccctcatgagtttgctacagcattctggggtactttgatgcagtttttgggaattgtggccatgttgccataagtatttattgaacacctactatgtgccctgcaatatggacgtgatctttatcaagaaagacctggtcattactgtcttcaagcttacagtctataggagatactgatattaaacaagtaaatagaaatatgctgagttttgtgaaagaaaatcacattacaggggtacctaatccagttagggggagatactataaatgtgattttctgggttcataatgcatatgtttcataaatgttaatatgttggttgtttcagtcattccttcttaaagtcacttttatagaatacatttaaatctgaaaattcttatctgttaaattgaaatttatctcattaggttgattaactcactgcttgattatttggtgtaaagagtagtgagaaatagttcatatgtagttttcaaacagtagagattttcacttttgtgagtaattagaaaaataaaaccgtatgagacttagattgtttttattgtgttgattagagtatcagttacatttaaatctacgaacagttaggcctctcagtactagaacgtctctgaaaaatataactgatgaacagaagtataaattacgcttttggagggggattaaaaaagcgtaagttatattctgtaaaaatgttaaagaaattatcacctagaggaactctaaatctttgcatatttcttttgtagcagctgtgttgagaacaaaacacatcaatgtgaattgcagtactgataactagaagggcaagtttaagtcacttacccaagatattttagtcctgaggattcagagatggaactcaaaaggagttgaactccataagagcctgggtcctaatacctgctctatagctctgggatgtttaaaaagtgatcacacatatgaattctaaacaatattttaaacagaagttttctcctaatcacaggtgttctttaaagaaattttcttatacattttggaaacttctaccagctcatttgatcacaaatggatggttattcagacactgacgaggatttgtgcaggtattttaaattatcctttttattatctctttcttattattagatatttaaaaggccaaatgtactcatatcctagatgtactttgttgaaattaatgttatattgttacagatgctcagagtgtagtggatatttatgtaaactatgactgtgacttaaatgcagccaatatatttgaaagactagtaaatgatctatcaaaaattgctcaaggaaggggcagtcaagaacttggtatgagtaatgttcaggtaagaactataaaaacattttcaaatttaaactttaccaggaaagagtcatgtgttttccttaaaagacctttaaaaaaaattttgtttttgaattactttgtaggaattgagcctgaggaaaaaaggtttagaatgcttagtgtcgattttgaagtgtatggttgaatggagtaaggatcagtatgtgaatcccaactcccagacaactcttggtaaggtgatattttgagctgtaattctttgtcattttaagtgaataatactttggaggatagttgcagctgctgttaaaccaatttcatgacatatttattcatttaactgatgaggaaacattctctgtgagttaaatgtctagctttaaaattgtgagatttttaacttagttatccaaactatttttttctaaatcttcttagaaatattttgattatgtaaaatgaagcatatttatgcaactttcttgtattataattatagaggaaacatataaaaggcagtatgttttaagaaggttgaattgttcatctgtgtttgatgtttaccctcactcagagaaaaactcatagctgcagggctacactggtattatcgaaaacaattcctcatgaggagtgagctgagagcagaaatccagtggatactcagcactgcaactgcaaaaagaactcctcctaatggtgcagactatacacgtacaaattacagtgtgttttaatatcaaagtatgttgtttactatgttacctaatagttattttgtattaaatagatatctaagcaacattgaaacgccttgccttattcaagaatttgtttgcccttacacttttttttttctttgatagaataatgtactctatcaatttttcttctttcaggtcaggaaaaaccctcagagcaagagatgagtgaaatcaaacaccctgagacaataaacagatacggaagtttaaattccctggagtcaacatcatcatcaggaataggcagctacagtacacagatgtctggcactgataatccagaacaatttgaggtcctaaagcaacaaaaagaaataatagaacaagggatagatttgtaagtgtcatagcttaaggagaaatgttattgaatatctctctgccagtatagtgccacccctgccgtgggtttatcaccttataatgagtaaaatggaggatagttctcatggatctaattcacgaggctcctattcagccccccttgttcattgcagtctagcccaactagattcctgtaatgcccaaccactcttgtcatataaattaatttgtcaccatattataagtgctgttgatgggtatcatctgtgcaattttgcactgtttagctcatgacatccccccattatattttctaatcatgtgacaactcaaaacatttaaaatatgaaacttctaatagctatcagtactcctttataggtcttacattttttccagctggcttacaaatgtactattcttgttattgatttcatttttatatgttgatgaggtgatcacctctcttccagcctggctagtgtaccggatcctaatcttgtgaagtcagttttcccactaagctttgtgatacctgcctgctcctggactatttcctttgtgaatgtcaccatgctgccttcctttctcttgttgcccatctctttttttcaaagagatgccataaggaaaaatgaaattgtttgccgtctccatgaatctaactattataaacttaaaaattcccctgtgtgcttacttggtttgctacttctgtaaagcatttcttcctgatacttaagcagtgccttttagtgaatgttcaggtgtcttttttctccagtgttaatatgaaaaacagttcaacaaaaatgtacacatattctattttaaaattacaaaatcttaccaaattgcctcaggaaatagctgtcactactgcattaattctaattgttcagtcaatatttattaaagtctcatctttccagatattatgcaagatcctggggaaactagatacatggaaaagcccttccttctgagaggctcttggtctagtgtgtgtaaacaaatatgcatattgaaattctgctggtcacccagtaaacacatatttggtacttgggactattgccaagcaccatgaaggcattggtccttgtattcaagattgcattctaaacatgagcaatttttaaaaatagtactgtgtaaatgtttataaaagagtgtcgtacagagtaagtactgccaaggtacttattttgaagtacttgagaaatgagaaggagtagtcagagggcttcgaagtggaagtctcccagtccttctctcagcagctagacttgctttctacttaatacagccattgatgagaatgctttcatggaactgtattcctagtatacttgtctacaactgtttcatgacaccagtctatcctgtttctctcctacctttttgactatgccgtctcagtcttgtgggctgttttttctttcttcctgcgtgcatcttagcattgccagcgttctgttcctcagcccttttccaacatcagccccttagttctcctacccaaaacaaaagacaaatagagaagcctgttatttttgtatttcttatttatggtagtaaccccagcatgctactaaatttataagctaaaatcctgggagttagcttagattttcccctcaaaggattagattctcgaatctaatctgtcactaagacttgttgattatacttcctaatatccctgcaatctgtactcttttctcgatctcccaccactattcttgcaaatcaaatcatgattatttatttcctcaactagtataatctttcaattggcttacctttttctttggttttgttcattcttcagtcttttcccatgcttaactagagtaacctttcttgaatgaaagtctattttttccctctcttagagaataaaaccaaagctgctttgaaggtatgataataccttcatgatttggatctgctggactctaagcttcatttcctgccacttttctgtctcacctcactttccaacaatgcagaactatttattatataatactgtcttgtgcttttgtgttttagtatggcttcttcctctcttgcatgttttttcttattgtttataaaagatataattgttcttcaaaatagttccagagtcacctttcccaggaaatatattatgaccatctaagttagttacttctactgtgttattttcttaccttgtgaatacatctatttgtcacagttttagtattataattctttaaaattgtgtttcttccattacagtgagagcttctaggggtagggggattatgtttagcttagtgaaaagtgtttcattttatgaatgttaagtggttatggttggatgagaacttgacaagggaacctttaggaagagcatcccagactaagagaatggcatgtgcagcagcagaggaaagggaggacatctgagcacttgttcagcatggcaggctagagtggagggggaataacaggaggtaagattagagcattgggttggatctaaattacagaaggccttattctccatgtaaaggactttttgttgtcttgttcctcttggcgctagcgtgctagtgaaggactttaagcagaggagtagcatcatcagatttctgttttgtaataggactttgctggcagcctgaagggtgcattagaatatgggcaacatgagctagagggagaccatttaagaactcttgcaatagcccaaatgacaggtgttggagcaccaaagtaacaaaagtaggaagtaaatgatctgtaaacagagaggtaacatttgaattggatctttaagcctgagggagactcccctgtgaatggagcaggtaaaagacatgcagaggaaatagactctaaaaatagatttagggaatgggatatgatatatgggagcagaggaaggagaagggagtgagagagaatctggagctgtattgagaaaggttttgtgtggtctaattaatttggacaaatgagccaagattacttgaagattaagtagaatgtatattcggagtaccttagggatattgtgggttcagttccataccacagcagtgaagtaaatattgcaatatagtgagtcacaccatttttttgatttctcagtgcattaaagttatgtttatactgtaccatagtctattaacctataacccccttatgtctaaaaaacaatgtacacacattaatttaaaaatactttattgctgaaaaatactagtaaccatctgagctttcaatgagttgtaatctttttgctgtagagtgtcttacctgagtgttgatggctgctgactgatcagggtggtgattgctgaaagctggagtagctgtggtaatttcttaaaataagacagcagtaaacttttttgccttgattgtctcttccattcacgaaagatttctctgtagcatgtaatgctgtttgatagtatttacctacagtaatatgtctttcaaaattggagtctgtcgtctcaaactttgctgcaattttataaactaaatttatggaatattctaaatctcttattttctttccaccagtgttcacagcatcttaaccagtagtagattgcatttcaagaaaccactgttttcacttgtctataagaagcagctactcatatgttaaagtttgatcatgaggttacagcaattcagtgtcatcttcacactttacttctaagtctcttgttacttttaccacatctgcagttacttcctcccctgatgtcttggactcctgaaaatcgtccataagggttagaatcagcttcttcccaactcctattgatgttggtatttttacccctcccatgagtcacaaatgttcttaatggcatctagaacagtgaatcctttccagaaggttttcaacttactttgcccagattcaacagaagtatctctctacatggcaactataaggcagctctctacatggcagcttttaagtagtatctcttttaagtagtatctctacatggcagcttttaagtagtatctctctacatggcagcttttacgacttgaaagttagcctggcatggtagcttatgcctgtaatcccagctactcatgaggcctgagaccaggagttcaagatcagcgtcggcaatgtagcaattccccatttctttaaaaaaaaaaaaaaaaaaaaaagacttgaaattcagagttacttctgaggaaagggcacggtggctcatgcctgtaatcccagctttgggaagccaaggtgggaggatcatttgagcccaggagtttgagatcaacctggacagcatagtgagactgcatttctgcaaaaacaaaatcactctttcatccaagggctgcagaatggatattgtgttagcaggcatgaaaacaacactaatctcatcgcacatctccatcagagctctaaggtgatcaggtgcattgtcaatgagcagtaatcttttgaaaggaatcttctctttgaagcagtagatctcaacagtgggcttcaaatattcagtcatctatgttgtaaacagctggtgctgtcatccaggctttgttgttccatttctagagtgcaggcagagtagatttagcatgtaattcttaaggaccctgggatctttggaatggtaaatgagcattggcttcaagttaatatcatcagctacattagcccctaagagagccagtctgtcctttgaagctttgaagccaggcattaacttctcctcccttgctatgaaagtcctagatggcatcttcttccagtagaagaaagactgttttatctacatggaaaatctgttgtttagtataaccaccttcataaatgatcgtagctacatcttctggataacttgctgcagcttctccatcagcacttgccatcagaccttgcacttttatgttgggagactgcttctttccttaaatctcatgatccaacctctgctagcttccagattttcttctgcagcttcattacctttcttagcctcatagacttgaagagagttggggccttttttgggattaggctttgccttaaggtaatgttgtgactggtttgatcttcttttcacacgtgaaaaccttctccatatcagcagttaggctgttttgctttcctactggtgtattcactggagtagcacttttaacttccttcaagaacttttcctttgcattcacaacttggtttggctcaagagacctagctttcagcctgtcttggcttttgacatgccttcctcactaagctcaattatttctagttttttatttaaagtgagagatgtgcgagtcttccttccacttgaacacttattgtagggttcttaactggcctaatttcagtatttttttgtctcagaatagggaagcccaaggaaaggaagagagatgagccagtcagtggagcagtcagaacacacacaagtattgattaagtttaccatcttatatggacgtggtttgtgtcaccccaaaacaattacaatagcaacatcaaaggtcactgatcacaggtcacagtatcagatataatagtgaaaaagtgtgaactattgtgagaattaccaaaatgtgacacagatacaaagagagcatatggttttggaaaaatggtactgatagaccctcaatgcagggttgccacaaaccatgaacctgtaaaaaacacgtatctgtgaagtgcaataaaatgaagtatgcctgtatgaaatatttagtattactcaaagttcgtctactacatggcattctctctaatagtctctcatagtctaatttcccactgtggatatggataaaaaaatacttcatactgtaaaaaagtaagtaaacaagtcagtgaaatgatagtaataaagatggccttccatatgagacttatttctaaaaagaaaagaataaagaaaacttggcacaatgtaattattttgtacattcatgtactgatgtgtattaaataagctactattttctgggtgctattagaaaatttactgtggtttaagatcttttcagggactacgaatggttttctatttttaatgttcttatttaacatcatctagatttaataagaaaccaaagagaggaatacagtacctccaagaacaagggatgcttggcaccacacctgaagatattgcccaattcttacatcaagaggaaagattagactctgtaagaataccattttcattctaaccttttctgtaaaattcttgggatttttttttctttttattagagacagggtctcgctatattgcccaggctagttttgaactcctgggctcaggcaatcctcctgcctcagcctcccaaagtgctgggattacaggcgtgagccaccacgcctggccccgtttctgtaaaattcttttttaagttaataatacatattgtgactcctttaaaatgctttcctaaatatagaggtaagtaaaacgtaaagaataaccttggttggccgggcacagtggctcacatgtgtaattccagcgctttgggaggctgaagcgggtagatcacctgaggtcaggagttcgagaccagcctggccaatgtggcaaaacctcgtctctaataaaaatacaaaaaattagctgggcgtggtggtgggctcctgtaatcccagctactcaggaggctgaggcaggagaaacacttgaacccaggaggtggaggttgcagtgagccaagattgcaccactgcactccagcgtgggctacagagtgagagtctgtctcaaaaacaaacagaaagatgtcttggttataatataatcatctctaattggtcctccgtagccatgagttctgtatccatggattctacatctgtggattcaaccaaccacaaattgaaaatattcaggggaaataatgggtaattgcatctgtactgaacatgtacgaactttttttcttgtagttatttcctaagcaatacagaaaacctatttacattgtattacctattataagtaatctagatatgggagtagagtatatgggaggacgtgtgtaggttatatgcaaatactgtgccattttttataaggaacttgagcatccatggattttggtgtccatgcagggtcctggaaccaatcccccactgatactgagtgatgactggtgtgtgtgtgtgtgtgtgtgtgtgtgtgtgtgtgtaaaatctgctttttaaattttctaaactgaaaagaatatcctgatatatttatgaaggcatttagtgtgtttaacttttagctttgtgtttgaaattgttaactctataatcaaaagtctgcggatcttaacaaaattttctgctttttaagtggctgtgtggtgaatgtaaacatctcatgaaaatctcaatttctggccgggcacagtggctcatgcctgtaatcccagcactttgggaggctgaggcgggtagattacctgaggtcaggagaccagcctggccaagatggtgaaaccctgtctctattgaaaatacaaaaaaaattagctgggcgcagtagcaggcgcctttaatcccagctactcgggaggccgaggcaggagaatcgcttgaacctgggggcagaggttgcagtgagccgagatcgtgccactgcaccccagcctgggcaacagagcaagactctgtctcaaaaaaaaaaaaaagaaagaaaatatcaatttctatctctgtttttactttagactcaagtgggtgagttcctgggagataatgataaatttaacaaagaagtcatgtatgcatatgtggaccaacatgacttttcaggaaaagacttcgtttcagcccttcgtatgtttctagaaggatttcgtcttccaggggaagctcagaaaatcgatcgattaatggaaaaatttgctgcaagatacctagaatgcaaccaagggtaaataaggttcaaatgctcattgattgtctgttatatccaaaccactgtgctaggtagcatccagggatttacagataataggacctaatcccctgtttagagaatttagattgtctacaatctggaagtcgtaaaacaaatccataaaaaattgtaatgtgagatacttagagaaataaaagtgctatgggatttgaggtgacttatttaaatgaaactatataaaacagtagaagtttataacatgatacatttatttttccagacaaactctctttgctagtgcggatacagcttatgttttggcttattcaattatcatgttgaccacagaccttcacagtccacaggtatgttttcttttaagtcagttttacaataagcggtacaaaataagtacattattctgaattcagtaagtaatagttgaaattttagttttattcagttaaaccagtcaccatatttgggtatttaatttgggatggtgaacattttacaaaggcaacttctggtagtaattaaaattagacttttaggtatctataaaatgtttctgtatttgtcgttcatgattgacaactgtataaagcttaagataaattttaatctaacaagacatttataggtcttatgtcagtttgtcacaacatggaaaaacgctgtgtataaaccatccttctaaaaaatataatgtttcaggccaggcgtggtacctaacgcctgtaatcccagcacttttgagtggccgagacaggcggatcacatgagtccaggagttaagaccagcctgggcaacatgatgaaaccctgtctctacaaaatatgcataaattagctgggcatggtggcatgtgcctgtggtcccaactacttggagggctaaggtgggacgatcgcttgagcctgggaggcacaagtcatacagtgagctgagatcgtgtcactgcactccatcctgggtgacagagggcagaccccgtctcaaaaaaaaaaaatgtttcaaacttcaccagtagagggattagcgtaatgaactctaatgtacccattacctgccttccacagttatcaacttatggccggtcttgttctatctatatctctttcctcccctagataattttgaagcagatctcagatatcataccatttcatctgcatttatctcagtgtgtttctctaaaagagaagtactctagttaaacataaccataccagcatacctaaaaagttaacaataatttaaaaatacctgatatctagaaatgttcttttgcctcatgaaattcatatttacttcttaaatattgaagaactgtcacttgatttctgatacctacttaaaaagtttgatttaaagttttagtattttttgcttagtttctaaaaacacacattgacatccttgggtaaaattacatttataaattatttgcaaggatttcttagtacttctaggggtaggtatctgatgatatttgttatgcttaggttgtaaaataaattacctactttctaatctgagatgtattggaaaaattaaaattcatttgaattttgagattaacctttgcagtatagggattttttgtgtctgttttgagatgtttaaagcagagtagataaggaaagtatataccaaacctaaagtaagaatatatacgattatatacatatgtatatacatatgattatatgtgaagttactcctgttttaaacacaatattgagcaactatgcatttaccacaaatttacttgattttatataggactttaaaaatttattaaagaatttaataattcaagatttgcctctggcatatttttggcagtatagtcaaagcagctcaccttcagggcttttattatcgagcatgatgacttctattctacggctttataaggtagttcacagttgggatttgtttagatatttttacaccagaattttcagtctaattttttcatttgatttttcaatctacactagagtattttgacctgggtttacatatgtttggttttaaaaagctatgctttaaaagacatttggttctctaaatgaataagcaatattatatgcacctgtgcaatgtcttcctatacatatgtacatactcatgttattttgaagaaatattaaaaattccttttatgtcttttcataagtacctagactgtgaaaagtttctaaggacataccagttagggagtattaccttcacaacagtgtcccgtctttagcataacagtgcctgtttgcagaacatgtgcttggagtcctagtctagcggtggcaactgcttgttgtccaactgttccttatcagcttgctgcctggtgtcatgtgctgctatgcagcctgcagctgtagaacagcttgtgagtttctatgaagctaagtaatctgttagaaaattgtacccgtgatcttggcctcagttgatttagataactataacaaatgacaacattttaaaatacaaataactttaaaggaatttcttaaaactaattctcattcttagttcttttcaaacttaaaaaataggtggattttaacaagctgtttatgttcccttttcacccagaatatttatagttaggctactttttatgtagtgtgtggtgagtcagtgattaaaaaaaaattttaggcatatttagaacacaatttttgtgtatacaataatcatcagtagtaacaactggctttaagtgatttaaacactaaataaggcacagcttaatacaagcacacgaggataaaagtcaagagtagaatgttccataaaagatggcaggagaagaaaagtaggattttgttttatacagcttcagaatcccactatggcagaagtgttctgtgtgaagcagtgcacttattttggggacctcaaagcaaagtattctgtacgcccacgtatgggatccctaacccagatccacaggcaattaactgctacttcagattttctgtcaagacttttctctgcctctgattggcataatgctaaaacattttgccatgcttaaaatttccaggtgattttaatcttcctttacttcttattggcagcagtgtgtagtcttttattttgttattcctggtgtgttttttaagcattcacctgaactttaggtaaaaaagcttctttctttcattttttttttttagtgccatgacttgagtttttaaagttataagatagtagggttttattccattaaatgatacgttaaacacttgaaaactttcatggtaatatttttacatatttgtagggaaagcactcctgcctccctttctgacatgttagaaaaatctgtttgcagaataatctgaagtaaataagtgtatatatcccagttacattttctgaaagttttggttcctctgtacttttgtttttgtttgagacaggattttgctatgttgcctaggctggacttgaattcctggtcttgtgccatcctccttccccagcctcctgaatagttgggactacgggcacataacaccacactctctatagtttttgcaagcttctgatgacttgcttgattgtttttctgtgtactttcatgtaaatttacaggaattatatcttaagagttaccttaagttctttatggaaggtggtagaaatatatttaattaaataaatacctcttcagagacatcatataagacgtagaaatatatttaattaaataaatgtctcttcagagacatcacataagacttctgggttttatctatctaggtttctggaggtaaagtgtaaacattttggctatgctagttcccaagtttggtaatggggttaccgtcttacagactccaaacttgtattccacagctttatcaaggtgcaaaaggcatttctgtttagggtactcttatacaagacaaaacattccaaggatactttgtacagatcacctgacataattcagttgccacagtgactcagtcagagagattgttaactggttttaaataaatctcaagtattgttactcttatacccactgtatataaagtcagctttaaattcattaacagcacatttatgttcttctaaactaagatttgaatgtttttgatatctttatttccaataattgtcatggcccttttgagagactgcaaaagctcttaaaccttgagcaaaaacaaatattttcattgttcaacttccctcctttctggttgcacattactcatgtccacctcagagcatgaattagtttatgccagaatggatcttttctgtattgccttcattttctgtgatttttttcatttttatctatattttgttgaatactttccagtttctatcctcaaaagtatttacaaaatctcttatgtaaatattcatatccttaaaatacaagtgtaacctttatgttaatttttaggaattataatggtttttcatatctaggtgaaaaataaaatgacaaaggaacaatacattaagatgaatagaggtatcaatgacagtaaagaccttcctgaagagtatctatcagccatctataatgaaatagctgggaaaaagatatcaatgaaagaaacaaaagaactaacaatccctacaaaatcaagtaaacagagtaagtatctaaattaattgaattctgattgttcaaggggaaaaatatgggttcctaagagtttttcacttatggtcaggtgtggtggtttgcatttatagtccccagctactcagggaggctgaagcagaaggatcacttgaacccaggagttcgagaccagcatatgcaatatagcaaggttcttgtctctaaaaaagaaaaaactttttaatttaaaagagagtttttcacttgatttagaataaagtaaccttagaaatattgtttagaaccatgttttgatgagaaatattataatagagtttggtgatatgattgtattttttccccacattctgaagaaagataacactgaccagtgattaatggaaaatggtatacattatatgcatgtgtcagtgtgcatttaatatatgctgatccatttagtagttaacctcagcagggatttggaggtcataaagagtagttagacccaatagtcaggcttcaacccttgtcattttttcttcttcctcatcatcttcaagcaatatatttccatttgttcatcttttgttacacataaatggaagctggaagtagggatgattggaggaggtggggaggtttaggatcaggtgagagctcatagagttagaaatttctacctcaaacagaccacaagttacatcactgtagagtccttaggtctaactaacaccaggaggcaactgtgaacccagcccccttctagacactctatacctgtggacagtggtaattaaatttgagctgaaatctgactacaggaatgagatgagggtagtggctcaagaatataacagtaatatagaaagaggattcctgcatttctgagcccttccacttggaactaaaatctcaagtttaaacagagtacagtagtaaaatccaaatggcaggagaaaagaatattatatattgtatcatcctcatattcctctttttctgtcctattttatatatggtggtaggaaataagagaagctggaaatggaaaggagatggtggtgtgccgaaaacgccaaaattaccctggagtgttatggccagttgttttcttgttaactcaggagcagtcattcaagcctatgtggtacaaagatgccattgcctctttttttttttttttttttttttttttgagatggagttttgttgcccaggctggagtgcaatggtgcgatcttggcttggcgccaccttggctcaccacaacctccgtctcctgggttcaagcaattctcctgcctcagcctcccgagtagctgggattacaggcgtgcgccaccacacctgactaatttttttgtatttttagtagagacagggtttctccatgttggtcaggctggtcttgaactcctgacctcaggtgatccgcctgccttggcttcccaaagtgctgggattacaggcatgagccaccacgcccagccagatgccattgcattttacctctcttctgctcttctcccattccatatttgggttgtttccctgataattgtattctgaaagtggtacctactcgtttcccttttcataggtttccacttcctgactcccagtctaggaatttttttttttgaggtgaaattcatagaacataaaattagccatttaaaaatgaacaattcagtggcatttagtacattcataacgttgtgcaactaccacctctaattccaaaagatttcattatcccaaaatgaaactccaaactcatcaagcaattactccttattctgtctccccccagcccctggaaaataccagtctactttctatttctatggattttacctattctggatttttcatataagtgtaatcatataatatgggatctcttgtgtcttgcttcttaggattacttttaattactggtggtgtttattatttgatagtaaaatatcaaaatagaattcttaaatgttttatatttaaaatgctgatagtgtttattgtttcagatgtagccagtgaaaaacaaagaagacttctgtataacttagaaatggagcagatggccaagacagctaaagcactcatggaggccgtgagccatgttcaggcaccctttacaagtgcaacacatttggagcatgtgaggcccatgtttaaggttagaattttcaagtaatgtttgattgcagtgtacatttatatataactacatttataatatttttaagttaaggaagcgatacagtgatataacacattagtgtagacatattgaggtgaaattcatataacatgttatttaggacatagtagatacaaattttctattacttaaagagaacaagaggagttactcactataagtaattaatagttgtgtaatcttaggaattaagcaaagaaaagtattggagaatgatcattaatccttggcctgattttctctaaatgagttatgcttaagcctttggagttaactcacatttcaaatgatcatgaggctcttgttttctttaagtgttttgggcccaggaacttatatcaggcttctgaatatgcctggggcccagaaagtagggtaaggaacagaagacaatattatttgtgtttgtgggttgatttagtgagaatgatacttattctttaaaatttgatttcccattccttcttcattctctatcctttctccaaattccagagtgagtaagcagtgcattactacaagggttgtagcaaagtggagtagtgtctagttaagtttgaaaagaggaagtgggtaaagtatattcctgttcatgagacaatatggcaaggtggtctgtggaggctaaagatcataatccgatgctcactctgattctaactacacgtatgtgtgggtagtaaaagatgactacaggattcttgtgcttccttttagctccaaaattttgtaattactcctacctcttcttcaaggtccatgtgatacactatttctaaacgttgatgaagaatcacgatgatgagagtgagcttttatgatctgttctctggatttgttatagtttatttaaacatcctccaagctagaattaagaatcttttccctcagtgccatttctgctaccattaagctactgcagacaccctcatttctccctcagattactgcggcattctcctaacaggcatcttcatgtctactttttcactcctcttacccgtttatagagaccggagtgatctttttaaaataccaaatgaaatgccagcttcttacttgaagctttttattggctttgcatgataccatgaaacctgacacacccatagtgtctgtagactttctgtgacctggctccacctgcctctccaattccatcgctagatctcttctgtttcttactatgctgcactcacaccagcattcttttggtttctagaacatcttaaattattttctcttcagggcattcatatgaggtatgtcctttgtctagaatgttctttccttctttgcctgagtagtttccagtttaaatatcaccctctcagctaggcacggtggcttacgcctgtattcccagcacttcgggaggccgaggtgggtggattgcttcaggtcaggagttcaagaccaggctgaccaacaaggtgaaaccccatctctactaaaagtacaaaaattagccaggcttggtggcatgcacctgtagtcccaggtacttgaatgctgaggcaggagaattgcttgaacctgggaggcagaggttgcagtgagccaagatcaggccactgcactctagcctgggcgacagagtgagactctgtctgaaaaataaaaataaaaataaaaataaatatcaccctctctgagagttctgcactgtcccctctaatctaaactaggtccctaattcataatattctatgcctttccttcagtatatctgtagatttatctatccgtctgtctatctgtatatctgcctatctgtgtgcagacttgtatgctcctcgacttacgatgggattatgtctcaataaacccgttgtttaagtggaaaatgtatttaatacacctaacctacagaacattatagcttagccttgcctgccttgaacatgcccaggatacttaccttagcctacaggtgggcaaaatcatctaacacaaagcctgttttatgctacagtactgaatatctcatgtaatttattgaatactatactgaaaatgaaaaacaatagttgtatgaatatattgtaaagtcaaaaaatggtaagttgaaccattgtaagttgggaactgtctatatatacattatttatatacatgtacgagataaggaactacatctcttcacttgtcccaacatcaaccatagttcctggcttgtgttaagtactcaatgaataaacattggctgggtggaaggaatgaatgatatattcctggaatgcaatgtataatattaagggatataaactttttaagataaagcaaagacaaaaaaaagtttatcttattagaaacaagatacagtgtcacttatagtcttcaaacattattgcactttgtcataatttgacaaagcattcatgaaacaatctgtagactagtttcaacagacaacacctgtaagcaggcatgaccgtcctaaattgtttactaggtatgaattttacaaacattatttatagtaatggtaatggtggagctggagagtattgcaccttctctgagctgcacaatgagaaccactattctgtgggatgtttcttcactttgttgattgtttcctttgctttgcagaagctttttaacttgatgtgtccatttgtccatttttactttggttacctgtgattgtggggtattctcaagaaatctttgcccagcttaatgtcctagagaatcctcaatgttttcttacggtagtttcatagtttgaggtcttagatgtaagtttttaatccattttgatctgatttttgtatatggcaagataaaggagtctagtttcattcttttgtatatggatatccagttttcccagcactgtttattgaagagactgtcctttctcccaatgtatgttcttggttcctttgtcaaaaatgaattcactagatgtatggattcatttttgggttctctattctgttccagtgatctacatatctcttttgatgccagtactgtgccattttggctactatagctctgtagtataacttgaaggcaggtaatgtgatttcttcagttttgtactttttgctcaggatagctttggctattctgggtcttttttgattccatataaattgtaggattttttttttctatttctctgaagaatgtcatggtattctatagattgctttgggtaatatggacattttagcaatattgattcttctaatccataaacataaaatatctttcaatttttctggtgtcctcttcagtgtctttcatcactgttctgtagttttcattgtagggatctttcacgtctttggttaatttttaaaatttctttctcagattgttcactgttgtcaaatagaaatgctactgaattttgtatgttgatttttgtatcctgcagctttactgaatttatcagttctaatagttctttggtagagcgttcaggcttttccaaatataagatcgtatcacctgcaaatagataatttgacttcttcctttcaagttcggatgtcttttatttctttctcttttctgattcctccagctagttctttcagtactttgttgaataacagtggtgaaagtaggcatccttgttgtgtttcagaccttacaggaagggctttctgtttttcccttttcagtacaatactagctgtggtctgttgtatatggctttcattgtgttgaggaatattccttctatacctacttctttgagagtttttatcaaatgctttttcaatcaattgaaatgatcatatggtattgtctttcattctattgatatggtgtatcacattgattaatttgtgtatgttgaaccatccttgcatccctgggataaatcccacttggtcatgatgaataatcttttaaatgtgttgttgaatttggtttgctggtattttgttgaggatttttgcatcaatattcatcagtgatattggcctgcaattttttttttaatgtgtctttgtctggttgtggtatcagggtaatactggccttgtagaatgaatttggaaatattccttcctactctgtttctcagaatagtttgaataggattcgtattagttctttacatgtttggtagaatttagcagtgaagccatcagatttcacgctttcttttgctgagagactttttgttatggctttgatctcattgcttgttattggtctgttcaggttttgaatttcttcttggttcaatcttcatagattctatgtgtctaggaatttatccatttcctttagattttccagtttaccggcatgtagttgctcagagtagccactaagaatcctttgaatttctgtggtatcagttgtaatgtctcctttttcatctctaattttatttatttgtgtcttcggtctttttttcttagtcttggttaaggtttgtcaagtttatctatcatttcagaaaaccaactttttgttttgttgatgttttgtatttttaaaatttcaatttcattcatttgtgctctgatctttattttcttctactaattttgggtttgatttgctcttgcttttctagttctttaagaaacatcattaggttgtttatttggagtttttcttcttttttgatgtagacactaacagctataaaatttgctcttaggactactttcactatattccataggtttgggtacgttgtgtcttcattatcatttgtttcaataaatttttcaatttccttcttaatttcttcattgacccactggtcattcaggagcatattctttaattttcatgtgtttgtgttgtttctaaaattattcttgttactgatttctagttttattccgttgtaccagaaagaggcttcagattcacttgtttaaagtgttttcagatttgttttgagtcctaacatatggtctatcctctagaatgatccatgtgctgaggaaaagaatgtgtatgctactgccattggatgaaatattctgtaaatatctgttagatccatttgttatgtagtgcagattaaatctgatgtttctttgttgatctgctggaaggtctgtccaatatggaaaatgaggtgttgaagtctccagctgttactgtattggggtctgtctctgtctttagctctaataatatttgctttatatatttgggtgcagtgctgggtgtgcatatctatatatatacacacacacacatccacacacaattgctgtatcctcttgctgaattgacctctttatcattgcatattggctttgtctcttcctagtttttgtcttgaaatatattttttctgatacaagtatagctactcctgctcttttttgctttccatttgcatggaatatctttttccatccctttattttcagtcggtttgtatcattacaggtgaagtgtgtctcatgtacacaacagatcattggggcttgtgtttttgttcattcagccactatgtatctttttattgaagagtttagcctatgtatattcagtgtgactattgataaagacttactcttccaattttgttattttctcgttgttttgtggtcttttcttctttctttccttctttcctgtcttccttttagtgaaggttattgtctctgatggtttgatttaatttcttactttttattttttgtttattcattataggtttttttggtttgaggttaccatgaggcttgcaagtactatcttataacccattattttaagctgataacactgcttgcataaacaaataaacaagcaaaaataaaactaataactctacactttaactttgttcccctgctttttaaccttttgttgtttttgtttataccttattgtactgcctgtgtcttgaaaagctgtgagtcatctttctgtctttctacttaagagtattttacatgtccacagttacacagtgttataatactatatttttctgtgtactttttataaccagtgagttgtgtacttttagatgatttcttcttactcattaatgtcctttttctgattgaagtactccctttagcatttcatgcaggacatgtctggtgttgatgaaatccctcagctttcatttgtctgggaaattatttctctttcatgtttaaaggatagtttcaccagatatgtactattttcaggtaaaagtttttttccataagcactttaaatatgtcataccactgtatcctggcctgtgtggtttccactgaatagtctgctgccagacatattggagcttcattgtatgttatttgtttcttttctcttgttgcttttaggatcctttatctttgacctttgtgagtttaattattaaaaagccttgaggtaattgtctttgggttacatttgtttgatgttctataaccttcttgtactggatactgttatttttatctaggtttggggagttctctgttgttatccctttgaataaactttctacctctatctctttctctgcctctttgaagaccaataacttttagaattgcccttttaaaactattttccagattttataggtgtgcttcattcttttttcttttgtctcctctgactgtatttttttcagatagcctgtcttcacgcttactaattctttcttctgcttgatcagttctgctattaagagacttatggggctgggaaccgtggtttatgcctgtaatcccaacactttaggaggctgaagtgggcagatcacttgagcccaggagtttgagaccagtctaggcaacatggcgaagccccatctctacaaaaattagccaggtatagtggcttgtgcctgtggttccagctactaggaaagctgaggtgggaggattgcttgagcctgggaggtggaggttacagtgagctgtgatgtcacttcactccagcctgagtaacagagtgagatcctcaaaaaaaaaaaaaaaaacaacaacaacaacagagagagagagacgagagactcagtatgtcgattgttttttttttttttttttttttttttgaggtggagtctcgctttgtcgcccaggctggagtgcagtggcatgatcccggctcattgcaacctccgcctcccaggttcaagcaattctctctgcctcagcctcctgagtagcttggattccaggcacctgccaccatgtctggctgattttttgtatttttagtagagacagggttttgtcatgttggccaggctggtctcaaaactcctgatctcagatgatccacccacctcggcctcccaaagtgctgggattacaggcgtgagccaccacgcctggcctgcatttttcaactgtggaattttgtttgatttttttttattattttaatccttttaaaaatttatctgatggaattctgaatttcttctgtgttaccttgaatttatttgagtttcctcaaaacagctcttttgaattctctgtcagaaaggtcacatatatctctttctccaggattggtccctggtatttagttcgtttggtgaggtcgtgttttcctggatagtcttgatacttacagatgttcattgatgtctgggctttgagtaattaggtgtttattgtagtcttctcagtctgggcttgtttgtacccatccttcttgggaaggctttctaggtattcaaaaggacttgatgatacggtttggctatatccttaccagtcttgaattgtagctcccataattcccatgtgtcatgagagagacccagtgggaggtaattgaatcatgggggcaggtcttttcccgtgctgttcttgtgatagtgaatgagtctcatgagagccgatggttttataaaggggagttcccccacacaagctctctcttgcctgctgctgtgttgtaagacatgattttgctcctccttgccttccactatgattgtgaggcctctcagccacatggaactgagtccattaagcctgtttttctttataaattacacagtgttgggtatgtctttattagcagcttgagaatggactaatatacttgagtattgtgatccatgccgtatctgctttaggggacaccccaagtccagtaacggtgggttacttgcagactctgtagttcttgcagactcatagaggtatcaccttagtggtcttcaataacattcagaagaattctctggattaccccccaggttccaggcaggtccagagatactatcttggagccagggacatgagtcagaaaccttaggaatctacctggtgttcaattctactgcagctgagctggcactcaaactacaagacacagtgcttcccactcttccctccccttttcacaggcagaagagccttagcccgtggccatcaccaccacaggcccacggagagtactgccaagctactgctgatgttcacaagggccaagggctctctcatgagcttgtcttgaatgctgccaggccgggactcacccttcagggcagtgggcttccctctggcccagggcaggtacagaaatgccatcccagagccaaggcctggaataaggtctccaagagcccacttgttgctctacccttctgtggccaagctggtacctaaagtgcaagacaaaatccctttactttttcctctgcaagaagaaggagtccctccccatagccaccacagctgggaatgtactgagtctcacccgagtcccacagtgtactatctggatatcactctggctattcagggcccaggggctctttagtcagcaaataagggatcctgtgaggactgggccattcccttcaaggcagtgggttcccttctggcctaggatgtgtctagaaatcagagctagggcctggaaaggaggcctcacacctctgcctggtgccctgtcctgctgtggctgagctggttttagagatgcaagacaaagtcctctttattcttccctctcctttccttaagtatgagaagggagtctgttttggagctacaagctatgcttgggggaggggtgatgccagcactcccttagccactctagctggtgtctcagtaggttgtgtatcctccacgtccactgcctccaagcccagcacagctaggccttgcctaggagttgcagtccttgtggcctagactgactttcaggtttatttagggccccagaacattttagtccatgctggtgtggcttgctggaactcaggttcctactgctaggatgggtgatgcctgtctggctgtggctcgtctgaatgcttcctctgtgggtgggcatcagctcagttcagctcagttttgctttctactgtgacaggatggcactgagttcaatgtaaagtctcacagttgctgcactgtccctctcccaagtacacagattttctctctgcagcatagggccgctgatgggagacgggggagggatggcgttgggatttaagactgtctttcctaccccttcaatgtccctttcagtgatatcaagttaaaaccagctactgtgagtgctcacctgtttctcggttcttatgaaggtgttttttttgtgtgtagatagttgttaaatttggtgttcctgcatgggggatgattggtggagctctctttttggccctcttgttcctgcatattatccatttttaagaattttttaatgtattgccaaacggtgttccacaaaggttcgtacagttatgagtgcacagtttaactattgcctggatattatttagttgtaatttgataggaggaatcattgtctttgattcctaaaggagttaaacattttttttttcactgccttaagaaccgtttgtatctcttcttgtataaaatataacacaggcttccaaatagatacactgtttctccacagaatgtgtaagttattgctgtcatatggtactttgtagtttagaagtacggcacttatgtttctctcagcttctctctgtagtggcagttcaaatataatagatgaagaaaagtgaggttcagagagattaaataagtggcggagctgagactagaacctaggttctatgacttatgttttttttgtttagagattataaatgtttacttctcaactttctgaagtttagaaacaaagctctgggtaattgttttccttagtaatgctaaatgctttatagatcttttagaaattcgattgtaatttctatagcgcactgatagaaacatttttcatctttatggctatatggctatatagtttttctttatgatgaccacttaaaagcagttgaatactttcacatgagacatttcaaggttatgtattttattagaattttcagtggccaaaaagtagcgtcttttttgctttatattgtaacttcattcaggattcaaagttttgatagtaaaatttcagtaagtatttgttgtcttccacagtgtataatgaggaagtattttatttaactactttttaaatattgtccaactggaaaccagaaatatcactgatgtctcaatgtaaaatatttaactattttttaaaaattaggctaaatgatgttcagggaatgggcttaaagaaaagataataatgttgtttgttgcaagtaggaaaatgattaacaggatcttactggaaatagtgtgaaatattgcaagagacaaagcttacaaagagagaggagttctgaagtcgggtaaaactaatatttttatgaatattgattatttccatttttaaattgatgtgaataatttataggtacagttcttaaaatatgcctaaggtcctctattgaatgtattattttgctctcccatttattcaagcccaggcagcattatatagttttccccctttgtttaagaaagctttctagataactgccaagaatttcatttctttttttcagaacttgtattgtctaaaagatttgagaaattttaatgtgttatcataatctttaattaaaatacaatttttaatttttgtagttggcttggacgccttttctggctgcattcagtgtgggtctacaagattgtgatgatactgaagtagcctctctttgcctggaaggtataagatgtgcaatcagaattgcatgcattttcagcattcaggtaacagagaattttgtctttgtagccagtttggaacattaattacctatgccattacaatagtttaaattacaataattgtttatgtgtgacattaaaaactaatttcaagtttatgatggaatttaaatgaatcttaatgtttaagcttctgagaagctgttatagaaggggtagttctatactgatctgtctaagtttatcattataactttggttacagttttttttctctattgaagactatacagaaagttttcaagactttgaattcctatgttaatttgaacatcttgtttaaacgaataaaatatcttgttgaatcatagtttatatacaaggttgtatatattttatatgatttcataacttaagcctaagaacaggttatctttaagacatgtaaatattgaatacataattttcatgaaagaagtcctttctagtaatttatatgctttgaggaacttttaaaaaaagaaaaattcattcaacatttaattataaatgctaatggcttgcaaaaagtatagcgtagctgtggagaaaatgagcaaatgtataaatcatgtttttgctaatctagtaatcaaaacaaaagtgcttaatgaattttttttttttactgtgtgaattcattggttatcactaaaaatctcaatttgacaccaccactgcctttggattttagaaatgtatgtcgtttctgcttcatgcatcatcttaaaatgaatgaaaataaaaaacttgtggaattatatgtaattcatgacaagtaaaacttactaaacttacaagttactgaacttacgagtttaggagtggaggtttaataggcaaaagaaagggaaaggagggccaggcatggtggctcaagcctgtaatcccagcactttgggaggtcgaggcgggcagatcacgagatcaggagttcgagaccagcctggccaacatggtgaaaccccgtctctactaaagatacaaaaaattagcttggcatggtagtgggcgcctgtaatcccagctactcgggaggctgaggcagaagaatcatgtgaacctgggaggcggaggtcgcagtgagccgagattgcgccattgaaccccagcctgggcgacagggtgagactctgtctcaaaaattaataaataaattaaaaaaaaaaaaaacaaaatcttactgaacaagtaaacagagtttgttggtggggaattaatcagtctgctctatttagaactgtgtaaacatacttttctcttttttatagctggagagagatgcatatgtccaggcactagcaagatttaccttactcacagtgagttccggtattactgaaatgaaacagaagaacattgacacaataaaaacacttatcacagtggctcatacagatggaaattatttaggaaattcatggcatgaggtataagcactttattttcaactttgcaatttggtttataaaatgagctaatgctaaatagtccatcattgacatgcctaaatgttaggggagaaaattagtacatttcgaataagtacgtttagctttttaaaataatctatagtgtagtctgtgtttaagtcctggctgcatatatttaaatctttttgaagatatttttaacatggaatttaacatttttttcctttttgtaattaagattctgaagtgcatcagtcagttggagctggcacagcttataggaactggagtgaaacctcgatacatttctggaacagtgcgaggcagagaaggatctcttactggaacaaaagatcaggctcctgatgaatttgtgggtttagggctaggtgagaatttttacaaagtatcaaaaattgtttttaacttcctcattataagtcactttattgtagtaatgaaatataattagaaggagaagataaaatgccttttgtctaaccttatgagaaaaagcaagatgactaaggaactaaatcttttttgcctggtctggtttgcaacattaaatgacccttagtttcaggcttctctctggttgttggagaaggatacagtgtgtagagtttttaaattacttgcttttaaaaataagcaggtaacttgaatgtgtgaaagctggtatcaggtaatagttggggcaactggagaaagcattcacatttaattgttaaagcaatgagcaggcctaaccagcctttctgccagtatgaaacctctccccatggctccccatgcgctcaatatgaccaggaacttccacatttaaaccagtagaacaaaagaaaacattagcaaaaatgggtagagaagaatgaaaagcaatacattttttagtcataaatggaaggagttccaccagggaagaaacagagcttattagactttgaccttaagtatttctgggtttgaattcttctgtattttttccttattatgtgtaagttactttagttcgccgagattcaatttctgcttttgcaaacaaagtaatatctaatcataggattgttaggattaaataagaatatatatgactggacttagcataatggctggtatattcgaagtttctagatattctctgtccatccctccccaaccccccacctccaaccaatctggacgcattacttagagcaggaatcttctatcttttagtgattcctctgttgctgctagcagtgaaaattcttagaaaccccaaaagaatttcaaactttataaaggatccataggaaaagaattaaaaaccaggaccatgatatggcttcaagttggactggggaaaactaattcccagtggtaatcaactgaagcagctagcaatgcagtctgtccctccatgatagcatagatgctatagtattgtaaggtctgggaggtgcaggtgtagacttgataccttggtgatctagcagtaagatttagaactacctgagcacctgcacaatgattagaagcccaactttatacattagaactgtaattactccatggggtaacatgagatgcagatgaaaactattttcaggcaagggaagtgaatgtgcactgattggctcagtaactttgaaaaggcctagagagtgtgggaatgccaaaataatgacaggtgttaattgctgggcctgagttttggcaagtaggactacagaattaggttacactaaaaataaaacaccagtgggatatcttctagaagttttagtcaaacgagaaataatgatacttgctgataatatttactggtatacttgaaaatgaattaaaattaattcatgtactgtgctacttaggttgcaaggatatgagatgaactgtcttctcccttcagaaaaagggaatttacagaaagatacacacattgaggcctagaaatgaaaaacagttcaggcttccagaccattctcaagaccagtaacacttattttatgccttatttaggttttctctgttatgtacttctctttttggtctgcaccattctctgctcagtcctgactccatgctccattttgaatccacatcctagaaggagctagtctgtggacttggcccctgttgggcagagccctcccgttgggccgtcccgttggataaccagccaacccatgtggcaaatggctacccttgtccccctgtgcctaccaaggtcagacagcagatgctttctggagcagaatgttgtcatcagaatttaagctagaagaagatgtggtacagtcaagccagtttagtctgcatatacagtggatacatatatatatatatatatatatatatatatatatatatatatttttttttttttttttttaactaatatcttttttttttttttttttttttgagtcacagtctcactctgtcacccaggctggagtgcggtggtgcgatctcaactcactgcaacctctgcttcctgggttcaagtgattcccctgcctcagccttttgagtagctgggattacaggggtgtgccaccacacctagctaattttttttgttgtttgtttgtttgtttgtttgttttagtagagacagggtttcaccatgttggccaggttgatcttgaactcctgacctcatgtgatctgcccgccttggcgtcccaaagtgctgggattacaggtgtgagctactgcgcccgcccatatcctcttttattaatggtatctctgccgtgagtattccatgtaaccaagttgaccgggttgagtatatatttatcatactttctgactgatagaaaaaaagtctgtactttcactttttggaaatacgaaactttcagttattaagaatacatagtagataattattagatttgaattatatgcattcttttttttctatttttttaaagacaaggtctcactctgttgttgaggctggagtgcagtggcatggtcataggtcactgcagtcttgaactcttgggctcaacttttttttaaattaaagttactaaagtaaaagcctgtcccaggctttcactatgtttttttcctatttcagtatgttgcccgggctggtttcaaactccgggcttcaggtgatcctctcacctcggcctcccaaaatgctaggactagaggcacgagccatggcacctggactgcatgctggtctttcaagagataccttaacatttaaaaattcaatggctttgtcacataaatgttcagagagtattcatgacacatagtttaaaaaatcttatttaacctaaatatgccctctctattgtgattgcttttctttctgctttcttttctacataaccatccttctaggtctaggttgaattagtatttcatcatacgtgaagcctttcttgagctaacacccctattctcttgtgttgtgtgcttttgagtaaatttgtttgacaaaactggaactctcattaagggatttcacatatttgtgaaatgggttctttggattccaagacattttttatattctttgattcctttaaatattttattattaatgattttaaattatatttaaatataaaggacatattttgacacgtgtgtgtgtgtgtatatatatacacacacacacacacatatatatatatatacacacatacacatattttttccccacagaacatatatatatttcctctgtggaaaggatatcctgttgatacacaaaggaagttatcttatgattggcattgtttttttctcataggtttttctttgtaaaattcctgtaacatgctgtgcgtgtcaagtttgccttgacactatttccctaccaccccaatactgtgtcacttacttcaggctttcattcttgttcacttgtattatagcagtagacttttagtttatctctctgatttcaatattttttcctatttcagtatgttctccagatattatcagtgttgtcttttggaaaatagattagatcatatcaatcttctaaaagacctaacggatccctgttttcgaaagtagtacattaaacctaagggtcaaggctcttcacattcttttttctagtctgtcttttcagctttatctcctactgctgttcttttcccttcttcctggtgtctgccaatccttcattatggctatactaccaagtatgtgaaaacatgatgtacagttgtatgtttccattactttatatagctgcccctctgtctcaattgcttttctttctccttccttttctacatagttacccttctaggtccaggttgaattaatatttcatcatatgtgaagcctttctatgagctaacaccctgttcttgtccctattgaaattagttctatttagcaaacttttattctatgtagttagttcatttcagccatgaagtagtcattacattgcattgaagttcattataaacatatctgtctctcctggtgtaaattattaactctgtgaggacaggggttacatctttttcacatcattcagttcctagaatagaatttgagttcagcaggtttaaatgatatcatctgttatgtttgcattcagaagggcatttattgagtgtttggtcactcaggtcaagtgtttgtagagcacctgctttggacttaattttgagtaaggtaggaaagtacaaaaatgaatattacttgattcctaaccttaggaaactttatctggttgtgaaggcaacattaacacacctgaaataatttatatgcaactgtatgaacgtaattctgatttgagtagtacttagctaagtaaatgcttagttcaaaggcagatgagaacaatggagaggaacttttcattgagaacccaaattgagtcttggtaggtaagttttagatagttgagggatggcacattttggctagactgttgaagggaagtgctttaaatgctagggtaaagagtttatattttatcttgtaagtaacagtaagcagaatgaaggagacgatttaggaaataatctggcagggggatgaaagagagattgaagagggaaataattaatggcagggaaatcactcatgaaatggtttcagtaatctaggactgagattatgagggccagaactaggtaggaatggaaatgaacaggtgatatgaaaaacagatcagaagaaaaatttagtgactagttgaatattgatagtggaagaggggaaggatatcaaaggtgattctgaagttaagaatttgaagactgggaatattgttattctcctctccaacatgtggaaccagtttcaagggaaaagatgaatgattcttttcaataaaagggtgttagaaaatacaggtagaattttcaactgacctttgtaaataggggactagagattaaatgacaagggaagtctaaatttttggagttgggatcatcctcagaaggtatcattggaactgagattagtgctgcatttctttaaacattaagggaaattatatctaatatctataattttgtgatataaattcacagtgcccctactttgtgtgatctttacaaacatagtttgtgacttataaccatgtgttgtatactacttagtaaagttcatttgcacatttggccttgttcatgtcactgatatcaaaagaattgttcacctgaagcattctgttattaggaaagcagttgatttcagaagtatgttttagaacttgttaagtgtattcttctactgaattattttcaaactgaaatgacttttttttatgtgtggtagttggaggaaatgtggactggaaacagatagcaagtattcaggaatccattggagaaaccagttctcagagtgttgttgttgctgtagataggtaaggtattcattttattcccttttcagatgattactatttcagttctttagcatttaggtgttggtaaaaagaaaaatattattgccaaaatcatttttctaaagtaatataaaattatattgtgatatgctgtgatttagatgatgaagtacctataattttgctttttggatcatagaatataagaagatgataaacagtatgaaaatttaagttacaatagatactaatgggcattaaggaaatggtaacctcgatggaaaagaatacaaatgttttattttctcgtagaaaacttattccccttattatccctatttgaaaatgttgtgtagtttatttttctgggtccacaatatagactgcattatggatgaaatgaaaggttttattggcaattcccattataaacttttttggaaaggacttcagaatttatatattatacacatcaccacatattccccatttttagtttgttttctaaaagaaaacccatggtatgctttatttactacagaatatttccaattttaaaatgtccagcacatagaacaatgtctcctattgttacttgaagtttagctttttctagataaatgcccccaaaagtgaaacattttacaataatgttttttctttttcttcctcccaccccctacttgtgatggaaactttcaaaaacataatttgtacaaatctttccttgatagtctggaaactcatgctgatccattattttactttgcttcagataaaactttttgctctaagtacaggtagaactagaatgttcagtggccactgaccctggaagtactccatggaactttttccttgaattcttaatgtctacttgctgttgttttttgtgttttgtttttttttaagaggagagtcatttgcctatttttttgtgaagactgaagaaagattatctcatacctactgtataacaaacatgaaggcttgccacagatgaggcacttgcaaaacgctttacatttaatcctttcagtagcctcatgagatgggtattcttgtcctcaatttacaatgaggaaactgagacagaaaaagattaaataacttgctcattcccacaactaggcttgtgtaataagcatgcatacttaacctctccacctttcagcctgcatgtactactgcagagctatgtaatagcccttctgctaccgggctagctttcttgtcaatgattttcttgccttccagaaaaatcatcttcactgtcattttgagaatctattcaggcatgatttaacattttacctactgtttctgcttttataatgtactttatatgaccacatccagttctaatttatcttcctatccactgtttgttacagagggacatgttactcatttgaaattacctctctgttttaagaatttatgctatttcagaggagatttagcataaattttgttagtactgtgtcatcacaatcttgtcatcgccagatacttctaaaaacataaatccaatatcaaattttatacaaaacctcagtattgcaagtttttgcttatagtgaaaacaccgaaagttatatatttgatctcttataatgttgtattattcttaagtggtacatttcactttcccattaaatgttttttgaatatctgagtttattttcatatcgttatgttcaaactttggtccattacccaactcagtggtagtcaagacagtagtgaaaatagtgtcaggcatcaatctggggagttctgtacttacccagcagacagtcattttcctgtccttaggcctatttttctgcataacctgttattacaagtacaggaactaaagaaaaaaatttttgtatgtttagttctttatagcttctggtttattaaccaacagagaagagaataagattttattacagactttaaggtgataaaattttctaattatctacttttgtattaggaatcttgtattattagaatataggagaagaatattgggcccttcaatctgggaataactgatcctctagcatttgctaggatagaattttttatgtgttgttaaattagaccaatttcataatgaatattactaaactatgcaggagatagactttatccatgaatggtttatttttaatagctaaaaaacaattatttagcatcatagtttttctctttatggtttttttatacataccagatctagctataaactggctcacctcagactttggaatatttcacctatcagaaaatacatacagcttatcccaacttcctttgctcataaatacttttcatttaggcctaagaaataaatgttacctctgatatattcattgtgaaaaaaccttttacaggtataataatataggctgcttgtgtattgcatacagtttaaaaattgatttgatccagaatctgcaaaagttttgcaaaccattttttgtttttgcatctgtattataatgtgattaagcagtaatcttaccaatgtttttttctaatgctttttaaaaagcacatgatttttaatattcacaaacaaggttcttgtgcttctgtcctttgcttttctatggaaaatgtagaaaccatttcataggctgattttatgaaacacagctctgttctcttgccttaatgttaaggcttgactttaaatgcccccacagactgctgtgctctaccatacggcttatctttagtggagcattactagaaatagagtgaccccctcagagactatggcagtgagtaggaattgggatgccctttctcagaatggatgctcccccaaccttccaccatcacaacagtccacaggacctgtcttattgctgatgatagttctctctcctgttgcctttgttctccgttatgtcaacaccttcagaatctattgcttcccttccctgtggttctatctctgcttttgttctttctttacccctctactgtttgccatttgctttcttctcagttaaaaactctttttttctttgtttttgtttgtgtgccttttcttgttctcctatactatttacttttgactgtattcatggtgtggcttgtttacagccattgccttccatgagaatacctctagtttgagaaatcagctgaccaaattcgtagtctggcagttttcatttttgttttgcgagagctctgtagacgttgtatatctttaatttctgggtccagtctaatccctggattaagaggggccatattacttttgatttttccctcagattgtgttttctgccagattttggaattactgcttcattctgctgacgaacgatatagaaaatcttaagacatttctttagcaggacttcacattctgagtcatcatgttacccgtttctaaactgtttttcctatattgttttttactcattgtcaggacacatagacatgcaaggacactagggttaaaaaatcatgatatactcagaacatttagattgtgatagtaggaaaaaagggttgaatataccttttgctcaggtaagtgtgaggcagtatagaaaagtggttaataggatagactgtaatcaccctgtcctggtttgaatcttggctctagcacttactagttctgtgacttagaggaagttattaaatatctttgtgcctcagtttctgtgtttataaaattggggatttaatagtacatgcttcataaggaatttgtgattatcaaatgagtgaatattgatattacactagaaaagaacccatcttgtgattggtagctattactgttactgctatgactactgtgacctgctcctgcctttaaagttttcctttttatcatgcaaatcctattttgtgcattctaagttgaggaatgtcatccttcttgaaagtgacgtcaaactcttggttgcaaacccagaatatgggttaaaatgcagactttaaaaaaggaggactaatgtgtttatgctgaaattttttatgaaactttgaaacaaaaaaagagctcagcaaagaagaatgggcaaagctgggcagtgttagcttaactccaaacatttgaatgccctaaggaaagtggtttggccaattcttgggtaaactgagactatttgcaaggttatattaagtcacttttagtgtaaatgaactttctaatcaaatatactttactggtaaaaatacgtcaaatttttcattttaagaacttgcttaatgctagacaataatcaggaaagaatctgtagtgtgccaattattagttttacaaattaatatttttcttattcttagaatctcatatctatccggggtttgtaaatctgataaaattacagcagtatatacttaccctaataataatattgaatgtaaactggttcacatggagtagaggtggaggggagggagaaacatccagactacacttgttactaaactaaatgatgaaaaatactcatttgaatacccaattttttgttcccttaaaacataaaaatagctagtaccccatgccacatacttttcaattggaataagaacagtaacttataaattttttaaattgtgttttattttccctagaatattcacaggatctacaaggctagatggaaatgccattggtaagtatgggcatttattctacttcggaactggcttggggctaaaataactttaatgttgagctaaaaaaaaaatgtatttatattacagtggattttgtccgttggctctgtgctgtgtctatggatgaattactttccacgacacacccaagaatgtttagtctacaaaaaatagtagaaatatcatattacaacatgggaagaataagattacagtggtctcgaatttgggaagttattggagatcattttaataaggtatttgaataactatggtgtttgtttacatttgtagtatattttttgtttagaatgtccttgtaatcaaattgagcctttttcccttccaagcaattatttattactttttaatattaaattagaaaaccctgtgaatggtgtttttctttttagaaatgattgctctgggctttaagaatttgatttaaaatatctgtttttcttgttgagaaatagttttagcatacttaatgcctttatggaaaatcttaggatttacctatctatgctattctatactttttctaaaacaaaaaataaagaattgtagatttttactgctgatattaattagcatcgtttatttctgtcgccattacaggttgggtgtaatcctaatgaagatgtagctatttttgcagtagactccttgaggcagttgtcaatgaagttcttagagaaaggggagcttgctaacttcagattccagaaggatttcttaagaccttttgaacatataatgaaacggaacaggtactatatttgttgaattgcttaatagaaggaaaatcttgttgttttccacagcagggagaaaaacagaagaaagggggaaaaactgatgagttttatcggtttgcatatccaagcaattatattaatatttttaggtctccaacaattcgagatatggttgtacggtgtatagcacagatggttaattctcaagctgctaacattcgatctggatggaagaacattttctctgtatttcatctagctgcatctgatcaagatgaaagcatagtggaacttgcattccaaacaaccgggcacattgtcagtgagtattctcttagctgtgttcaagtaaaaggaaaaaaaaaaagcaaccttaacgtgttcagaagatgattcaagtaacaataagattatggcctttaagtttaccaagctttgtctacagaaccagagtaaataaaaacaattaaattactattatagttaacatttattgagtatttaccatatggcaaatactgtgtgcacttttcacgtaatttctttaatcttcacagttaaacattattgtccatcccttttttcaaaatagattaggaaactcagccccagaaaggttaagcagtctatgtaaggtcacagaactagtgatggagatggtcttgagacccatggagtattaaagcaaagcctttatttttgaccagtaagtacattgcacagccttcttcaaggaggagtccccttaagttcaagggggactgactgaaatactaagattataagttaagcctatatggaagatgacaatgatgaccatcaacatcaagaatcatggcatcatcatagctatcatttattgcgtgcttgcttaagtattacactaagcacttcacttatattattttacgtagtgcttacagctatctgtgtatattattattatttccattttatatcaagaaaccgagatacagagaggttaagtaattttgtatattcattcaaccaaagttgaatcagtacctaccgtgtaccagtcactgtattaggtgctatgtttataatgtaaacaaaacagacaagttttactattctcaccactcagggcagtcagttaagtggtaaagatagtcttgaacttcgtatctgttggatgtcagaacctgtaacaacctttaagaggaagtgcattacatctagatgttggtgtatttttggtacagctaagaataattgaaaaattatagtaatatatatttttctctattttagcccttgtatttgaaaaacactttccagcgaccattgattctttccaggatgcagtgaagtgtttgtctgaatttgcgtgcaatgcagctttcccagacacaagtatggaagcaattcgacttattcgccattgtgcaaaatatgtgtctgatagacctcaggtatagcgtcatttagtaaacaaaattttgcagagtattctttccaatttgaaatcttaagtttgtttgggaattgagggtatatgaagcatttatttttcagtaatttgaaaaataatctgagcagcctgattccaagttaggatggttagtgattataactaaccattattgaaagtgtcaggtatttttctgagtgtttttcattaacttgtattaacttgtttaatcttctaatggctttatggggtagatagtgttatagccccatacagacaaagaaactgaggcacagagaaattttaaaatgtgcccatagtttcagggctagtaaagtagaactagggtttgagccccagcctgtgtttctaaccattccctacagtgcatcttgtctgtctgtgctgtgtaatactgaagctgactgactatggatgagaataggcttaagctctaaagtaaaaggttgaattgaaaatctagctgccatatttaacttgtatatttgaatctatctttgtaactgtcataagagaaagtgatgtatcgtagatttggtaataagattttattccgtactaccatggaccgatcaggtgcttggtactttttagatacgtcaactcatttcaccttcatacttcaccagtgtggttaatgtggctgtctggtatcataaccatttaagtgataaaaatggaaacctgaattaacctggctaataatgcagaaagctggtgacagttgaaagtgaagctaacttttggattctagtccagagctctttataggcagttatgttttgcctatttcagtggcacatatactaaaattgtaggcagttatagtgtccattttttataaattattttttattaaattgctcactggttatttgtgaagcatttaaattattttttgagaagttagtatactgaatgtatgggtgttatgttttgcctttaataaccctaccttttttcttgaaggctttcaaggaatacacaagcgatgatatgaacgtagcacctgaagacagggtgtgggtgagaggatggttcccaattctctttgagttatcctgtatcatcaatagatgcaaattagatgtaagaaccaggtaacaatctatatttgtaattaaaattttggatttattttgactttaatcaaattaactcttctttataaacacaatctcacagttaaagaccataaaatcaagtgttttgtcaaatatattaattattaggtatattttaaaatatgttaatatgatttaaaaatattaactagagcaaaataaaaatggaaatactacattatttttaaaatatttgattatagcctccatttgattttagcttctaagttaatttaatcctttaaacattccgtcttttcatatatttgtttccaataataagttgaagttagtggcaaaatttattttatttcctgatgaatgatagaagaatttttaactgcacatccttgctgggttttaggtgaagaaccatttctttttgtaacctggtcagtaacatagtttggaataatatagagctattcaaatagaactctttcaaaagtatattgccaataaaagatcattatgaacatatagtcaatctgtaaaggaactattatgggtattatgtaactggccaaatgctaacacactgttcttaggtcacggctcacatgattcccatagtagtttttttaccctgtactttgccacattgaaatggccagcttgtgtgtcctaatatctgtcaacctctaaacccaccgtgagttcaattttatggtaaacaaaatcttttaggaatctttccatcttatttggaagaatcttctgttatttggatgtgtaactttatcgaattttttgaatttctaaaggtagcacagaatgaatctctcttttctcaccttatgccagaaccacccccatcccccaccaaggttaaatttgacttatatcccaagaaatttttcatttttatagtattatttgttacaacagaaattcgtatgaaatagataatcaaaataggacttaacccttagggattttaattatgagagcactatagaaaaacattttattttatatttagacatggtggattgtttatcagtggacctgttaggaacttgttaaaattcaagatagccccatttcagctgtccacctgcctcagtggagcggctgacatatcatgactagcaggtcatgaaaactcagcaccctctcccctcaccctttatttatttgtagaagtctgtttgatggaggatccacctgctttcttagccttctgttgcttggcactgtgataccttatttctcaccatattccatgttcagattatgggtagattccagttgttaaagaggttgtgtgtgttctagttagtaaaggagagagaaaagatcagtaaactttgttcagtgatggcctttgattttcctacctcatcccaggatatgtatgggttgctatttagcttccatcttaaaatgtgggccggatgccatggctcacatctgtaatcccagcactttgggatgtcaaggtgggaggattgtttgaaaccaacctaggcaacatagtgagaccccatctctttgaacaaaaagttaactaggcatggtggtcatgcctctagttcctgctgctcatgaggctgaggcgggattgcctaagcacaggaggttggggctatggtgagccctgatcacaccactgtactccagcctaggcaacaaattgagactctctgtctttaacaacaacaaatagtgcagcactataattggtataacactgtgtagaaagaatttcttgtgtgcattcttacttaattcttccaaaattctctagatttggggataaataccgaaaattaaagtcccaaatatagtcaggcatcatttaatgacaggagtatgttctctgcaatgcattagtaggcaatttcagcattgtgtgaacatcatagcatgtacttacacaaatctagatggcatagcctattgctccttgggtacaacctgcacagcatgttactgtactgtaggcagctgttaatacggtggtgtttgtgtatctaaacatatctaaacaggctgggtgcagtggctcacgcctgtaatctcagcattttgggaggccaaggtgggcagatcacctgatgtcaggagtttgagaccagcctggccaacctggtgaaaccccatctctactaaaaatacaaaaatttggccaggcatggtggccatacctataatcccagcactttgggaggcccaggtgggcggatcatctgaggtcaggagttcaagaccatcctggacaacgtggtgaaaccccttctctactaaaaatacaaaaattagcgaggcgtggtggtgcgcacctgtaatcgcagctacttaggaggctgaggcaggagaatcgcttgaacctgggaggtagaggttgcagtgagctgagagtgccactctactccagcccaggcaacagagtgagactctgtctcaaaataaaaataaaaattaaaaaatacaaatacaaaaattagccgggtgtggtggtgcacacctgtaatcccagctacttgggaaggtgaggcatgagaattgtttgaacccaggaggcggaggttgcagtgagccaagatggcaccactgcactccagccagggtgacagtataagactctgtctcaaaaaaaaaaaaaatacatacatacatacatacatacatacatacatacatacatatacatatatatatatgtgtgtgtatatatatatatatatatatatgtgtatatatatatatatgcatggaaaaggtacagtaaaaacatggcataaaagataaaacctgtaggctgggcatgcatggtggctcacgcctgtaatcccagcactttgggaggccaaggtgggcggatcacgaggaaaggagatcgagaccatcctggctaacacagtgaaaccccgtctctactaaaaataccaaaaattagccgggcgtggtggtgggcacctgtagtcccagctacttgggaggctgaggcaggaaaatggcttgaacctgggaggtggagcttgcagtgagcagagatcatgccactgcactccagcctgggcgacagagcaagactccatctcaaaaaaaaaagaaagaaaaaaaaaagcaacaacaaaaacccatatagggcacttaccatgactggaactcgccggactggaaattgttctgggtgactcagtgagtgagtggtgagtgaatgcaaaggcaaacactgtaaacttaggctactttaaatttatgagaagatatttttctgcagtaaaaaattaaccatagcctactgtaacttttttgctttataatttttaaaattttaaaaaacttgactcttatattaacacttagcttaaaacacattgtacagctatataaaagtattttctttatatccttattctataagcttttttctatttctatttttattttttactttttagacttttttgttaaaaactaagacatagacacacacattaacctaggcctacacagggtcaggatcatcagtgtcactgtcttccatccccacatcttacgccattggaaggtcttcagggggaagtaacacatatggagctgtcatctcctatgataacaatgacttcttcctgaatacctactgaaggacctgcttgaggctgttttccaattaactttttaaaaatttgtaagtataaggagtacactagcaaataatgatgagaggtgcagtatagtaaatacattaattgttaacataattgtttatcattatacgactggcagtgcagtaggtttgtttacaccagtatcaccataaacatgtgagtaaagtgttgccctacaatcagtgaaagcctcaactacaatgtcacaagacaattggaactttatagctctattataatcttaggggaccactgtcttatatgcagttcattgttgactgaaatgtccttacgtggcacatgactgtattatttttccctataccaactacttaagtatggctttaaaaaaaaaaaaaaagaaaaggaaaaaaagacattttccacagtaaaaatccttggaaacgattgatctttgtgtttactttgggccctggaaaaaacaggattgcccatatccacttactcccagccatgagaggcagcatccagttacttggagtggaagggaatagatacggagctcagcagatggaggacgagggagccttgttccattgcaaggagggaactatgggtttagcatcagtggtggaactctgacaggcgtctcctgtggaagactttctttcccgggagtttctttactatggtttctttaccactgctagtattacacattaggtatcttagggatcaaatagaccaatgtggacttactgttggcctgaagtattgtaatgttattttacccaatcctttaacaaaatcttgttgagaacctactgtgtatgagccatctactacgtttggggatagcatagcagcaaatgagttgagctctgttccagtccttatgagagcctttcaaagaaaattttgttctgttttactctcaaacttttggaaatataagccatttctaaactggaggatgcctgtattttcccagaaaaagcaacaaatagagaaaagattaaaagtgtctaatggttacataaaagtattatttcaagaaacagtaaggaatgaagacggaagttttgagtttcagttttaacacttactcaaaagctagtccatctgatactaagcaatttattcagcaaatatttattgcttgcctcccaggcaataagcactgctgtgtgcctgggatatagcaagaaataaacacagacccctcccctcatggagcttatgccttagtggcttttttttgtaaatccttttgtttagggatgttgcatgaataaggcttctagtattgggtaaaaatccccatttgaaaaagattttccaaaatctaacttttgttttgttcttagactgctgtatatgtattttcttttttggctacagtgccacaaaattaatattcactcaaacggttatccttttcaatttgtaattccatttacagttttttaaatgctgcattggtgaggtaagagtaaaggaaaagtaaaataaaaaagtttacagccaagacctttggagattttttttcccgaatgatgtatcctaaaggaacctgttgttcttacaacttaaattttttaaaacccagtgtcatgtgttaatttcagactagttttaagctttctgtttttaactgctttgtgaactctaaaaactattttaggagaagtatgcttttttgtattacagctttctaattgtgttttgtcattttaggggtttaacagtaatgtttgaaataatgaaaacatatggccacacttatgagaaacactggtggcaggatttatttagaattgttttcagaatctttgacaatatgaaattgccagaacaacagacagaggtaagaggatacacaattttcatttagcttagtcaagttaaaagattctcagtattataatcaatacattttagtgtttcaaattaagtacagaaaagaattcctagaaaatttttctttaaggcatgagaatgtaatactatgtctttataaataagaacactggctgggcgcagtggctcacgcctgtaatcccagcactttgggaggccaaggcgggtggatcatctcaggtcaggggtttgagaccagcctggccaacatggtgaaaccccatctctactaaaaatacaaaaattatccgggtgtggtggcaggtacctgtagtcccagctacttgggaggctgaggcaggagaattgtttgaacccgggaggtggaggttgctgtgagctgagatcgcgccactgcactgcagcctgggcgacgagcaaaactccatctcaaaaaaaaagaacactgtgtgggggatagaactgaattgatgaattgatttttttgttctgttttgttttcagtgtttttctgactttttcgtttcttttcctcattttgatagttacaactataaaacatcagtaactttctttagtattatatagtgacttcttttttatattgagtaaagaatacaaagtaaattttatttatttcaacatattttactatgaaccagttacaatatacattttaggaaatgtgtcaagagagcttcatattttccccttttgttccatacagcagtattaaatgcagacttctgcaattattttttatgggcttgaaaaaaataaattacacttacgttgtatagccctttttttatggtgttttcagataaccatacttcaggaaagtcatttttattttaaacctatgctaatcccatttggacaaattcttacctctttatttccctttcatgttctgtcatattctagagcaaggccggcgttgctattcatgcacttcgaaaaatcataatgttagtatcaagatgatacggtgatggttttttttaataatcaaaacaagcagtgccaaaaatggttaaattattgtatacataggtggttatgggataataaggagcaatagatatcagattttaagttgaggtgaatataacgttctagagggaattcaggggtctaaaaggaacactgacagccttccatttttaatatgaaaacatttatatatatatatatatatatatatatttttttttttttttttaatcatagtagttgattaatggcgtgatgttcattaatgacttttttccccagaaagctgaatggatgacaacaacttgcaatcatgcactttatgcaatctgtgatgtattcactcagtatttagaagtactcagtgatgtacttttggatgacatttttgctcagctctactggtgtgtgcagcaaggtaggtctgtaccagatatgtgacacaaagtgttaaatgtgaccctggtaatatataaatgaattgctcttttctttcctagacaatgagcagttagcgcgatctggtacaaactgtttagagaatgttgttattctgaatggtgaaaaatttaccctagaaatctgggataaaacttgcaactgcacactggatatcttcaaaaccacaatcccacatgcgtaagaagattttatacaactttacatttatatttgtatattgaatgagttggagagtgactagtgattaaaagtttgatagtgactactgatttctcataacagaaatccttttaagcttgtcttactcttacatggatttagatttattacaaaccaaactgctataaactataacaaatacataaattaaactatttataaaccaaaacctttagtctggttaccaaaatttgggacataatgaagtgattctgctgacttttataagattttatttattcagatcaaaccaagcagtggttttgaattggaaaaaaaaaaatctcagcctgtttctgttactgatcttttaataatctaaggaaaatgtatttacacatactatatttcgtatttcgtaacagcttgtcatctttctctaagggatgagtgtgaaatggaattatagtgaggtaggtttttttttttttttttgagatggagtttcgttcatgtttaccaggctggagtgcattggcgcaatctcggctcaccacaacctccgcctcttgggttcaagtgattatcctgccttagcctcccaagtagctaggattacaggcatgcaccaccatgcctggctaattttgtatttttagttgagatggggtttctccacgttggtcaggctggtctcaaactcccaacctcgggtgatccgcccaccttggcctcccaaagtgctgggattacaggcgtgagccaccgcgcctggccaattttatgatttttttttttttttgagaagcctcttactttggaaaatatttgatattaatacttagggaaaggaggtctgaaatctttaaaacttatcagaaagtgttcttttaatgcaaaactggtgaccatattacccttttaattatattaaatgccacttaatttttttctaaaagtacatattttaaactttttactagatgttttttaggaaattgctaaaattagcagtggtcaaagatggactgtttagttggtatgttcttgttactttcttgggcccatttcaaaatatgctggatgtggcatgtggcacagccccctagtgattgacgtggttttggtatcttaaaggctgttgacctggcgacccaattctggagaaactgcccccccacctccatctcctgtaagtgaaaagccattggtaagttttaatcagtaaagtatattgaaattagttatttgtgatgagtaattttattatgggtcaaattcttacatgtaattgtcttaatccattcctgctattaaaaaaatatctgagactggattacttataaatagacattttttttttacaattacgaaggctgggaattgtatgatcaagtgtctggtgagagctgctctctgcttccaagatggcaccacgttgctgcattctcacgtggtggaaggaggagggacagaaaggggcctagctagttccctccagtccttttttaaggcactaattctcatggcctactcacctcctaaaatctctacctcttgatactgttgcattggggattaagttttattatgaatttaggagggaatgcaaacattcatatcattgcaatgcgtttgactcttttaagaagatggtataaatttactgtccagaattgtgaagttaattctttggtcaatgtcacagacaattaatatgtgtctttgttaagtgccatgaagggagtattttaaattatttttaaatataggacatagaacaaaatgattttttaagggttgtgagagaaaggtaccagattacgtagctgtctccatgcaaagctgaagatattgttggatagtatttaaactttttatttttatataatttcaccttatagaaaagtaacacaaaacagtacaaagaattctaacattcacttcacccagtgtattggtttcctagttctaccataaaaaattaccacaaacttggtggcttaaaactatagaaacctactatctcatggttctaaagaccatgggtcctaaatcaaggagttagcagggccacattccctccaaaggctctaagggagaatccttactagcttcgtccagcttctggcggctgttgacaacctttggcattatttggcttgttcacatatcactccaatctctgccaccatctatccatagtctccctcactgtgtgtgaattaaatctctccctctcctttttgttttatgaagacattagtcattggatttagggtttacctgaaatccaggatgatctcatctcaagatcgttaattacatctgaaaagaccttatttccaagtaaggtaacatttgcaggtatcaggggtcaggacttgaacatactttttaggggacaatattcatgccactatggtctacccactgacacctaaaaattcatgtccatcccatcggcaaaagatggtcaccccattctaaggtccccaaaagtctaaactcattacagcatcaacactatgtccaaaatcccttataaatataatcaaaagtccctaatctgatcatccgcatctgcattaaggatggatgacactcttgagtatgctctattctggggcagaattcgtctccatctgtggacctgtgaacctagaaaacaggtttgtaacttttaaaatacagtagtgggacaagcataagatatacgatctcattgcaaaaaggagaaattggaaggaacaaaggatcaccagtcctaagcaaggttgaaacttagcagggacaattccgttgagttttaaggcctgagaataatgctgtgtggcttgatattctgccctctggggctatggctggcttcttcgggcctgagccctacactctcagttgttcttctttttcttaaaggttagcacgtttgtagctctgttgacccattttctgcctgtagaatcctagaattcagcctcccttcctcttattgtttctgtccctttcattctaggctggccatatgtctgctggtatatcattctcaaaatccttgtgggtcttctgtatgtgttaagagaaaccatgccattaaacaagagtgtgatccacacatctttctggatagtcctgttatgttcctggcttctgctgagatgatcgattggctccactagatatatacctaatctctttggcaaaaagttgtccagctattatagccttggccttctctccaaagcatgctttcctaacaattcatttcctaattgtagcatcgttttcaatctcgataggcacaagatcctctcacatcatcaactggcagtttctttttgcttaacagttctttcatcaatatatcttcttcttgcattgtactataaacagcaaggataaaccaggccacaccttcagcactttgcttggaaatctcaactacatatcatcacttagaattctgctttccacccaacaattcagccaagctttctgccactttacaacaaggatcacctatcagtatctaatatcatgttcttgatttccttctaagacctcaccagaagcaccttttaacattcatatttgtaccaataatctgtttcatggccatacatgtcttctctaagatggtagatgctttctctcacacattgcacttccttgtggatcctcaccagaactacatttgacatccatatttctaccaacagtctcttcagggcaatgtaggtgtttccctatcatgtgtctcagaactcttccagcttctaccattgcccagttccaaagccacttctacatttttaggtgtttgttacagccacattccatttcatggtatcaaaatctttatcagggccagcaaaacaaaaccagcaggagagatttgtatagatagatttaaggaactggcttacgtgattgtggaggctggcaggtttgaaattttgtagggcaggcaggcaggctggaaagccttgggctgctgctgaagctgcagttcacaggcgggatttcttccccaggaaaacctgttttgctcagttttgaaggctttcaactgattggataaggaccatctagattattgaagataatttccttaaaaagtgagctgactatagatgttaaccacatgtataaaataccttcagctgaacacctggaatagtgtttaattgaattaattgttactccttcgacttaagtatctggcttaagtacataggatattggtattgtgtcctagccaaattgacacaaaagtaatcattacaccaggtttctccaaatgttgtcattttacatttgtttttaccaaccccagctgtcctccctctttttatcttgctaccctgcctcccagacacacaattttctgaattctttggaagtaatttgtaaacacaatgcccacttatccctaacaatcaaaaaattatccttgaaacaatactcttatttaatctacaggtcttttcaaatttgtactgttctcccaataatacctttgaattttaaagccaggaggctgtaaagtagcaaactaacgccaactgaccagatttgttccccacaacttttaactttcttaacaaattgtcaacggttaaaacttagatttcacagaaaagtatcattctgaattgcccttgagaactgtgacatctatgctgggcccgtgttgctccatgactctgttgtgctgacgtccattcagaatagaacccactattacttaggacatcccaaaaattatcctcatttacattggttagtgagaaaaattgagaaaacaatatacctaacatccaaaaattcctctaatacagagcaaggtttttaaatccctaattttttgacctagtttttgtgtaggtttagttttctggagagaacattttagaaatcatcagactgttcaagagggcccgtgaccaaaaatatttaaaaaccagtgctttcatttatcttcagtaagataatacatttttaattctgagaactgagtaatttcttccttaaaatacacttaagtccaagctaacgtattgttttgattattactatttctggtaacacaggcccatcttcctttcacacagcaggtaaggttgctcaggctgggactgttacgtcagaataacaaaagctaagcactcctcctgaaaccaggttctctcatgtcttgagtgtgctgtgcctttataatgaaagaaagctcgaggaggagtagggtcagctgccatttattgcccaacactgtgctgctagtgttttggatttattatatctagttcttaacaacctgcaaggaaagtatatcatttctttttagatcagaaaacctcacctcaggaaattaatcatttttccaaggttacactcttaataatactggaacctgtggctgggcgtggtggctcacgcctgtaatcccagcactttgggaggccgaggcaggcagatcacctgaggtcgggagttggagaccagcatgaccaacacggtgaaaaccccctctctactaaaaatacaaaatgagccgggcatggtggtgcatgcctataatcccagctgctggggaggctgaggcaggagaatcgcttgaacccaggaggtagaggtcacggtgagccgagatcgcgccattgcactccagcctgggcaacaagagcaaaactccatctcaaaaaagtaaataaataaataatactggagcctaattcttgtgtaggtctgttggactccagggtccagcatctcttcatgatacgacactcctagatagtcaccttcacattgacctttctagtccctgggtccatgggtgacagaagatccttttctaaattcacccctgcaaaaggtgtctgtttagatttcatgaacacttgtgggtattgctgaccagtttctctacactttgaagtttcgcatttttatctgttgctgttggatggtttcagacctgagcccagtgagggtcagaaagtcaacttttctctatgtacaggtaattttaaataattttctgattgtgttataactgtaatgtgtaaaacatcattttcatagggacataatataattttttaaaatagcgttttagaaaatattttcacccataaactttattaaccatacttacagtgattttttttttatttattaggatacaatatcacagaagtctgtagatattcatgattctattcaaccaaggtctgtggataacagaccacaagcaccactggtttctgcgtctgctgttaatgaagaagtcagcaaaattaaatctacagcaagtgagttatttctctaaataaaaataaatttgtgttttatgtaggaaagggttaacatttttggttttacttttattattaacaagcatatactataattgattgtgtcatcacttcttttttttttttttttttttgagacggagtttcactctgtcgcccagtctggagtacagtggcacgccatcgtagctcactgcaacctccgcctcccgggttcaagcaattcttctgcctcagcctcccgggtagctgggactacaagtgtgtaccaccatgcccggctaatttttgtatttttagtcgagacggggtttcaccatattggccaggctggtcttgaactcctgaccttgtgatctgcccgcctcagcctcccaaagtgctgggattacagtgtgagccactatgcccggccacttttgttttttttttttttgagacggagtctcaccctgtcgcctacgctggagtgcagtgatgctcactgcaacctccacctcccaggttcaaatgattctcctgcctcagcctcccgagtagctgggattacaggtgcccaccatcacctccagctgatttttgtagttttagtagagacagggtttcaccatgttggccaggctggtctcaaactcctgaccttatgatccgcccgcctcagcctcccaaagtgctgggattacaggcgtgagccactgcgcctggccatgtcatcacttctttactgtgtttatcctaatttggacatcctctggtagatagatgccctcttgcagaaggtcaagaactctgctgatcctgaaatgtcagctttttccgccaacgagcacctgagtcttctttctccacccccttctgcatgccaaccaaccccatgttctgtctgcaaaagtagggcctagcatgccttcctctacccatctgcaacgggaagtagtgaaggaccgttgctttctaagcaggagcaccccacttgtttttgttgttgtttttggttttggttttttttgagacagagtctcactctgtcacccaggctggagtgtgatctcggctcactgcagcctcaacctccaggctcaagcgatcttcccaccttagcctcccgagtagctgggactacaggcacacctcatcacgcccagctaattttttatatttttttgtagggacagggttttgccatgttgcccaggctgatcttgaactcctgagctcaggccatccacccacctcagcttcccaacatgcttggattacaggcttgtgccacgacgtctgtccaggagcaccctattgtttttcttttttttttttttttttttgagacggagtcttgctctgtcacccaggctggagtatagtggtgtgatcttggctcacggcaagctccacctcccgggttcacgccattctcctgcctcagcctcccgagtagctgggactacaggtgcctgccaccatacccaattaattttttttttattctttagtagagaccgggtttcaccacggtagtcagggtggtctcgatctcctgacctcgtgatccacccggcttggcctcccaaagtgctgggattacaggcatgagccaccgtgcccggcaggagcaccctactttttaaggagcaacccttttctccacactgcaccccaaccttagtcggcctgtgcccatttccctcactgctgcccacacccctgtctccatacagggatccacaggtcacctgtattcctcccctcaccttttcacaaaaaagaggaaccctttacttttttactggatcaattcagttccatttgctgaaggaaaattacaacacctagaaaagaccacagcctccttagaggagaacaggacagctttgagaactttttaaaacctgaggtgaaatttacataacagaaataacaatatgcaagtgaataataattcagtggcatttagtacattcacagccaccacctctatctagatccaaagcattttcatcactcctaaagggagccccccagccccataactgttatacagccacttcttcttctcctcttccccagcccctggcagccactaattagctgtgtttgtgaattgcctattctgcatatttcatataaatggaatcatacaaaatacaaccttttgtgtctgtcttctctcacagtgttttcaagacgcatcatgttgtagcataatcagtaattcattcctttttattactaatagtccactgaatgtatagaccacattttgtttatccatttgtctgatgatggacgtttgtatttgtttcacctgtagttgtcatgaatagttctgctacaaactgttgtgtacaaatatcatttgaatacctgttttcagttcttttgcattatctacctaggagtggaattgctagctcatagggtaattctatgtttaacttcttgaggaaccaccaagcaattttctatagccagtggctgcaccattttacattcccaccagcaattccagtttttccacatctttgccagcgccttttttgttgttgttaaatgataaccattctagtgggtgagaagtttacctcattgtggttttgactggcacttccataatgattagtgttgttaaccatcttttcatatgcttgttgaccatttgtatatcttatttggagaaatttgtgttcatgtcctttgcctgtttttaaattttgatgaagtccaatttttctgtttccttttgttagtcatgcctttggtgtcattgtcaaaatccaaggtcatgagcatttcccccaatgttgtcttctatgaagtgttttttttgttggtttttttttttttttttttgagatggagtctcactctgtcgctcaggctggagtgcagtggtgtgatctcggctcactgcaacttccacctcctgggttcaagcgattctcctgcctcagcctcctgagtggctgggattacaggcacatgccactacacctggctaatttttggatttttagtagagatggggtttcgccatgttggccaggctcgtctcaaactctgggcctcaagtgatccacctgcctggcctcccaaagtgctgggattaaaggcgtgagccactgtgcctggcctatgaagttttattcttctagctctttgatttaggtcgttgatccattttgatttaatttttttcagggaattttttaatcctagatgcttacagttcttcatatcctacttgaaaggaccttctatcttcagtcactgtattttgctaatttcttaaagaggaaataggtggtagtgagtggccgagtttcatttttcatttctgttctccaaagaacagaatggttcatgtaggaatcctttgcagcttcagtctgcaccaagaaaggccaagaggaaagaatagcgagtggcttttctcactctcagcctcaagactgaatttaaacacacttagctttgtgagggcaggacttggtcttcacatagtggaaagtgtgcacttggctactttttcctggggcaagggctctgctttcctgccactgtgagctgtggggtcagactgcatccttaagccagacattccactctcgctcccctggaagacttttaggcgaggttcatcctggaactgttgactcagaacaggtagagctggaggaagaacaagcggccaccctgctcccatgagccctcttccttggtggataggttgtggttctcctgtttgatggggaggccgctgcatctgactctccaactcagtgaaaagaatcacagcacagaccagcctcaattctttctgcaccactgctctgtcgagttgattcagtacctgtagtcccacatagttaaaatctgcttagctttgctctctgttgtgtggacaatgaaatggttgactaatataaccctggcagtgtcagaccttgtcatgactgaaatttgtccaaatagatattgtcatcaaatgtgcttctggtccttgctagtgagactgtagttaggatccctgtccaggtctcaaagggcacgagaaactatgaagaggcttggcatccctgttcagagtacagcctcatctgccaaattcttggggtcactagaactgtttgggtccctgctggaagctcttaacacccctgagcaactcacgttggaactgatgaaaataggtctcctaagacctccatctactgctaagtccattctggagtccaggtgctactaggagtcttttgcccctgggactgagatgtttttctgacttgaatgagggagtgaatggatgactgcccatgccgctgtcactgtaataaaggactaagaagacaagatttaagaggaagagataaccgtaggacttacaggtttctttgttttgtttttttaacttgtgatctagtactaagaactaaacgttaaatagaatagcatttatgaacagtatctggaaaggagccttcattaatgatctcaataagaataaatgaaagtaagttatttttctgccccccaaaatccctaaaacatgaatttgtcttccacacattagtgccagaaaagggaatttgtagtaaaatgtttttcatagtagaaagaaacagggattgtaagtcgcccagcattgaagccattgccccaagactgtctagtaggcagctccctttgggcagttgtctgcctcctggaaagcttcctgccaaagctgcccctgagaatctgagatggaggcgtggccgtgtggtctgggtcccctgggctgcgtggcagcagcatctcaggagttgagtcctcttttctaaccttgcgctgctgcattggcttagctacttagctggcatggtcagacaaggggagcacgcccgtgagtgtgtccacatgggccggcggactatcagaaacgccctgttgaacaaatgtgttcaggatagagggatgtgactgtgtatagctgatgaggggaacatgggtggcacttttgttactttgcagtttggttacttttgaagtaatgtgttcagcttaacttttttttttttttttttttttttaaagataaaatctggctctgttgcccaggctggagtgcagtggtgtcatctcagctcactgcaacctccgcctcccgggatcaagccattcttctgcctcagcctcccgagtagctgggactacaggcacacgccaccacacccggctaatttttgtatttttagtagagatggggtttcaccatgtgggccaacctggtctcgaactcctgacctcaggcaatccacctgccttggcctcccaaagtgctgggattacaggcatgagccattgcacccggccccggcttaactttttatagacttctttgctgatggatgtctttgaaaataagaggtaatttcagtcacaactacgaatctggatccaaataaaacatgtgctgtggccaaaccacagtattgcataggttaatccggagtcttggctgccctcacttcctgtctcacatggatctgttctgttattttcttatgtcataggttttcatataacctatttttttattttaattttatttatttatttatttatttatttatttatttttttgagacggagtctctctctcttgcccaggctggagtgcagtggtgtgatcttggttcactgtaacctctgcctcctgggttccagcaattctcttgcttcagcctccagagtagctgggattacaagtgtgcgcaaccatgcctggcacatttttttgtagctttgtaaagatggggtttcatcatgttgagcaggctggtcttgaactcctgacctcaggtgattcaactgcctcggcttcccagagtgctgggattacaggcatgagccaccgtgcccagcccctttattccctgttttcagaggtcagacttgggtttacagttgatacttcagttttaggtttttatccatttgttacatttttatccatttgttgaattaaaaaatttgtagcgggaacatcttgaatatattattgttctaaatcaggggtgtccagtcttttggcttccctgagccacattggaagaagaattgtcttggaccactcataaaatacactaacatgtatagtcccaggggacccagaccacatggccacacctccatcccagattctcagggcagctttggcaggaagctttccaggaggcagacaattgcccaaagggagctgcctactaggcagtcttggggcagtggctccaatgctgggcgacttacaatccctgtttctttctactatgaaaaatagtgagctaagaaaaaaaaaatctcataatgttttaagaaagtttatgaatttgtgttgggctgcattcaaagctgtcctgggccacatacaggctgtgggttggacaagcttgttctaaattatgtagggcacttttattttaaaaattacttttccgaggcttttctaaatatcagttaaacttttactgagtagtgcctgtgtgcaaaagcagtatgtccttctcagtgtgatatgtgaatacatattgatgtttccttagcattgtaatatcatggaaattataaaggattcaaaataattttttgtttgcatgtgcattggggggggtttcctcacagaatttccagaacaaaaattgtttgctgccctgttgattaaatgtgttgtgcagctggaactcatccagactatcgacaacattgtcttcttcccagccacaagtaagaaagaagatgcagaaaacttagctgcagcacaggtaaggagataggaggacagctgctttttttgtgtaagtaggaagttaggtatagcagtctgggctgtagagttaggctagagaattagtttgtggggccttcatcatacagatgtccttttaaaccatgagactggatcccatcacaaggtaataaggttagctagagcagggaggagggtcagcaactgattactagggacctcatcctctacagctcctggagatgaggcagctagcagagactgaagacgagaatccatgaggcatggggaggcacggggaagcaggtgtcagttgtcggggaagtcagatgaagaaaatgttttaagaagaagcatgtgatcagtcgcttgttaaatgctctggataggtcaagtgatattacacctgagaattgccctctaactgtttggacgactttggaaccttaacagtgtgttaaatgttaaattgaggacaaaagcataattataatggggagagagagagagaagagagaatgtggactcagccagtactctgttaagaagttttgctgtaaaggcacagagaaatgtgatagctggattgtgaggggttcaagagaggggtttgctatgttttgttctccagattggtgatatggcagcgtgttcactggtaagagctttccagtagggagagaaaaactgactgtaggcaagagaggggcaatttctagggccatgtttttgagtgagtggagatagtacctcatacagagtgggaatcacctggggtagaagcccagacagttcccatgtggcggcagggggagggctgggggatgggttgtggatgcaggaagtctggtacgtttggggtaggagcttgtgagagacctcctctgccagcttctggtttctcactgagatgggaagaaaagtcatctaccatgtgagatttggaagaatgttttagctacttgagaagtgaaaacttgagctggttggccaggagtgtggcctaggccaaggtctgccaagggctgggctagcaccgagcccgctggtttagagagaaaccagtctgctttctccagtcacacatgatgacatggccattttgccagccagttactaaaaagaagaggaggggttgtgaaagagaataattaaaatgatgcatggactccatagcagttgagaagagaagggaggacttgaggggctgaggaacgcagggccagggagttgggagtccaggagggtctggactaatgggaggtggtgcttggggacgaggatgcgtactggaaggtggaccttcccttactttctgttaggttagatcaagctgagtatctgtggctttcttgtaaaactggtctttggggagcattgagttgtaaatcaagtaaaattattgtgactgtgtgtatatgctggggtggtttgttttccaaagagagatgcggtggactttgatgttcgcgttgatactcaagaccaaggaatgtaccgctttttaacatcacaacaactttttaagctactggactgcttattagagtcacatagatttgcaaaagcgtttaattccaacaacgaacagaggactgccctgtggaaagcaggtaagctgcacacgcctcacatttaatgtttactgttgatggatgtgggacaggtacatacaggtctcagaactcattgactgtctgctataggtctgtgcatgtcactatatgtactctgaccttaacagtaataaagtaacctcacaacgaggcccttttctggtctacagtaagccagataactgcttgggtggattttttcccccttggtctattatttgacttacattgttctttcatcttgtttacccaacctggaccttcttgttgatactcattggcatgacaaaagctgtcttttcattaggaaataaatatgtgtaaaagtcgcacacacaaaacctggcatgtgtatttgaatggcttctctgtttactgggagtggccagagctcagagtgaaggtgaatttattgggatgtgaggtatatttgttctagaacaagttagacattttaaacaaaaaataagcttttattataaaccaaagtgacattgttaattttttaatttaaaaaatagagccagctgtggtgactcacacctgtagttccggctactcgggtggctgaggcaggatgattgcttggggccagaagttcgaaaccaccctggccaacatagcaagaccctgtctctacaagaaattaaaaattagcggggcatggtgtcgcatacctgtaatcccagctactcgggaggctgaagtgggaggatcacttgagcccaggagtttgaggctgcagtgagccatgatcacactactcccctccagcctgggcaacacagtgagaccccatctcttaaaaaaagaaaagaaaaaagaaagaaatataattatgagttgcaaaacagtgctgggaggatgaggggctgcagaataaggcagagaaaaagaaggggctgatacttatcaaactgtatcaaaagggtttggtgcttaatgtttgcttatttgaaacagctgtgccattctctttcctttacaacctaacttctggaaagagtagtctgtacttatttttcccctttttttctacccaagtttttgccaccattccactgggcctcttcctgctgagctgatagagcctccttgtgtccacacacaccggacccatcagacctctgacagagcagttctcacctcctgggggttgcccctgtttatctgaggcccctggcgcaggcagagcacatggccccttccacagctttggggattcaagtgcagtttcatgtgaagggttccaccttcccaggccacaagtttttttatatctcatatccccagcttgaatagggagggaattctggacatggaaatcaccttcacatcaggctgctgtggctccgttttgtaagcagcagatgctgatggctgagcacaaacaaaatgtgcctccatacgggctgtttcacctttacataagatgccttcccaaactaatcccagaaacttcccttttctgcaggattcaaaggcaaatccaagcccaaccttctgaagcaggagaccagcagcctggcctgtgggctgcgcattctcttccggatgtacatggatgagagccgcgttagtgcctgggaggaggtccagcagaggcttttgaagtaagacttttgactgatttccatctctgaccaggtagccacgtggtgccgggcaggaaagaggcaccggcgggaccatgctgacagctgaggctttggggcctggatgcccctattccacagagcagttgtaaaaattaaattcagtcttagagatgagtgtgctttagtgacatgtggccaaatcatgtctaacatgcaggacaaaggaggttttctgttttaaaactgtgaactatgatatcatttataggcctttttaatgtcataagatagtcccatttttacagatcatttgtataagtgaaaacttgcctgcctgcatttacttcgaaaaaaatatttggagtttttcttagcgttactttttttactcttttactttaagccaactaacgtgtaaactcaggctaagaatgaaacatgccattcagaaagaatacggtcatctgcattgtattatcatatctacttacggaatagatgttctgaggccaattaaatacattttagaattttaagggatcacctagtctctgttatcccatttgattgacaagactgattgattaaggccccacagggccttgtgatctagggcctcacaagggtcagtgaagagaggagtcgcctcagattccagtccaggtctcttgaaactaagctttgcatgtgccacctgccacacggcagctttgcattgaaagaaacttagaaaattaggaaaatgtgggtttcctggtaagttacaatggcttcttttaacatgtttggttttcttcccaatttgaaaagcatgtttatgttgacactccagctaatgtaaacagatgggatctaacatgttcttgaatagttcatattcactactatgttcatgattgctctttctcggtgaatatggggaccagtagatacgcaagtaacattaaaggaaaccttttcttttgcagtgtctgcagtgaagcactaagttacttcctcactctaacatcagaaagtcatcgagaagcctggactaacttactgcttttgtttctaactaaagttctaaagataagtgataatagggtaagtatgaggcttcgaatccagccccacatttctagcccaattcgcattgggatgcggggtcccagagccgccgtgcaagagctctcagagatgaatcaagcagtgcccaggctgcactgctgcttgtgcaaagccaccagtggccttgctgtatcttcctcagtccttgcttttctccccccttacccagctttgttcactaattagcagttctctaggggattcagtaggcgagggatcagaatcccttgggataccttgacaagttcccattatgaccccaggaatctccccctttgccccattttgaaaactgctgtccaaccacctcatggccttgtactctgcctactactcaagactacatctggttcctgggcctgtgctctgggctgcagctgttcctttggcatatttagtggttccaggtaacccagagtccctagtgaatgggcctcatctaagaattttaaaccagtagaaataaagataaaatacacatatatgactgtaaatataagtgcatatttaaggttttcaaaaatgtacactctattcttagaaaaaaaaatagcaacttacagctcacacatacaggctgctttgctgtgaccctagaataggtttaaaaatgcctagtgatgtggcccactacttgaaaggccaagggctctaaatcccagcctctgttactccacagctggcttttttttttttggtcataatatgtctcactgcttccctggatctggaggggtacagaaggggtaggaaaggaggctgcagactagagttcagagatgaaggaactactgtgaagatacagccaaagtatagcaattgaactgtacatgtgaaacgtatgtagctttgcctgaagaactgtttagattttatattgcagtgttgggtagaattttccccaaaacttaaaatttttatgtaacaaaagataaaatttcagtaacccatagcttataaaatctcaactctagtttgtactcacttgcctgctgcttattacccaggaaaaacagtgctaaattactaaaagtttgtcaaagatatacagacaaatgtttttcaaaataaggatatgtaagtgaatagtgtttgtatgaagtgagtttttctaacacttctgtctctcagttccacaaaccagagtcactgcctgctgtggaccctgctttcctggctcctgtgatggagccccagagtagtttgactctaggcagtttaaggctctgcagtttgcaatcactactaatggagaaattcattttccctgcagtttaaagctcatgcatcattctactaccctctcttatgtgaaattatgcaatttgacttgattcctgaacttcgtgctgttcttagaagattttttctgcgaatcggagtagtttttcagatatcacaaccacctgaacaggaacttggaataaacaagcaatgatgggaacttaatatttttgttggcatttacatccctctgctctttaaaaggacgctggagctgaggtttcctacctgaaaaatgatttctctggattgcagtgtctgagttactggtaaagatgcttagaagtcttactcaaacttgcaacactccagtcccttttagtgctggtggattttgtgtgttatattggcctcatgttgagcagaaagcctgtttaaacagtgtcagctcatgctcacgggtccttccctgtcttccacggcaggaaaagccccacgtttttggcaggtgtggaagtgaaacttacccaaagaactatagatgtaaagattgaacttctacaagaagtacaactcaggagagctgtattttgaaggataaaatgtttataattggggagtggggagagaagaagaaattattgttcatggtaaaagatatttagcaactatggtattcttattctgaagatttttgcacactcaggctatctgagatactggtaatcatcctgtgaaaaatgtacagagatgcaggtctgtaatataaaaatcttaaaacattatatagttcttcctgcactgttttctttattttcttattcatttgctaaatacccataatattttgtcaaatgcactaaacatttgggtggaactttcttttttattttatagggatttttagttttgccctttttggtaggtggtgattttgaggctgtaacatgcccagaagctgttgtggccgacacttcaacaatagggaaaaaaaggtagaaaatatccctactgacagtaactacctgtcacatatttctcttaggacttttaaagatgagccattaaaatagaatgatcctttatggaccaaaacttgaatcactgcaaaatgaatccagattgctgtcattttcttttcttttgggtggtggggcttgatgtagattttactctatgtacagaatttaacgttgaatatattaaaataacaaatctggcatggtttgcggaggttagatttactggaaatgtattcatactgtgaattgtgctctgatggttaaaagacaagattgtcaagcattccgtattaacagtggatgtagaaaattttttcagatggacaaaatgtatatggtacagatgtaaagttttctatgtaaaaaattctgtacaactttctgtacaatattgattcccatctggcatattctaatcaggttataggtcaataaagtttttgaattatttcatcagtg

SEQ ID NO: 72 - DNA, 7644 bp, Homo Sapiens
ccctgcggctgagaacgggcgatgcgggtgttgctgtgacccctggaatgcaaaggactgcacccccatcagaaagttagaaagccagtgcagagtagccaggagtcctgttcactcggcaggagcaggggtgccgagtggggggatctctggtcccgcagctcggccgccaccaagagcccgaagtgctgggcgcggtgccaccagaggcccgccacgccccacgccgccctgcaggcgaacgctggaggccccgccgggccgccgtagcgctgcggctcgggccgctcctcccgcgccgccctccgcccccagcctcccggcgccgcggcagctctgggcagggagcgccgccgccgccgccgccgccgccgcttcctcgtctgcagccgttcggccgctgcgtgacgcgtcgtttcctcccaacatggcggccggggcaggtcggcggtgatgggggccagttcgcggccgcggcgggtgctaatccccacagtagccagggtagcccttctctcgcggtgcctctgagagccgccgccacctcgtccctcagttcccggcagacagccgcccgggccgggctccctcaccgccaccagggccggagggacgagtgagaggggcggccgggacgcgacccccgggccgggagaagcggaggcccgacgggcgcggccctcgaggtacggcttcttgggggcggcgaggacctcgacgcccttcgccgacaccgcggctggtcccgctcgcccgccccttcctgatcctgccgctgccctccacgcctccaatcccccacctccaccccctctcctttctctcttctcttccttcctctcctcctcctcccctccagccgctgggagccgcgggtcggacgagccgccgcctccttctctgcgtccatgtatgaggggaagaagacgaagaacatgttcctgacccgggctctggagaagatattggccgacaaggaagtgaagaaggcgcatcactcccagctgcgcaaagcttgcgaggtggcgttagaggaaataaaagcggaaactgaaaaacagagtcctcctcatggagaagcaaaagctggatcaagcacccttccaccagtgaaatcaaagacaaattttattgaagcagacaagtacttcttgccttttgagttggcatgccagtccaaatgtcctcgcatagttagtacatctctagattgcttacagaaacttattgcttatgggcacttgactggcaatgctccagatagtacaacaccaggcaaaaaattaattgatagaattattgaaacaatatgtggctgctttcagggccctcagacagatgaaggagttcagctgcagataataaaggctttacttactgcagtaacatcacaacacatagaaattcatgaagggactgtactgcaagctgtgagaacatgttacaatatctacttagcaagcaaaaatctcatcaatcagacaacagccaaagctactctcactcagatgctaaatgttatctttgcacgcatggaaaaccaagcattacaggaagcaaaacaaatggaaaaagaaaggcatcggcagcatcatcatctgttacagtctccagtaagccatcacgagcctgaatcacctcaacttagatatttgccacctcagactgttgatcatatatcccaagaacacgaaggggaccttgacctccatacaaatgatgtagataaaagtcttcaggatgacacagagcctgaaaatggatctgatatttccagtgcagaaaatgaacagactgaagctgatcaggcaactgcagctgaaacattatctaaaaatgaagtgttatatgacggagaaaaccatgattgtgaggaaaagccacaagacattgtacagaacattgtagaagaaatggtgaacattgttgttggagatatgggagaagggactactataaatgcaagtgcagatggcaacattggaactatagaggatggtagtgacagtgaaaatattcaagcaaatggaattccaggaacaccaatttctgttgcatatacaccatccttacctgatgatagattgtcagtctcttccaatgatactcaggaatctggaaattcttcaggaccttcacctggtgctaagttttcccacattttacaaaaggatgcctttctagtattcaggtcattgtgtaaactgtcaatgaaaccactgtcagatggaccaccagatccaaagtctcatgaactacgatccaagattctttcattgcagttacttctatccattctgcagaatgcaggacctattttcaggacaaatgagatgtttattaatgctattaagcagtatctttgtgttgcactctcaaaaaatggagtctcatctgttccagaggtttttgagctttctctttctatatttcttactttgttgtcaaatttcaagacacatctgaagatgcaaattgaggtgttctttaaagaaattttcttatacattttggaaacttctaccagctcatttgatcacaaatggatggttattcagacactgacgaggatttgtgcagatgctcagagtgtagtggatatttatgtaaactatgactgtgacttaaatgcagccaatatatttgaaagactagtaaatgatctatcaaaaattgctcaaggaaggggcagtcaagaacttggtatgagtaatgttcaggaattgagcctgaggaaaaaaggtttagaatgcttagtgtcgattttgaagtgtatggttgaatggagtaaggatcagtatgtgaatcccaactcccagacaactcttggtcaggaaaaaccctcagagcaagagatgagtgaaatcaaacaccctgagacaataaacagatacggaagtttaaattccctggagtcaacatcatcatcaggaataggcagctacagtacacagatgtctggcactgataatccagaacaatttgaggtcctaaagcaacaaaaagaaataatagaacaagggatagatttatttaataagaaaccaaagagaggaatacagtacctccaagaacaagggatgcttggcaccacacctgaagatattgcccaattcttacatcaagaggaaagattagactctactcaagtgggtgagttcctgggagataatgataaatttaacaaagaagtcatgtatgcatatgtggaccaacatgacttttcaggaaaagacttcgtttcagcccttcgtatgtttctagaaggatttcgtcttccaggggaagctcagaaaatcgatcgattaatggaaaaatttgctgcaagatacctagaatgcaaccaaggacaaactctctttgctagtgcggatacagcttatgttttggcttattcaattatcatgttgaccacagaccttcacagtccacaggtgaaaaataaaatgacaaaggaacaatacattaagatgaatagaggtatcaatgacagtaaagaccttcctgaagagtatctatcagccatctataatgaaatagctgggaaaaagatatcaatgaaagaaacaaaagaactaacaatccctacaaaatcaagtaaacagaatgtagccagtgaaaaacaaagaagacttctgtataacttagaaatggagcagatggccaagacagctaaagcactcatggaggccgtgagccatgttcaggcaccctttacaagtgcaacacatttggagcatgtgaggcccatgtttaagttggcttggacgccttttctggctgcattcagtgtgggtctacaagattgtgatgatactgaagtagcctctctttgcctggaaggtataagatgtgcaatcagaattgcatgcattttcagcattcagctggagagagatgcatatgtccaggcactagcaagatttaccttactcacagtgagttccggtattactgaaatgaaacagaagaacattgacacaataaaaacacttatcacagtggctcatacagatggaaattatttaggaaattcatggcatgagattctgaagtgcatcagtcagttggagctggcacagcttataggaactggagtgaaacctcgatacatttctggaacagtgcgaggcagagaaggatctcttactggaacaaaagatcaggctcctgatgaatttgtgggtttagggctagttggaggaaatgtggactggaaacagatagcaagtattcaggaatccattggagaaaccagttctcagagtgttgttgttgctgtagatagaatattcacaggatctacaaggctagatggaaatgccattgtggattttgtccgttggctctgtgctgtgtctatggatgaattactttccacgacacacccaagaatgtttagtctacaaaaaatagtagaaatatcatattacaacatgggaagaataagattacagtggtctcgaatttgggaagttattggagatcattttaataaggttgggtgtaatcctaatgaagatgtagctatttttgcagtagactccttgaggcagttgtcaatgaagttcttagagaaaggggagcttgctaacttcagattccagaaggatttcttaagaccttttgaacatataatgaaacggaacaggtctccaacaattcgagatatggttgtacggtgtatagcacagatggttaattctcaagctgctaacattcgatctggatggaagaacattttctctgtatttcatctagctgcatctgatcaagatgaaagcatagtggaacttgcattccaaacaaccgggcacattgtcacccttgtatttgaaaaacactttccagcgaccattgattctttccaggatgcagtgaagtgtttgtctgaatttgcgtgcaatgcagctttcccagacacaagtatggaagcaattcgacttattcgccattgtgcaaaatatgtgtctgatagacctcaggctttcaaggaatacacaagcgatgatatgaacgtagcacctgaagacagggtgtgggtgagaggatggttcccaattctctttgagttatcctgtatcatcaatagatgcaaattagatgtaagaaccaggggtttaacagtaatgtttgaaataatgaaaacatatggccacacttatgagaaacactggtggcaggatttatttagaattgttttcagaatctttgacaatatgaaattgccagaacaacagacagagaaagctgaatggatgacaacaacttgcaatcatgcactttatgcaatctgtgatgtattcactcagtatttagaagtactcagtgatgtacttttggatgacatttttgctcagctctactggtgtgtgcagcaagacaatgagcagttagcgcgatctggtacaaactgtttagagaatgttgttattctgaatggtgaaaaatttaccctagaaatctgggataaaacttgcaactgcacactggatatcttcaaaaccacaatcccacatgcgctgttgacctggcgacccaattctggagaaactgcccccccacctccatctcctgtaagtgaaaagccattggatacaatatcacagaagtctgtagatattcatgattctattcaaccaaggtctgtggataacagaccacaagcaccactggtttctgcgtctgctgttaatgaagaagtcagcaaaattaaatctacagcaaaatttccagaacaaaaattgtttgctgccctgttgattaaatgtgttgtgcagctggaactcatccagactatcgacaacattgtcttcttcccagccacaagtaagaaagaagatgcagaaaacttagctgcagcacagagagatgcggtggactttgatgttcgcgttgatactcaagaccaaggaatgtaccgctttttaacatcacaacaactttttaagctactggactgcttattagagtcacatagatttgcaaaagcgtttaattccaacaacgaacagaggactgccctgtggaaagcaggattcaaaggcaaatccaagcccaaccttctgaagcaggagaccagcagcctggcctgtgggctgcgcattctcttccggatgtacatggatgagagccgcgttagtgcctgggaggaggtccagcagaggcttttgaatgtctgcagtgaagcactaagttacttcctcactctaacatcagaaagtcatcgagaagcctggactaacttactgcttttgtttctaactaaagttctaaagataagtgataataggtttaaagctcatgcatcattctactaccctctcttatgtgaaattatgcaatttgacttgattcctgaacttcgtgctgttcttagaagattttttctgcgaatcggagtagtttttcagatatcacaaccacctgaacaggaacttggaataaacaagcaatgatgggaacttaatatttttgttggcatttacatccctctgctctttaaaaggacgctggagctgaggtttcctacctgaaaaatgatttctctggattgcagtgtctgagttactggtaaagatgcttagaagtcttactcaaacttgcaacactccagtcccttttagtgctggtggattttgtgtgttatattggcctcatgttgagcagaaagcctgtttaaacagtgtcagctcatgctcacgggtccttccctgtcttccacggcaggaaaagccccacgtttttggcaggtgtggaagtgaaacttacccaaagaactatagatgtaaagattgaacttctacaagaagtacaactcaggagagctgtattttgaaggataaaatgtttataattggggagtggggagagaagaagaaattattgttcatggtaaaagatatttagcaactatggtattcttattctgaagatttttgcacactcaggctatctgagatactggtaatcatcctgtgaaaaatgtacagagatgcaggtctgtaatataaaaatcttaaaacattatatagttcttcctgcactgttttctttattttcttattcatttgctaaatacccataatattttgtcaaatgcactaaacatttgggtggaactttcttttttattttatagggatttttagttttgccctttttggtaggtggtgattttgaggctgtaacatgcccagaagctgttgtggccgacacttcaacaatagggaaaaaaaggtagaaaatatccctactgacagtaactacctgtcacatatttctcttaggacttttaaagatgagccattaaaatagaatgatcctttatggaccaaaacttgaatcactgcaaaatgaatccagattgctgtcattttcttttcttttgggtggtggggcttgatgtagattttactctatgtacagaatttaacgttgaatatattaaaataacaaatctggcatggtttgcggagattgtcaagcattccgtattaacagtggatgtagaaaattttttcagatggacaaaatgtatatggtacagatgtaaagttttctatgtaaaaaattctgtacaactttctgtacaatattgattcccatctggcatattctaatcaggttataggtcaataaagt

SEQ ID NO: 73 - protein, 1849 aa, Homo Sapiens
MYEGKKTKNMFLTRALEKILADKEVKKAHHSQLRKACEVALEEIKAETEKQSPPHGEAKAGSSTLPPVKSKTNFIEADKYFLPFELACQSKCPRIVSTSLDCLQKLIAYGHLTGNAPDSTTPGKKLIDRIIETICGCFQGPQTDEGVQLQIIKALLTAVTSQHIEIHEGTVLQAVRTCYNIYLASKNLINQTTAKATLTQMLNVIFARMENQALQEAKQMEKERHRQHHHLLQSPVSHHEPESPQLRYLPPQTVDHISQEHEGDLDLHTNDVDKSLQDDTEPENGSDISSAENEQTEADQATAAETLSKNEVLYDGENHDCEEKPQDIVQNIVEEMVNIVVGDMGEGTTINASADGNIGTIEDGSDSENIQANGIPGTPISVAYTPSLPDDRLSVSSNDTQESGNSSGPSPGAKFSHILQKDAFLVFRSLCKLSMKPLSDGPPDPKSHELRSKILSLQLLLSILQNAGPIFRTNEMFINAIKQYLCVALSKNGVSSVPEVFELSLSIFLTLLSNFKTHLKMQIEVFFKEIFLYILETSTSSFDHKWMVIQTLTRICADAQSVVDIYVNYDCDLNAANIFERLVNDLSKIAQGRGSQELGMSNVQELSLRKKGLECLVSILKCMVEWSKDQYVNPNSQTTLGQEKPSEQEMSEIKHPETINRYGSLNSLESTSSSGIGSYSTQMSGTDNPEQFEVLKQQKEIIEQGIDLFNKKPKRGIQYLQEQGMLGTTPEDIAQFLHQEERLDSTQVGEFLGDNDKFNKEVMYAYVDQHDFSGKDFVSALRMFLEGFRLPGEAQKIDRLMEKFAARYLECNQGQTLFASADTAYVLAYSIIMLTTDLHSPQVKNKMTKEQYIKMNRGINDSKDLPEEYLSAIYNEIAGKKISMKETKELTIPTKSSKQNVASEKQRRLLYNLEMEQMAKTAKALMEAVSHVQAPFTSATHLEHVRPMFKLAWTPFLAAFSVGLQDCDDTEVASLCLEGIRCAIRIACIFSIQLERDAYVQALARFTLLTVSSGITEMKQKNIDTIKTLITVAHTDGNYLGNSWHEILKCISQLELAQLIGTGVKPRYISGTVRGREGSLTGTKDQAPDEFVGLGLVGGNVDWKQIASIQESIGETSSQSVVVAVDRIFTGSTRLDGNAIVDFVRWLCAVSMDELLSTTHPRMFSLQKIVEISYYNMGRIRLQWSRIWEVIGDHFNKVGCNPNEDVAIFAVDSLRQLSMKFLEKGELANFRFQKDFLRPFEHIMKRNRSPTIRDMVVRCIAQMVNSQAANIRSGWKNIFSVFHLAASDQDESIVELAFQTTGHIVTLVFEKHFPATIDSFQDAVKCLSEFACNAAFPDTSMEAIRLIRHCAKYVSDRPQAFKEYTSDDMNVAPEDRVWVRGWFPILFELSCIINRCKLDVRTRGLTVMFEIMKTYGHTYEKHWWQDLFRIVFRIFDNMKLPEQQTEKAEWMTTTCNHALYAICDVFTQYLEVLSDVLLDDIFAQLYWCVQQDNEQLARSGTNCLENVVILNGEKFTLEIWDKTCNCTLDIFKTTIPHALLTWRPNSGETAPPPPSPVSEKPLDTISQKSVDIHDSIQPRSVDNRPQAPLVSASAVNEEVSKIKSTAKFPEQKLFAALLIKCVVQLELIQTIDNIVFFPATSKKEDAENLAAAQRDAVDFDVRVDTQDQGMYRFLTSQQLFKLLDCLLESHRFAKAFNSNNEQRTALWKAGFKGKSKPNLLKQETSSLACGLRILFRMYMDESRVSAWEEVQQRLLNVCSEALSYFLTLTSESHREAWTNLLLLFLTKVLKISDNRFKAHASFYYPLLCEIMQFDLIPELRAVLRRFFLRIGVVFQISQPPEQELGINKQ

SEQ ID NO: 74 - DNA, 7725 bp, Homo Sapiens
ccctgcggctgagaacgggcgatgcgggtgttgctgtgacccctggaatgcaaaggactgcacccccatcagaaagttagaaagccagtgcagagtagccaggagtcctgttcactcggcaggagcaggggtgccgagtggggggatctctggtcccgcagctcggccgccaccaagagcccgaagtgctgggcgcggtgccaccagaggcccgccacgccccacgccgccctgcaggcgaacgctggaggccccgccgggccgccgtagcgctgcggctcgggccgctcctcccgcgccgccctccgcccccagcctcccggcgccgcggcagctctgggcagggagcgccgccgccgccgccgccgccgccgcttcctcgtctgcagccgttcggccgctgcgtgacgcgtcgtttcctcccaacatggcggccggggcaggtcggcggtgatgggggccagttcgcggccgcggcgggtgctaatccccacagtagccagggtagcccttctctcgcggtgcctctgagagccgccgccacctcgtccctcagttcccggcagacagccgcccgggccgggctccctcaccgccaccagggccggagggacgagtgagaggggcggccgggacgcgacccccgggccgggagaagcggaggcccgacgggcgcggccctcgaggtacggcttcttgggggcggcgaggacctcgacgcccttcgccgacaccgcggctggtcccgctcgcccgccccttcctgatcctgccgctgccctccacgcctccaatcccccacctccaccccctctcctttctctcttctcttccttcctctcctcctcctcccctccagccgctgggagccgcgggtcggacgagccgccgcctccttctctgcgtccatgtatgaggggaagaagacgaagaacatgttcctgacccgggctctggagaagatattggccgacaaggaagtgaagaaggcgcatcactcccagctgcgcaaagcttgcgaggtggcgttagaggaaataaaagcggaaactgaaaaacagagtcctcctcatggagaagcaaaagctggatcaagcacccttccaccagtgaaatcaaagacaaattttattgaagcagacaagtacttcttgccttttgagttggcatgccagtccaaatgtcctcgcatagttagtacatctctagattgcttacagaaacttattgcttatgggcacttgactggcaatgctccagatagtacaacaccaggcaaaaaattaattgatagaattattgaaacaatatgtggctgctttcagggccctcagacagatgaaggagttcagctgcagataataaaggctttacttactgcagtaacatcacaacacatagaaattcatgaagggactgtactgcaagctgtgagaacatgttacaatatctacttagcaagcaaaaatctcatcaatcagacaacagccaaagctactctcactcagatgctaaatgttatctttgcacgcatggaaaaccaagcattacaggaagcaaaacaaatggaaaaagaaaggcatcggcagcatcatcatctgttacagtctccagtaagccatcacgagcctgaatcacctcaacttagatatttgccacctcagactgttgatcatatatcccaagaacacgaaggggaccttgacctccatacaaatgatgtagataaaagtcttcaggatgacacagagcctgaaaatggatctgatatttccagtgcagaaaatgaacagactgaagctgatcaggcaactgcagctgaaacattatctaaaaatgaagtgttatatgacggagaaaaccatgattgtgaggaaaagccacaagacattgtacagaacattgtagaagaaatggtgaacattgttgttggagatatgggagaagggactactataaatgcaagtgcagatggcaacattggaactatagaggatggtagtgacagtgaaaatattcaagcaaatggaattccaggaacaccaatttctgttgcatatacaccatccttacctgatgatagattgtcagtctcttccaatgatactcaggaatctggaaattcttcaggaccttcacctggtgctaagttttcccacattttacaaaaggatgcctttctagtattcaggtcattgtgtaaactgtcaatgaaaccactgtcagatggaccaccagatccaaagtctcatgaactacgatccaagattctttcattgcagttacttctatccattctgcagaatgcaggacctattttcaggacaaatgagatgtttattaatgctattaagcagtatctttgtgttgcactctcaaaaaatggagtctcatctgttccagaggtttttgagctttctctttctatatttcttactttgttgtcaaatttcaagacacatctgaagatgcaaattgaggtgttctttaaagaaattttcttatacattttggaaacttctaccagctcatttgatcacaaatggatggttattcagacactgacgaggatttgtgcagatgctcagagtgtagtggatatttatgtaaactatgactgtgacttaaatgcagccaatatatttgaaagactagtaaatgatctatcaaaaattgctcaaggaaggggcagtcaagaacttggtatgagtaatgttcaggaattgagcctgaggaaaaaaggtttagaatgcttagtgtcgattttgaagtgtatggttgaatggagtaaggatcagtatgtgaatcccaactcccagacaactcttggtcaggaaaaaccctcagagcaagagatgagtgaaatcaaacaccctgagacaataaacagatacggaagtttaaattccctggagtcaacatcatcatcaggaataggcagctacagtacacagatgtctggcactgataatccagaacaatttgaggtcctaaagcaacaaaaagaaataatagaacaagggatagatttatttaataagaaaccaaagagaggaatacagtacctccaagaacaagggatgcttggcaccacacctgaagatattgcccaattcttacatcaagaggaaagattagactctactcaagtgggtgagttcctgggagataatgataaatttaacaaagaagtcatgtatgcatatgtggaccaacatgacttttcaggaaaagacttcgtttcagcccttcgtatgtttctagaaggatttcgtcttccaggggaagctcagaaaatcgatcgattaatggaaaaatttgctgcaagatacctagaatgcaaccaaggacaaactctctttgctagtgcggatacagcttatgttttggcttattcaattatcatgttgaccacagaccttcacagtccacaggtgaaaaataaaatgacaaaggaacaatacattaagatgaatagaggtatcaatgacagtaaagaccttcctgaagagtatctatcagccatctataatgaaatagctgggaaaaagatatcaatgaaagaaacaaaagaactaacaatccctacaaaatcaagtaaacagaatgtagccagtgaaaaacaaagaagacttctgtataacttagaaatggagcagatggccaagacagctaaagcactcatggaggccgtgagccatgttcaggcaccctttacaagtgcaacacatttggagcatgtgaggcccatgtttaagttggcttggacgccttttctggctgcattcagtgtgggtctacaagattgtgatgatactgaagtagcctctctttgcctggaaggtataagatgtgcaatcagaattgcatgcattttcagcattcagctggagagagatgcatatgtccaggcactagcaagatttaccttactcacagtgagttccggtattactgaaatgaaacagaagaacattgacacaataaaaacacttatcacagtggctcatacagatggaaattatttaggaaattcatggcatgagattctgaagtgcatcagtcagttggagctggcacagcttataggaactggagtgaaacctcgatacatttctggaacagtgcgaggcagagaaggatctcttactggaacaaaagatcaggctcctgatgaatttgtgggtttagggctagttggaggaaatgtggactggaaacagatagcaagtattcaggaatccattggagaaaccagttctcagagtgttgttgttgctgtagatagaatattcacaggatctacaaggctagatggaaatgccattgtggattttgtccgttggctctgtgctgtgtctatggatgaattactttccacgacacacccaagaatgtttagtctacaaaaaatagtagaaatatcatattacaacatgggaagaataagattacagtggtctcgaatttgggaagttattggagatcattttaataaggttgggtgtaatcctaatgaagatgtagctatttttgcagtagactccttgaggcagttgtcaatgaagttcttagagaaaggggagcttgctaacttcagattccagaaggatttcttaagaccttttgaacatataatgaaacggaacaggtctccaacaattcgagatatggttgtacggtgtatagcacagatggttaattctcaagctgctaacattcgatctggatggaagaacattttctctgtatttcatctagctgcatctgatcaagatgaaagcatagtggaacttgcattccaaacaaccgggcacattgtcacccttgtatttgaaaaacactttccagcgaccattgattctttccaggatgcagtgaagtgtttgtctgaatttgcgtgcaatgcagctttcccagacacaagtatggaagcaattcgacttattcgccattgtgcaaaatatgtgtctgatagacctcaggctttcaaggaatacacaagcgatgatatgaacgtagcacctgaagacagggtgtgggtgagaggatggttcccaattctctttgagttatcctgtatcatcaatagatgcaaattagatgtaagaaccaggggtttaacagtaatgtttgaaataatgaaaacatatggccacacttatgagaaacactggtggcaggatttatttagaattgttttcagaatctttgacaatatgaaattgccagaacaacagacagagaaagctgaatggatgacaacaacttgcaatcatgcactttatgcaatctgtgatgtattcactcagtatttagaagtactcagtgatgtacttttggatgacatttttgctcagctctactggtgtgtgcagcaagacaatgagcagttagcgcgatctggtacaaactgtttagagaatgttgttattctgaatggtgaaaaatttaccctagaaatctgggataaaacttgcaactgcacactggatatcttcaaaaccacaatcccacatgcgctgttgacctggcgacccaattctggagaaactgcccccccacctccatctcctgtaagtgaaaagccattggatacaatatcacagaagtctgtagatattcatgattctattcaaccaaggtctgtggataacagaccacaagcaccactggtttctgcgtctgctgttaatgaagaagtcagcaaaattaaatctacagcaaaatttccagaacaaaaattgtttgctgccctgttgattaaatgtgttgtgcagctggaactcatccagactatcgacaacattgtcttcttcccagccacaagtaagaaagaagatgcagaaaacttagctgcagcacagagagatgcggtggactttgatgttcgcgttgatactcaagaccaaggaatgtaccgctttttaacatcacaacaactttttaagctactggactgcttattagagtcacatagatttgcaaaagcgtttaattccaacaacgaacagaggactgccctgtggaaagcaggattcaaaggcaaatccaagcccaaccttctgaagcaggagaccagcagcctggcctgtgggctgcgcattctcttccggatgtacatggatgagagccgcgttagtgcctgggaggaggtccagcagaggcttttgaatgtctgcagtgaagcactaagttacttcctcactctaacatcagaaagtcatcgagaagcctggactaacttactgcttttgtttctaactaaagttctaaagataagtgataataggtttaaagctcatgcatcattctactaccctctcttatgtgaaattatgcaatttgacttgattcctgaacttcgtgctgttcttagaagattttttctgcgaatcggagtagtttttcagatatcacaaccacctgaacaggaacttggaataaacaagcaatgatgggaacttaatatttttgttggcatttacatccctctgctctttaaaaggacgctggagctgaggtttcctacctgaaaaatgatttctctggattgcagtgtctgagttactggtaaagatgcttagaagtcttactcaaacttgcaacactccagtcccttttagtgctggtggattttgtgtgttatattggcctcatgttgagcagaaagcctgtttaaacagtgtcagctcatgctcacgggtccttccctgtcttccacggcaggaaaagccccacgtttttggcaggtgtggaagtgaaacttacccaaagaactatagatgtaaagattgaacttctacaagaagtacaactcaggagagctgtattttgaaggataaaatgtttataattggggagtggggagagaagaagaaattattgttcatggtaaaagatatttagcaactatggtattcttattctgaagatttttgcacactcaggctatctgagatactggtaatcatcctgtgaaaaatgtacagagatgcaggtctgtaatataaaaatcttaaaacattatatagttcttcctgcactgttttctttattttcttattcatttgctaaatacccataatattttgtcaaatgcactaaacatttgggtggaactttcttttttattttatagggatttttagttttgccctttttggtaggtggtgattttgaggctgtaacatgcccagaagctgttgtggccgacacttcaacaatagggaaaaaaaggtagaaaatatccctactgacagtaactacctgtcacatatttctcttaggacttttaaagatgagccattaaaatagaatgatcctttatggaccaaaacttgaatcactgcaaaatgaatccagattgctgtcattttcttttcttttgggtggtggggcttgatgtagattttactctatgtacagaatttaacgttgaatatattaaaataacaaatctggcatggtttgcggaggttagatttactggaaatgtattcatactgtgaattgtgctctgatggttaaaagacaagattgtcaagcattccgtattaacagtggatgtagaaaattttttcagatggacaaaatgtatatggtacagatgtaaagttttctatgtaaaaaattctgtacaactttctgtacaatattgattcccatctggcatattctaatcaggttataggtcaataaagtttttgaattatttcatcagtg

SEQ ID NO: 75 - protein, 1849 aa, Homo Sapiens; identical to SEQ ID NO: 73

SEQ ID NO: 76 - DNA, 9718 bp, Mus Musculus
caccttggtgcgcgtgcgcagacgctgtgggagccggcgcaatggtctccacgaccctttccgtttcacggatgactttcgtctggagagcagcaagtaaggccatccgcccggggtcctgagagttgggggcccgcgtgggaagccgagttccgaaatgcgagggcgcaggcgcggagacgctgccgcggtggctacagaagcattagcggtgcttggcgtagggttttcgaaaagcgcctcgctcttagatgcggctagaaaaatacggaaaagaccagtgtcattaatttacaggtttatttacatcaagaataatttatacccggacaagggacgcatgcctatagacccagcactaggctggcagaggcatgaggatctctgagttcaaggtcagcctggttcaaacgttggggaagtgcacacgtagagcaaagaacaaaataaaaatttcacaaagccaagaactgttagaagagatgccctcgtctttctgtagaacctaacattttcagaactattgcattctttctcaatatacccctcaattatcatatcaaagagcacgcagaatgcaagtttacttgatgataaccctgagaagttttgtaaaccaaagacagaattactgctttcataacaagtggcctggtttttattttactttttaatgtttcccttcacatatttaatacctgttggctgctaaaatcttaaatgatctgtgagaattatagaaaccgaaagggtcgctccaaatccttattactgtttatccagcattccagtgttttgaaacaaaagaaacattaacaaacccgtgtacaaatgtgatagaccttttccattaagtgcctgtatgaggttttcttcctggaaaggattttatgctgattgtattcattgctttttctaacaactcacagttcaagatcataccaccctgaaatgtaccctcgtggatacttggacaattctagaaacatcagtataggctgctacacctgctggtgtgtgtttccccatgccccagcacaatggatccttaatggatgctgatttaatgattctgctgtcaggatcagggcaagccaggtgcttccttagtcaagggattgaaattaaaacccatactgattataaagtagcaaggacactttatttaaaccagagtgaaggaggcctgattcgttgcctctggtcttttatggagctacaggaagaggataagagtaaggggcatatagcttgggtggtttgcactctgattgatattttaggcagcattatcagttttgtgtatgttccttcccataatgcatctgacttcaataatacacctgccaaaattggcatgacatagtaaataaaagattttccttaaagaaaaaaatacacttttttgtctcagtttatcttactgagtgttttactggctggttttgtgcgccaacttgacacaagctggagttatcacagaggaaagagcctcccttgaggaaatgtctccatgagatctagctgtaaggcattttctcaattagtgatcaagggtgcgagggcccattgtgggtggtgccatccctgggctggtagccttgggttctataagaaagcaagctgagcaagccaggggaagaaagccagtaagaaacacccctccatggcctctgcatcagctcctgcttcctgacctgcttgagttccagtcctgacttccttggtgatgaacagcagtatggaagtgtaagctgaataaaccctttcctccccaacttgcttcttggtcttgatgtttgtgtaggaatagaaaccctgactaagacagtgagtaagcaccaaaacccagtataggccagatgggcctttctggccctgtattggaacatggggagagtacaaatgaatagaatctgtctaggtttgttatttagagaagagaaaaatcccattgtccaaagatggatgtacatacatcctggtgtttggaggtatcttatgtcactaagaggttgttaggtgcatctcttggagaaaagtatgtgtattatagtatatatacacatacggaaactaagctgccaagtacattattagaagaggactctgtgcataatccaaactaggtggagtctaaggttgctgaactatctcccctgtgcttgactgtctcatcgctttatagctcttcttgaaaacttgtaacattggttatctccgaggcagggaaatctcctctccatgtagaatgaagggaaataccccatccgtgtagaatgtatgtgttcagaaaggaattttcactgtatgcctttgtccttctttctccattaggaccatctcttctgaatcattctttgaggaaaatgagttatcaggaaggaaagcctgagcctgcgaagcaagcccttaagaagtcaaagctgccactcggtcgttttgactcactggaggattcacctgaagagagagacccactgcagagtgagtagtggttagtgaacccctgtccatacttaacatggcaaggtcgatgctcattactggaaaaggtgaaagaagtgaaatatggtcataattgttattatcggttataaaggatatagtgagtaaaaataccatatggactatccatatgtgtatttgttacttctttaaaaaaatttttgggttggtgagatgcctccgtgcatgaagtacttgtaggacatgcatgagtgccagagttcagatcccatcatccttgtggtagtggctgcggcaggcaacccactacaatttcacactcagaagacacaggggatccctgaggcaagttggctacctagactagctaagtcagcaatcgctgagctcaagtgagagaccttgcttcaatgtctaaggtcgagaacagtgaagggagacacctgaagtcagtctctgatctcagcatgcacatgcatacaagcacatgggtgcacacacaggagcacacatacattaaacatgcatacacatatacatacacacgtacacatgcaacacccccaccaccaccaaaaaaaagtctttctagagctagaaacggtggcacatgtctgcagtatcagcaatgatgccagagaattgggaatgtgagagcagcccagacaacatagactgtctccaaaaaaaaaaaaaaaggggcttctaagttcttagtacttacttggtttcgggcagggacggggttgtttgttcagttggtttttactgtgcttttattattcaaaaggtaaaacatgtaagatgagatcttctttgatacaaataacaaacctgcatttgttgaggaaacttttggctgctaagaaagaaaaagaatcagctgcagtaggattatgattaccgttcaggggaaagccgaggcagcgttaaggtccagggaagaagctggccctcagaaaacgacgggaactgcatattcgaggggagacgtctcccattctcttaactaatattaaaccttccttcatccgggtcgcctgtcagctggaactaaaggagaggagcctctcttcgctactgtcagtccggagcagccacacgtgggctcggctctcacttctgatcttaagctctctgaggagaaggctggcctgtaagcaagctcagctcagatacccacagccgagcccctcagagtgaccgttagatgtttagagaggaaacagctcaacacgattgttctcatggcaacacggtagctaaggacccaggccaggtagcttcaagatgagcggggttggtgcacacccaggtgaatctcttaagttcaaggccagcctggtctacagagcaagttccaggccaggcagggggtacaccgagaaacactgtctaaaaacaaaacaaaacaaaacaaaacaaacaaacaaccaagggctggagagacggcttagtggttaagaacagtggctgctcttccagaggtcctgagttcaattcccagcaaccacatggtggctcacaaccatctgtaatgagatctgacgccctcttctggtggtaatgagatctgattccctcttctggtgtgtgtgaagaccgctacagtgtactcatataaataaaataaatcttaaaaaaaaaaaaagccaacaacaaaaaagaatgaggagctttaaatgtagttataaactaaacataatttatctttgtttttatttttaattttaataccttaattatgcatatatgtacatgcatgtctctttctgtgtggatatgtgcatgcagccagaaccgtgggatccctggagctgttatgaaaacagtcgtgagtcccctgcatcgctgctaggaagcaaactctggttcccccagccgttgccccagccctgttgttcccactctgattgcattgggtgacttctcatggggagacattttaaaagctcagtccacctcagatagggcaccagtagatcaaggaaatgcttctgtctaattgagccgacaagtggtttgtgattgccaggaagagcatggggaaggggtgtcgtggttactttctctcatcactaggaaggtatgtttagctcacagtttaagaaggggtgcagcccatcatgatggaaaacatggtggcaggagcgtgagttgacagtcaccttgcgtctgttgtcaagaagcagagagaggcaaacgctggtactcagctctgcttcctcctcctccgacggatcccagctgtggtatggggtggacatttggagtggatctctccctctctccgaaagctcactcctggccatgtgtcccctgggtcactttacatcttgtcaagttgacagtggagattaactgttccacaaggctgcttacagaaatataggcaaatgaaaaccaggaaagaagttcattgttggcttacagttctggaggctgagatgctaaaagtatagctggcatccaggcttcaggtcctacttgttagagagcggacgcgagatagacaagaggcagacatggggcaatgtgtatcagtctcttcatttattagtccccggctatcacattcaaaccacgattccttagagtgccagtagacaagctttcagccttccttgaacagtccacaaccttcatttgtgtcaacctagcacttctggaagtttccagttcagcttctggtcctcttttttcgtcttccccgttgcttctgccatttcttccagggctctttgcaaactcatttgtctcaagccaacatctgaatgtgggttttgccaggcctctgtccacgcctgccctaagcatcctcagaagatccgtaccttcctcagacaactttaaatatctcatatatgcttctcagttgtcctgtctgatctgtgtgtgttccaaacatctcaaaatggctgcttctgaaattaaacataccctgtgcccatgcttttgccccacctttattcctcctccagcctctttccttctgctctcctctctctctaatagtctccatcctccagctcatagaagcctactgtccagggtcattcattagagccccactgtttcctgtagccagttataagcctgtgattctcccttacttctcagactcgttccctctcgccctcccaggagagccccaaagcaagcagtatctaacttgtttcctttaagtcttggttttgttctttttctttttttaaagatttatttattttatgtatatgagtacactgtagctgtactgatggttgtgagccaccatgtggttggtgagatttgaactcaggacctttggaagtgcagtaagtgctcttagccactgagccatctctccagccccagttctaaggaaaatttttaggctgtcctgttgctgagcatatgtctcactactgagatgataaaggagccaggcatgatggcttacacatggacttacccaggaggctgcgaatgtggtgtagtgattgataggtcagcataggatacagtaccagactctgccctgtgataaaaaataaataataaataaggtaagcggaagatgagatacatagctatctgtgagcatctggtggtaattagcacggcagactaaatagatcagaaaagggtagtgtggtgaaattgaaaggaaaagtaaaaccttgacaaatagatgtgctgggaagatgtttaagagagaggaaggtatggccatgcagagagaccacagaatgtggcgcatgccagacatggctaattggcctctttggcctcagcataaagtataggtggtagattaatagaacgtcaggctttttcatgccaagtctgaggttaggggctggcaagacagctcagtagataaagatactttcttactaccagtgggtccagtcccaagggctccactatagaaggagagcacgagttcctgaataccatcctctgacacacactcacaccatagcacacacaaaacacaacacacatagtcacacgcacaggcaatcaatagaagtaaaattctttaaatctgggcgtggtcagtaaaggaagtgggagtaagtcattggaagaaggcaaacctgagaggcttggaggcccggcctctctggcctccttccaaacacacacatcatggcgcaggcctgtgatgcaaacacaaggaagatggaagcagagtcacaagttgaagacatgcagcctgggctacatggcatcctacctcagggaggaaagaaagacttgttttggttacagtctcaatatgtagccctggctagctgagcgggagctccctgtgtagaccagactggacgtcagctcacagagatcctcctgactctgcctcccaagggtttggattaaaggcctgcaccaccatgtgtggtctcattattaaaaatactttgggcttaaccatttttatttaagtgggatctatgtatgtgagtcggtgagctttcccagatgtgtgcagtcgtgtaggcagcatgaggttaacatgacagggtgatcttttgtgtctttttaatcagtcctaacctcacctctttccacacccactgatcggcccccaacccctgtcactgtgctctttgtaggattttagataaatgagagactatataatcttccatgactggctcttttgctcagtctactgtggaagagaagagggcctgctttagaaagatactttagcttctgtacccatgtggcttgagatgtaagaggcaaaagcaggtagattagcaaattacagcagcattaagagtatatggtaggtggtagtagaagaaggaaaattcaggaaacttttgggtacaacaagcacaaaaattagacaaatgcagagataagaaaggggaagtgtgtgctcacagaggagagagctcaagtacagctgactcgaagaagaaacattcaggggataagaaggtctagtgtcggtcaaagtaacgtcagcctccttagaaggaggttcagggtcttctgttgcctcggtgtgtgattgtccctagtatggagttgagatgatgaagggtgggggtgggtgaaactaatccagtattcatctttggagcaagatagaaaagtgagttactacactctagaggcaagcattgggtaggcatgtggcatgggattcagcagaagagagcccgtcaaggtttggtggtagatgtcagcactgagaagcatcacaatgtgcgtgcgtgtgttcatgcgtgcgtgcgtagaaagggtcccctcttcatttcctgagtagctggggctggaggcacacactaaacccagcccaacttatttttttcttctcccagtgctgttaaagccctgaccccaaatgtgagggcgtttggagataggttcagatcatatgggtgagagcggggcccttatgagagacactggaagcctcactccttcccttggataactcagaagggacagtccacaggtcactccagcccaaccaagcttctattgggtaagccacacaggctgtgtattttgcctcagcattcccagctgtcacactcagccccaggagtgggggacaaagacaagtttcagttacaggggttcacagggacatcacagatgatctccagaaaacaataatgccaagggtaggaaagttagtcatggtacagcaaggacaaaaaaaggacgaaacctttggaaagtttcaaggtgagattccatatcttctttggtatgtctgcagaggggctgcgtaatttgggggcagtgatctttgagttttccaaaaatatgccacttaagatcagaggctggtttttcatctgctctttctgcacacacacaaagcggtatggcgtgtaaggctcggtctcagccttcagtctcagtgccacactgaacgactctgtgcacctgcgacatggggacagtgttgtttcctgtctcatgtggttattacatggagtgagcaagttactgtgtataaagagctgagaattgaaagcccagaatcaggttgtaaccgatttgaccccaggatttaacaacaacatgcacaggattagtaacacctaacgccaaacagtaataataccaatgattaattaaaatttaaaatccttgcccaggtgtggtggcaaatcccagcacttgagaggcagaggcaggtagagttctgtgagttcaaagccaacctggtctacagtgtgagttccaggacacccagggctacacagagaaaccctgtctcaaaaaaagaaaaaaaatgaaattctcagaatttggctggacttatagtgaggacttttatcaggaacatgcaatacgtgtatgcattcatgattataccttatattcctaaaaccatctgctgacaccaaaatccttttacgcagcagggatgctcataaatagaacctgtcagcacctgtatatacctgttactgagacagaccttgttcagttcaacactaaggcaaaattgggaagaaaatggcgacattgatcttgtttctaaaccttccaagttcagtgaagctgctgtccgttctctctccttccctcctgtcgggtccagcaccacttaggaaactactgtctagtggtttttagacttgaaagcatgcctagagtcgggggtcactagtgtcgggggtaaaggtgattgaaaatgcattgcttgagctctgggggcaggagaggaggagccccattacagctccttgaaagagtgggatgacccaggcactcacacctagatcatgcagtcctgtcctcaacattgaccacttcatttctcgccgtctctgctgactgccttctccatatttctgtcttcctcagagtttccggatgatgtaaatccagttaccaaagaaaaaggtggacccaagggcccggagcctacacgatatggagactgggaacggaagggacgctgcattgacttttaagtcacgcactctcacaactgcagaatcattacctgaactgtttacttcaagttgttttctttttctgtgtcctttaagtgtgtaatttccatcgtatgtcctaaaatgcatgtgacagctttgaatagcaaatgctgctatagatgaggaatgtggaaacgcttccattagcatcttaacctcaccttaagtgtgtcagggcagagtctgggatgagagcatcaagtctttgccacgatctttttgtcatttatttaatcagttgcttataaaatacatgtgtaaataaagacctcttgaaattt

SEQ ID NO: 77 - DNA, 661 bp, Mus Musculus
caccttggtgcgcgtgcgcagacgctgtgggagccggcgcaatggtctccacgaccctttccgtttcacggatgactttcgtctggagagcagcaagaccatctcttctgaatcattctttgaggaaaatgagttatcaggaaggaaagcctgagcctgcgaagcaagcccttaagaagtcaaagctgccactcggtcgttttgactcactggaggattcacctgaagagagagacccactgcagaagtttccggatgatgtaaatccagttaccaaagaaaaaggtggacccaagggcccggagcctacacgatatggagactgggaacggaagggacgctgcattgacttttaagtcacgcactctcacaactgcagaatcattacctgaactgtttacttcaagttgttttctttttctgtgtcctttaagtgtgtaatttccatcgtatgtcctaaaatgcatgtgacagctttgaatagcaaatgctgctatagatgaggaatgtggaaacgcttccattagcatcttaacctcaccttaagtgtgtcagggcagagtctgggatgagagcatcaagtctttgccacgatctttttgtcatttatttaatcagttgcttataaaatacatgtgtaaataaagacctcttgaaattt

SEQ ID NO: 78 - protein, 104 aa, Mus Musculus
MVSTTLSVSRMTFVWRAARPSLLNHSLRKMSYQEGKPEPAKQALKKSKLPLGRFDSLEDSPEERDPLQKFPDDVNPVTKEKGGPKGPEPTRYGDWERKGRCIDF

SEQ ID NO: 79 - DNA, 22659 bp, Homo Sapiens
tgcgcggaggctcggggagtcggcgccatgaccccatcgaggcttccctggttgcttagctgggtctcggccacggcgtggagagcggcaagtaagcacctggcctcggggccacggtcgcgggaggggtcgtgaaggcccaggcgcagagagaagcgcctcccgcggaggaagccgcgtgtgtcctggccgttcggtgttgccaggggctgcccagcttctcccgcccagccgcccacccggtggcctgggcaggttcctgcagcgccccgggtctcgggtgggactagagcgagaaaatcgctaaggccctttcagcccccgggacgtccgcttcctaccgagcacgcggtggcccaacaggaccacaaacgttccgggttgttcctgtgggagctcgcagggcacaccgcacttcgatgccccagagaaaaatggaaaagaaggccctttgggaatgggagtcattgatttacttatttatttacatcattatttacaggaatccgcgctcctggtccaggctccagcagaaaaggatttgtggcagtttacagtttatcttttaaaaatgggaaaagtgcagaagtgagccaaaggcaaataagtataacgtaaattagatgaagccaggaattgtcagtacagaaaaagcattcatgctttcagtaaaaccaacatttttaaacccattgttgttggaaatttttctcaagataatacagttagcagcccagactatgcaaaacataattttatttatttatttatttatttgtttatttattttgagatggagtctcgctctgtccctcaggctggagtgcagtggcgcaatctcggctcactgcaagctctgcctcccaggttcacgccattctcctgcctcagcctcctgagtagctgggactacaggcgcccgccaccgtgcctgactaattttttgtatttttagtagagacggggtttcaccgtgttagccaggatggtctcgatctcctgaccttgtgatccgctcgcctcggcctcccaaagtgctgggattacaggcgtgagccaccgcgcccggtccgcaaaacataattttaatatatgacacctggagaagttatgtaagttgaaaacagtaattattgccctcaaatggtgccagatttctatgcaatttgttttcctttgtgcaatcattttacccaaatacaaacattttacttaattgtataagttttaaatagtccagaaatgaataatacagaaagtgaaagtcctacattatccaaacctcaaggtaataacgttaaaattttgtagggttcattcaacatccccctttaactagttttaaacaattatgaattattccatatatatatatgtatacacacacacacacgtagcacacatgtaagctatgtagcagtcatgtaagctatgaagcacaaccagcatctatgaacttatactccaatttaagaaatagtctctattgccaaggaggtctctatttgctgcttcctgatacaactgtgcaatggtgtttttaatctttatagaaatgttttcatattgttgattttttttcagataacgctgtgttttgtgattgagtcacattgacgcatgaggttgtagttattcattcaactgtgtgaacatatgatgcattttccagtgcccttctcaaaggacatttgggtaattccagaaacactaggattgggtgctacacattcttgtgtaccttatttgtgcattagtggaaggagtagaattcctggagtatgttataggtcttttcattgttacaatataatgccaaggtgtaacggcattttctaattctatagcaattttcacttctaccagcagtgtattggagttctgttgttccacaaacttgccgaaacttaattttgccttaggttttaatttttggctgcctacagggaaatgaaatgacacctcattgtgattttgcttttctctgattaaagaagtaaaacatcttttcaaatattcactttttgtgaaatacctctttcttttttcttttttttttttttttttttttgaggcggagtttcgctctgtcgcccgggctggagtgcagtggcgcgatctcgactcactgcaagctccgcctcctgggttcacgccattctcctgcctcagcctcccgtgtagctgggactacaggcgcgcgccaccacgcccggctaatttttgtatttttagtagagacggggtttcaccgtgttagccaggatggtctcgatctcctgacctcgtgatccgcccgtctcggcctcccaaagtgctgggattacaggcgtgagccaccgcacccggcctcttttttctttctttgtttttgagacggagtttcactcttgttgcccaggctggagtgcaatggcgagatctcagctcactgcaacatctgcctcctgagttcaaacgattctcctgcctcagcctcccaagtagctggtattacaggcgcccaccaccacacccagataattttttgtatttttggtagagacagggttttgccatgaactcaggtgatctatcagcctcggcctaccgaagtgttgggattacaggcgtgagctgccacgcccggccttttttcttaacagattgcttcttatttatattctttacatatatttgtatgctaaaccttttttagttacgtaagtgtcaaatacctcaatttgtggtttgtttctgtcactgctaggcagaatagaataacgggtctgcatgtgtaatcatgcagcttcaatataaaaggtatcttaataaacagatgtttataattttatctataaaattttgtcttgatccttttgtttattgtgactgccttgtggtcttgtctaagaaacccttctgtaccctaaagtcatggacataatctcttatattttcttctcaaaggtttatagttttgcttttcacatttaagcctttattctaccaggaattgatggtttgtatatggtgtgaggcaggaaaccagttttcattttttttcatatcaaacacttgtcccaggttcatgtatttataggacctttcccctactgatataatgcgagccatcataaatcaagtttacttatacatataggcatacgtttatttcttggctcttttctcagtcccattgacctatttgtctattcctgtgctgatactacctgtcttgataattatagccataactttgttataaatcttactattttctgactgttgtttatgtacagaaacatgatgcttaatgattttgtatctaaattaccttattaatttaaataatttactttgcagattttggggactttgctgcatagccattcatatcatctgcaaatggtgacagtctagtttctccctgtctaatccttttttttgagaaagggtcttgctctgtcacccaggctggagtgcagtggcgcaatctctgctcactgcaacctccacctcccgaaatcaagtgattctcctgcctcagcctcccgagtagctgggattactggtgtgcaccaccatgcccggctaatttttatattttttttagagatggggttttgccatgttagccaagtgatccttgagagcctcggcctctcaaagtcctgggattacaggcgagagccaccgtgccccccaccaccctccctgtctaatccttatatcttttttctttctttgctcagatttccagcaccatgttgactagaagtgttgacagcaagcatacttatcttgtttatgattataaagggaatgcatttctttttatcattaaggtgtgatattgcagtcatttagataaaattgctacatttttttttaagtcaccatctcctaataacttctaaggcatgttttataaacgaatcctcagggaagagttctagctatctcccaaataattctgttcttttaaaccaaaaaatctccgtcttatgtttttgttaaaactctttattttggatttacatttacttacaggatttaatgatccataactgtgggtcttcagagtccaagcctttgtgaaataaaatttcatggaacatgaaaaaaaaaatatggtattagctacagttataccctttttgggttaaggaagtctgtttctatgtagagttttgggattttgttttgtttttgtttatgtatttgtatttgttttttaatgatgaataaatcttgaagtttacttaattgatttttctttgtcttactgaggtgttcttcgtcttactgaggtgtttatcattttctgctttaatctgttgaggtggtaaattacagatttttctgatagtgaatcacttgcattcctagaaaatattccaaaggatcatagtgattatatttttaaatataatgttgtatttgttgtgcttatattttgtttagaaattggcctgtaattttcttctattatacactgaaacccctgcctcccgggttcaagttattcttctgcctcagcctccggagtagctgggattacaggcacacgccaccactcccagctaatttttgtatttttagtagagacagggtttcaccatattggccaggctgatctcaaacttctgacctcgtgatatgcctgccttggcctcccaaagtgctggcattacaggtgtgagccaccgcgcccagccttccctggttttaatattaaggttattctagcctcatataatgtactggggattctactcactcttttcccttctttgttagattttgtttaagattggaattatttgttccttgagggtttgttacaactcacctgcaaaactgtctagacctgttcttctcttcgagggaagactttaaattacttgtttaacttctataatggttattattatatttatcaggtttcctcttaagtcagttttggtaagttaactttttctggaaaggtttccattttgtattgtttcaatatataggcataaagtttctggtatttttttaaaattttctgctctccatataatatgtactctctttttctcatattatctattttgctttctcttgtttttttatagtagccttaccaaagcttttacaacactttcagtctttttttgtctttttttttttttttttttttttttttgagacaaagtcttgctctgtcgcccaggctggagcgcagtggtgcgatcttggctcactgcaacctccacctcccgggttctagtgattctcctgcctcagcctcatagctggaattacaggcgtgcaccaccatgtctggctaatttttgtgtttttagtagagacgaggtttcaccatgttggccaggctggaacactttcagtcttttcagagcaccaacctttgtttattgttgatcttctttgttataagttatgcaaaggatatttattgtacaacatggtgactatagttaatatcagtgtattgtatacttgaaaattgctgaaagtagattttaaattttctcatcacaaataatagatatgtgagttaaggcatatattagcttgatttagctatttcacaatatatacatatttgaaaacatgctgtacaccataaatgtatataatatttatcaattaaaaaatgaagactatattgaaagttatttttacattgtaaattatgtttttattcatttttttcttattatcttatttttccattttccgtggttttttttttaaacatgcaaatggtgcatctcacataaacagcatatggcttgtttccggtttgtttgtatgggggtttttgttgttttgcagactaatagtctctttacccttataattactgataaaattacattcctctgttcagactcgtgggtctgtgtgtgtgtgcacatgcatgcacaggtatgtgtgttttgggtgggattttgattttgataaaacctataaagattttgattttgataaacataaagacttttgtatagtcagtatgttaaagcattttctctgtattcttatctcccactttacttctgggaacacttttttcttttttctgagagacagagtcttgtcctgtcaccaggatagagagcagtagtgcagtcatagctcattacacccttgatctccaggacacaagccatactcccgcctcagccttctgccaagtagctaagactataggcaccaccgtcatgcagtcatgcccagctaatctttcattatttttattcatttgtctctatgcgtttttctgtataatttctttgcaactttattccagattataaattctcttttcaattgtatttattctgctatttggcctttttttttttttttttgagacggaatctcactctgtcgcccaggctggagtgcagtggcacagtcttggctcactgcaaactctgcctcctgggttcaagtgattctcctgcctcagcctcctgagtagctgggattacaggcaccctccaccacacccagctaatttttgtatttcaagtagagacgcagtttcaccagattggcctggctggtcttgaacccctgacctcaggtgatccacctgcctcagcctcccaaattgctaggattacaggtgtgagccacaatgcccggccagctatttggcctttttattgagttttaggtttgttatttctgaatttccgtgtttttctttcttttttttggcctaatttttctttttcttttcttttcttttcttttttttattttttttttattttttatacagagtcttgctctgttgccctggctggagtgtagtggcgtgatctcactcactgcaacctctgctgccctggttcaagcgattgtcttgcctcagcctcccaagtagctgggattacaggtgcccaccaccacgcccagctaattttttgtatttttggtagagatggggttccaccttattggctaggctggtctggaactcctgacctcaagtaatcttcctaatttggcctcccaaagtgctggaattataggtgtgagccactgtgcccagcctaaaaaaaacttgcaaagccaaaagtaattaagcaaaaagagatgatgaaaaatgattaggctggctgggcacggtggctcatgcctgtaatcccagcactttgggaggccaaggcgggtgggtcacctgaggtcaggtgttcaagaccagcctggcctacatggtgaaaccccatctctactaaaaatacaaaaattaactgggcatggtggcacatgcctgtaatcccagctattgggaggctgaggcaggagaatcgcttgatcccgggaggtggaggttgcagtgagctgagatcacaccactgcactccagcctgggtgacagagcaagcctccatctcaaaaaaaaagaaaaaaaaaaaagatgcttagggatttttggaagatgcagctagtgtgtagttaggcctaaacacgggtgtgggtcagtcagtggcttcagaatctcagaggggcttctttttttcacatcttcactcagaaccaaggttaaagtagatactttttcttccttaactgtctttcttctagttccttgctatttggaacagcatcataagcatcacctgggagcttgttaaaaatgcaagaatcacaagtcccacctagaactactcagaatctgcattttaacaaaatcccccaggtggtttttatctatgttttaaatctttcagctgggtgcggtggctcacacccataatcccagcactttgggaggcaagaggatcacttgagttcaggagtttaagaccagcctgggcaacatagtgagacccccatctctacaaaaaataaaattagctgggcatggtgttgtgtggctgtagtcccagctgctgaggaggctgaggcaggaagatggtttgagtccaggagatcaagactactgtgagccatgattctgccactacactcaagactgggcaacagagcaagacccttgtttcaaaaaacaacaaaaatcttccagttcactttcttttctcagtatgtgagcctccctgagtcctggcttctcctgcgctttctgtttagcttgagtttaagagactgtcatctccctgctgtcctgaaagctctgtatcctacgatctaggcaagaaagacacaagaaggctttgcaccatggcttatgcctgtaatcgcaatactttgggagaccaaagcaggcagatcacttgaggtcaggagttcgatacaagcctggccaacatggcgaaaccctatctctattaaaaatacaaaaattagctcagcgtattggtgggtgcctgtaatcccatctactcgggaggctgaggcacaagaatcacttgaaccctggaagtggaggttgcgatgagctgagatcgtgccactgcactccagcctgggggacagagtgagactctgtctgaaaaaaaaaaggaccctcctggtcaacatggtgaaatcccgtgtctactgaaaatacaaaaacttagctgtgtgtggtggctaatttttttttgtctctgttcaaaaaaaaaaaaaaagacgcaataagtgtagccatttcactttgtgttcacctcactggactgtcttcagtttatcattatttactttcgtaaaggttctatctctgatttagaagatgtttgattttgttttacctttttaggtgttttatagctgtagagttttggcatttctgatttatcaaattaccagaaacaaaagttttgagttgtgtgttgtttttgtatatgtgtgtgtgtgtgtgtgagagagagagagtcattcttttgcttttattatttcttcttttagaaggttttcttcttgtctattatgtccatgtaaacacaattctaaataggtttggataaagtcaaaccaccccttgaagtagaagagatgggctttatggttgttatttcatgatgttgttaaaagaggcttttgttttaagtttgtcagctatttcccgtgtagtcgaggtagtcaaaagtctgctgatagccaaaatgtaatcctaacatgaatacagttactattgctcaacacctactgtttaataggcagaattaacaggagtggtccttgggcttagctcctcatctgacacgcccttgtttcttttgctctgcctttgaagctacttgtatgtgcttcactaccaacacccctggcaggctgatgtgcacacacttgtgtcgaaagctgtaaagcctgcaggtgccaaggagcacagtgtcccatcttaccttgtactgtacagaaatgaggggcattatcttcccccgtgttctgtcacactgttacctgactacaaaaatagttctgtttatgtttccaacggcctcagagtcccttgagaaaactggtctttcaacttttccttgtaaaccctctttctacagataaagtccttcagaagtctgcaaggtcatattagggaccagtttctccaacttacactttgctcctcctcgctttccccaagacacagttttctgttcttcaccagaaacccttacacaaattaacttatacatcccagagttaggctcaagttattgatgcacttgctcaatgtgtacacatacacagatatacacatatttatcttaaccacttgtatgcatatgtgtttgtgtctatttctttaaacaaggtagggttatgtagtgatgactagaatatgagaaaaatatgtgtaatgaaaaaacattctaatatgtaatgctgtcaaaagcttacagataattccatcaaactaaaaataaatactgtttatcactatcctaaaggcataaattgtcccgtttactcagcaatctcatgtgacaggtactgtaatttttctgtttacagggaaggaaacaaaaagggtaacttgaccaacatccaacacctagtaagtggttgcatttgtttcctattgctgctgtaacatattaccacaaatttggtggcttaacacattttacaggtttggaggtcaggagtctggaaggggtctcactgagctagaaccagggagttagcagggctgtgttccttctggaggccacatacatttccttctctcttttagcttctagaggctgcccacattccttggcttgcccccttcctccatcttcaaagccagcaacatcgggtctggtctgtcttccaaccctgtcttccctttcaaaggacccttgtggttacattgacccaccccataatcctggataacctccctattttaaggtcatctgattagccaccttaattctgtctgctaccaaaattcttcaccgtgtaaccaaacctattcacagattctgggtattggattctgattatctttgaggccattattctgtttgctacagaggtgtagctagaacttgtactcaaattgatctgcttctaaaagcaatttctttaggaagctggaaacccctaacgctgagatcacttttttccctgtggttttgcccttgctgaatattatctcaatgagggtttggataacttttatagcatagaaagttcaactctttttagaaactagagagaaaatgatgtcatttacgcattgcagacacccagtacattttaaaatccgaagttttattttagattcagggagtacacgtgcaggtttgttacctgggtatatgtgtgatgctgagatttgggatacgaataatcccatcacccaggtaatgagcatagtacctaaaagttagtttttcaacccttgcatccccttcttccctccctgacagtcgtacccagtttgtattgttgccttctttatgttcttgagtatccagtgtttcactctatagaattagaaaattatatgtgagaatatgcaatatttggttttctgttcctgcattagttcacttagaataatggcctccagctgcatccatgttgcagcaaaggacatgatttcattatttttatggttgcatagtattccatggtatatatgtaccacattttctttatccagtccaccattgatgagcacctaggttgattccatgtctttgctattgtgaatagtgctgcagtgaacatgcaagcgcatgtgtctttctggtgtgaaaaatgagtagttttcttttgggtatataccagtaacaggattgctgggtcaaatgatagttctgttttaagtactttgagaaatctccaaactgttttccacagtggctgaactaagatacattcccactagcagtgtatacgcattccctcttctctacagcctcaccagcatctgttgttttttaactttttaataatagccattctgactgatgtgacatggtctctcattatgagtttaatttgcatttatctaccaattcgtgatgtggagcattttttaatatgtttgttggccgcttatatgtcttcttttgagaagtgtctcttcatgtctgttgtccattttttagtgcggttgttgtttgcttgttgagttgtttaagttccttatagattctggatatgagacttttctcagatgtgtagtttgcaaatattttctcccatcctgtaggttgtatgtttactctgttgagcgtttcttttgctctacaaaagctttttagtttaattaagtcccatttgtcaatttgttgttgttgttgttgttgcagttgcttttgaggacttagtcataaattatttcccaagaccaatgtccagaagagtgtttccgaggttttcttctaggattcttacagtttgaggtcttacatttaaatctttaatccatctcgagttaatttttgtatgtggtgacaaataggggtccagtttcattgttctgcacatagctgccaactatcccagcaccatttatcaaatagggacttctttccccataaaacaatctttttttagagacatggtctcactatgttacccagactagaattgagctcctgggctcaaggaatcctccctcttcagcctcctgcataactgagactacgggtgcatgccaccatgcccaacttgatgtattcttaaattagttgacaggaaaagaggaccttgattaggatttaaatgtagccacttctgacttttagagatttgaatactaaatattgtcattgaaaagtttgtactactaagttactcttaatatttgaactcctggttttttggcattgcttcagataggaattaatgttttaatataagtttctgcaatattgataacaattaactaatttatttcatagcccttcttttcaaactggtggtcttccaggaagggaaatggctggagaggaaggaagaattttcactctgcgtccttttgtactttttgaactttgagaaatgtgaatgtataaactaaaaacaaataaataaaattttataaatgtttaaagtggaataaatgaacagctcctatttttctattatctccactcttctaggatcaccccttctgtgtcattctctgaggaaaacaagttcttctcaaggaggaaagtctgaacttgtcaaacagtcccttaagaagccgaagttaccagaaggtcgttttgatgcaccagaggattcccatttagagaaagaaccactggaaagtaagtataataaagcacctctcagtttttgaagtatcaaggaaagtgttttagttattgagaaaatgagtgaaaggaaagaaatttgttattgcttaaattctgtagtaataaagcatatttcaacaatgagtaaaatcaccatattgaccatcgatacatgtagatttcttaataaaaaagattttcaagattctgacaggtatttgattgtgtttgttttatttgttatacctcattattcacataacaaaatatataagttgagaccttctttgttacaaataaatgatgttatttgtatcaaagaaggttatgttatttgtatcaaagatcttatgtgaataatgaggtataataaatataaccactttatatatgtaatgtacacatattatatataaaggactccaataactcaacgaaaagtcaaaaatagcaaagcacttgagtcttaacttatatattttgctatatgaataatgaggtatgataaataaataacaaatatatgtgtatattatatgtatgtgtgtgtgtgtgtagaactccagtaatctacaaaaaataaaaataaaaaatagcaaagtatttgagtagacatttctccagagaaggtatacaaatgtacaaatggccaacaaacacatgaaaagatgctcagcatcagcatcattatcattagggaaatgcaaatcaaaactatgagatactacttcatacccactaggatggctataatagaaaaaaatggaaaataacaagtgttgggaaggatgtggagaaattgaaaccctcaggcatttctgctgggaatgtaaaatgttgcagccactgtggaaaacagtatggccgttcctcaaaaaatcaaacttagaactaccgtttgacccagcagttccactcttaggtgtgtatctaaaggaattgaaagcagggacttgaacagatatctctgtaactatgttcatagtattattaacagtagccaaaaggtggaaacaacccaatgttcacaaacaaatgaatcattaaacaaaatgtggcatatacatccggtggaaaactattcagtcataaaaagcaattaaattttaatatatgctacaacatggatggaccttgaaaacattatgtttagtgaaataagctggacccagaagggcaaatatatgattccacttatataaggtacctagaataggcaaattcatagagacagaaagtagaatagaggctatcagggactccggggactaagggagaagtcattgtttagtgggtacagagttcattgtggggatgatgaaaatgttttaggtatagatagtggtgatggttgtacaaccttgtgaatatatttttgttgttgtttttgtttttgaaatggagtctcactctttcacctaggctggagtgcagtggcacactctcggctcactgcaacctccgcctcccaggttcatgtaatactcctgtctcagcctcccgagtagctgggattacaggcacaccaccacactggctcattgttgtatttttagtagagatgggggtttcaccatgttggccaggctggtcttgaactcctgacctcaagtgaccaacccccctcggcctcccaaagtgctgggattacaggcgtgagccactgtgtctggcagtgaatgtatttaatactaccaaattgtacacttacaaatggttaaatgagaaatattatgttatatatattttaccacagtaaaaaaaaaagaaagcaaaaacctgcacttttcaaaagctaatcatctatttgacataatggtaggcattcaacgtaagtcttgtatcactcaagtttatgttgaacctaccatcccttagaaatttctgacaaacatcaccaaatacagcaggtactcttcaatccttgttttatttgaacaatccacaacctttgacagtgttaactattgcttctggaaatctcctgccttgatttccattatgctttcattagtttcatttttgtgtgtgtatgtatgtgtgtgtgtgttgttttgttttgttttgttgagacagggtcttgctctgttgcccaggctaaagtgcagtggcatgaacacatggctcactgcagccttaaccttcccagctcaaactgtcctcctgcctcagtctcctgagtaagtgagaccacaggcacataccaccatgctcacctaatttaaaaaatttttttgtagagatgaggtcttgccatgttacccaggctggcctcaactcctgggctcaagcagtccttctgcctcggcctcccaaagtgctgggattacaagtatgagccaccattcctggcatgctttctttagtttctcaccctatttcttcaccagtttcttcctgggctcctttttgagctcctctgcctccgcccaacacctaaatgtgggtatttgccaggcctctgttcttagccccctaagtattccaagggagatttcatatttccctaaaatgattagatttatttgattgattgaggcagagtctcactctgtcacccaggctgaagtgcagtggcgccatcacagctcactgcaccctcaacctcctggggttccctactcagcctctcctgtaactggggctacaggcacgcaccaccacacctggctaatttttctatttgtttctttaagagatagagctcagtatgttgcccaggctggtcttgaactcctgggctcaaacgatcttcccacctcagcctcccaaaatgctgagattacaggcatgagccaccacgcccggcttaaaatgattttaaatatcacctatgtgttggtgattcatacatttatacctctaatcagacctcgttcctgagcatcactctcctgtctccatttgcctcctgagtatctttctttgcacattccagaagtctcaaaattaatatttctaaaactaaagtcatcgtgtacccattgttccaactcaccttcggccctcccacctgcctgatctcatatcctcctcttccttcgggatttccagtccaccccatctaccaagtcacccaagcccgaaatctggggataatctttcactcctgcctcttcctgtctcctgtgactgatcactaaccaagtcctgttgcttctacccttttaacatctctcaaatttattccctcttactcatcctaccagtagggcccaaattcaagctgtctctagctccactggtcacctaacaagcctctctgcttcctcgtttccttccttctagtcttgtctccctgcctctagtatgtactttattctaagaaaactgtgtaggttgtctccttgaaaagagtagatttcattattaagatcataaaggaaaatgtttgtagctaggcaccctgcttgacataaagatgaataagaaaggaagatgagataatgtaaataacgatgaacaggacatcatgtggtaactagcatgagagatacacaaaaagatcagaggaaagtcgacaaaagagataacgtttgagctggggtctaaggaaaaataattttttgtttttttgagttggagtctcgctctgtcacccaggctggaggacaatggcgcaatttcagctcaccgcaacctccgcctcccgggttcaagcgattctcctgcctcagcctcctgagtagctgggattacaggcgtctggcaccacacctggctaatttttgtatttttagtagaaacggggtttcaccatgttggtcaggctggtctcgaactcctgacctcaggtgatccacctgccttggccttccaaagtgctgaggttacaggtgtgagccaccatgcctggccggaaaagtaaaatttttataagtagataaggtgtggtgaggagacatttcaaaatacctggagaaagctatggtcaaagagaaagaggctgcagaacattaacacttacaagacacagctaatgggcctctttggcttcagcataaattatatatatatttgattaatacagggttgtccaatctcttggcttccctgggtcacattggaggaagaattgtcttaggccacacataaaatacactaacaacagctgatgagctaaacaaaaacaaaaacaaaacaaaacaaaaatcacacaaaaaaactcaatgttttaagaaagtttatgaatttgtgttgggccacattcaaagccatcctgggccacatgcagcccgtggactgtgggttagacaggcttggattaattgaatataaagctagacacacaggttcagctcaaatctgggagggcctgaaatcccaggttacagtgtaagggctttatgcagtgagcagtgaggaaatgtatttggatagaggttgttttaattagctttattaaatatagtctgcatatgataaaattcacccatgttaaatatacagttgagtgaggttgttgttgttgttgttgttgttgttgtttgagacggagtcttgctctgttgcccaggctggcttgcagtggtatgatctcggctcactgcaacctctgcctcgggttcaagcgagtctccttcctcagcctccctgggattacaggcacctgccaccacacccggttaatttttgtatttttagtagagatggggtttcaccatgttagccaggctggtctcgaactgctgacctcgtgatccgctcgcctcggcctcccacagtgctggggttacaggcatgagccaccacgcctggctagtgagttttaacaaatgtttacagccatggaaaccacacaaagtgtaaaatagttctgtcccctaaagaggtacaaggcagttcatcctctccccacctcctcccagcaaccattgatctgttctctatcactgtagttttgctttttctaggattttatataaatgaaactctacagtatgtagtctttggtgtctggttcctttcacatagtataatgtggaagagggattctgttgtattagttctaaaatgggacactgagagcaggaaccagggtggtaatggtgagaacaaaaagtttcagaaaactgcaggctattataagggcaaaaattaggttaacaaatgtgaggaagaagagacatggaaagatacgagggtgtggtcagaaagaagagtgctcaaaagagtgtgggatttggaggaggaacatactcaaaaaataataaagtccagtggacagcagaagtagatacgaaagtcatcaggaaagagattggtgacctttgtggcctcgatgtgtgatgatttactaatgtggatgttgatattagggatgatggggagagagagatgaaactatgaaccagatattgatcccatgcaagaagacagaagaatcttggagtttattataagactagagaaaagcactggataagtaaatggtatagaattccaaaaaggaaaggctatagaggtgtggcattagaatgagaggctggaaatagcagtgaggagcagggacatcttgacctgttctttcttccccagtgctgtggactgaattatgttcccccaaaattcatctgttggagctctaaccccccaggtgatggtatttggagatggggcctttgggagataattaggtttagatcatgagagtaaggtaactctttaagagatggaactgttttacactttgtgttatttacatgactgtcaacatttgttaaaactcactgaactgcgtacttaaaatgggtgaattttattataagcagacaatactttaataaagctgatgggaatctcctcatggtgggaataatgcccttataagaagagataccagagagcttgctgtctctctttctctgccatgtgaggacacagcaagaagcgaccatctgtaagccaggaagaaagccctcatgagaaccaaccatgctaccaccctgatttcagcctaccagcctccagagctgtaagaaaataagtttctgctgtttactccacctagtctatggtattttgttatggcagctcaagctaagacatccagtgagccacagagatatgtgagaaagaagaacttccgttagagaggccttcaagggaattcgtggagtaggaaaaagccaacttgcattgcagtaaagcatggaattattttgaaaacagaatgctgatgagtatgggggagagtttattcacaatataacaagaataaaagaatgaatatttgaaaaattttcacggtaaattctgtatcctttttcttttgcctgaggggctttatgattttggtgaagatcatttagttttctaaagagatatagtttgggtaatcattctcctgcagtttccccgtgctatgcaggataaaataaaagccgtatgccttttcttctgttaatctgtcttttgtcagttgatttttggcaaacctttagagggcaaggaggatgtttttccttggcccctacaccttctcccagagtccaagcaatgtgcttcctcagtagaacaggttttaacatctgtaagtagctacgatgatgacctcagcagagaatacccaccttgagggaatgtgacacccatgcccccaaaagtctagttgccttttggtctgtgtctcaggagtataactgacttctctagggattgaatgtaagagagacctaagtaaccatggggtttggataaagcaaatctgggtttgaactggagctctcagaggcttctactctctgggtttcagtttcctcctaacacctgccttagaatgcgcttatgagaagaaactgagatgatagggcactttgcactttccctttcaagccttgccagagtttgttattcttgtatgtatttgtttgcctttttttttttttttttttttttggcctacttcagtactctgtgagccctgtgagggaaggggccttctattgcatggtcactactgtgtccctcaccccacctttacatagcatagggcctggcagagtaatagtggaataaatgaatgaaactgtctgcccacaggatggccatgaggatgagaataaatctcttcattcattcatatgatacgtattaagtatcctctgtgagccaaacactgaaacagcaatggataaaacacacaaaaaaattataccataatgaagcttaacattttagtgggagagacagacaataatccaagtaaattttaaaaatatactaaattactgataattgctgaagataatgtaaatgtgggaaggaatgggaagtattgggagagtggccacaataaataaatagatacagtttaagaattaggggccaggcggccgggcacagtggctcacgcctgtaaccccagcactttgggaggctgaggcgggtggatcacctgaggtcaggagttcaagaccagcctggtcaacaaagtaaaacccccatctctactaaaaatacaaaaaattagctgggcatggtggtgcacacctgtaatcccagctactcgagaggctgaggcaggagaatcacttgaaccctggaggcggaggttgcagtgagccgagatcatgccattgcactccagcctgggcaataagagtgaaactccatcacacacacacacacacacacacacacacaagaattaggggtcaggtgcagtggctcacgcctgtaatcccagcactttgggaggccaaggtgggtggatcatttggggtcaggagtttgagaccagcctggccaacatagtgaaaccccatctctactaaaagtacaattattagccaggcacatagtggtgtgcgcctgtagtcccagctacttgggaggctgaggcaggagaattgcttgaacccaggaggctgaggctgcagtgagctgagatcacgccactccactactccagcagggcaacagagctaggctccatcttaaaaaacaaaacaaaacaaagaattagcgctctgtctaatagttggttcctctcctgttttttccatatacagagcagtgcagtgtatgggctgagaacaagactgcagccaggatgtctgaatttgaactcagttttatcacttagaagctatgtgatacggagcaactttcttaaccctttgtggctcattttcttcatctataaagttggaacaataattgttcttgtcccataggattgttaggaagagtaaatggattagcatacataaagtgctgagaattgagcctggcttgtgatggggattcctactatgaacacatagtactaagaataataattactattatgattataaatggcagtaccagccaaccagttgctgaagccaaaaccctatgatgaggaacagtaattctctagctaagattaattgacattcctatgtacctggcaccacgctaaaccctttacatgtattaccttgtttaattaacaacacagtgagagaagtatgattgttctctccattttactggtcagaaaactgtggcattaagtcaaagtgactccttcaaagtaatcttatttcaagacctttcaagtcttatgaatttgtactctgtattctcttctcaaactcaggaaaaagaatcacatttacagttcttttaaagactgcatggtaaccaggttggtaagatctagcctatcagcaacgctgtctttaaaattgaccataggctggtctcggcggctcacgcctgtaatcccagcactttgggaggccgaggcaggcagaacacttgaggtcaggagtttgagccatcctggccaacatggtgaaaccccttctctactaaaaatacaaaaattagttgggcgtggtggcatgtgcgtgtaatcccagctactcaggaggctgaggcaggaaaatcacttgaacccagaaggcagaggttgcagtgagcccagatcacgccactgcaatccagcctgggcaacagagggagactctgtctcaaaaaataataaataaataaattaattgaattaaattgactataaggcctttcctgcctccattaactgctttatttatatctcgttttccttagaatttccagatgatgttaatccagtgaccaaagaaaaaggtggacccaggggcccagaacctacccgatatggagattgggaacgaaaaggacgctgtattgatttttaagtcgcatattctttaacttcaatattgttttctgaatatgtacatctgaattaacttatttctgattattttctttctttatatcctttatgtcgtgtagtttgtataatgtgtttaaatatatatatatatgatggctttggaagaaaatatgctgctgtaaattaggaaagggagaccagcctgaccaatatggagaaatctcgcctttactaaaaatacaaaattagccaggcgtggtggcatgcacctgtaatcccaactactctggaggctgaggcaggagaatggcttaaacccaggaggtggaggttgcggtgagctgaggtcgcgccattgcactccagcctgggcaacaagagcgaaactccgtctcaaaaaaaaagataggaaagggaaaatattttttcattaacatatattaatttaatgagtatagaaatgattcttgtttttttgagacagagtctctctctctcacccaggctggagtggagtggcactatcccaactcactgcaacttccgccccgccaggttcaagcaattctcctgcctcagcctcctgagtagctgggattacagacacccaccattgcgcctggctaatttttgtatttttagtaaagacaaggtttcaccatgttagccaggctggtctcgaactcctgacctcagttgatccacctgcctcagcctcccaaagtgctgggattgcaggtgtgagccaccacgcccagcctagaaatgattcttagagctgtaggcctttacttcatcatttttcagtttaaattaatcagttgcttataaaatgcatacataaataaaataatttttaaaaaatga

SEQ ID NO: 80 - DNA, 871 bp, Homo Sapiens
tgcgcggaggctcggggagtcggcgccatgaccccatcgaggcttccctggttgcttagctgggtctcggccacggcgtggagagcggcaagatcaccccttctgtgtcattctctgaggaaaacaagttcttctcaaggaggaaagtctgaacttgtcaaacagtcccttaagaagccgaagttaccagaaggtcgttttgatgcaccagaggattcccatttagagaaagaaccactggaaaaatttccagatgatgttaatccagtgaccaaagaaaaaggtggacccaggggcccagaacctacccgatatggagattgggaacgaaaaggacgctgtattgatttttaagtcgcatattctttaacttcaatattgttttctgaatatgtacatctgaattaacttatttctgattattttctttctttatatcctttatgtcgtgtagtttgtataatgtgtttaaatatatatatatatgatggctttggaagaaaatatgctgctgtaaattaggaaagggagaccagcctgaccaatatggagaaatctcgcctttactaaaaatacaaaattacctcctgagtagctgggattacagacacccaccattgcgcctggctaatttttgtatttttagtaaagacaaggtttcaccatgttagccaggctggtctcgaactcctgacctcagttgatccacctgcctcagcctcccaaagtgctgggattgcaggtgtgagccaccacgcccagcctagaaatgattcttagagctgtaggcctttacttcatcatttttcagtttaaattaatcagttgcttataaaatgcatacataaataaaataatttttaaaaaatga

SEQ ID NO: 81 - protein, 108 aa, Homo Sapiens
MTPSRLPWLLSWVSATAWRAARSPLLCHSLRKTSSSQGGKSELVKQSLKKPKLPEGRFDAPEDSHLEKEPLEKFPDDVNPVTKEKGGPRGPEPTRYGDWERKGRCIDF

SEQ ID NO: 82 - DNA, 16557 bp, Mus Musculus
gcaccattctgaaacgctggaagaagaattggttcgacctgtggtcagacggtcacctgatctactacgatgatcagactcggcagagcatagaggataaggtccacatgcccgtggactgcatcaatatccgcacggggcatgagtgccggggtaagctgtgcccaggaccaccaccccaccttccttaatgagtctgctcccactgtccaactggacactgtccagacagggcagccacagtggggcttgggcgttcagatcctgaacatcacgataaatagatcttgcgcccttccccacactggagttaggtcccgggctgtttcccgtgcagtgatgtacagtcttgctcttcactcctgggttgttaggtctaagaatgcataaggaggaaaaaccaaaaccaaaacagacaaaaagtcaacccacagattactcctccattctgcctctctctcctagacatccagcctccagatgggaagcccagagactgtctgctgcagatcgtttgccgagacgggaagaccatcagtctctgtgcagagagcacagacgattgcctgtgagtgctcatttgattatgtgtttaattcacagagtgttttctactctaatttccctttgttaggaagggaagagagtgggaggacagcctccctccagcctggggctctgggagaagcgcaacaggggcttttcttggatctagtttctttctttcttgtgtgtgtgtgtacttgtgtgtgtccacaatgtatatacatgccgtggcaagggtggaggtcaggagacaatgtttgcgttggtcctcgccttgcatcttgcttttgagacagggtcttattgatttttttcattatgtttccccatgacttccagagagtctcctgtctctagtcctcatctctccataggagtgctgcatcatacactctagtgctacacagctgaactttttagaagtggtcagaagtgcaatcagctcctttgcaggcctccctgggtctgtgggacccttactggcctctcctcatcttgcccatacccagcatggtggactgaggatcttaaagtttgaccccattttcatttgatttcatgtgcaaagaccctgtttcttggtgagccacacttatcagtgcagaggaccccaagttcagtgtgtctcttgaaggcacaaagttcaatccatgggaacagagacctctgaggaaagatgaggaaacaaatctggattgccttctgcagccatcaagtgaagagaaagggaggattgtttatgcagctatctatctacgctcatgggagtcctcctgtatatacctcctaagtgctgcgattagggcctagccgtccctctctacacagaagcctttccgggactgccgaggcttatctgaacttaagaatcgttggaatgttggattacttcagagtactctgttttttcattttttccagggcatggaagtttacactgcaggattccagaacaaacacagtaagctgcccatgggtattccagcccagttggtacatcgtgggtctgtgtagcaaactggagaataggaggctggaagagggaaatggaagggctgggtggggatgagggggagggtctcctgtcttcctgagcagaacagggcagggtgcctctcgttgacagtgatcatgctggatatggtaagaggcacctattgtggtctgatatgaaacagcccccatagactcaccgtgctttagcgcttggctccctgctgttggaatagtttagggaagttacagaacctttaggtggagcctcgctggaaggcagggcgtcaccaggggtcaccgaggatttgtcttgagcctgacttgacttctactcagtcctgatcctggatgtaatatgaccagctccttcctgctacttctaccttgcctcctctgcccgctgccactcttccacctgctgccgcgccttcaccaccatgatggactgtgtccctctagaattgcaaaccagaccaaactccttctcctctgagtttcttccatcaggttatttagtcagactagtgagaaagttaactaagacaacaccctcctcagccagccgtcgcagttccagtgttacctggcggtgttcaccttcctccaggtttccggcatcttgatttcttctcttatttgaagtaaaagttcaaagagaaccacggtgcccacttcacccataagatctcagcctccgggcatggtggctttaatcccagcattgggaggcaaaagtggatctctgtgagttcaaagccagtctggtctacaaagcaagtacaggacagccagggctattacacagagaaaccttgtctcgaaaaaccagaaaaaccaaccagctaacccaccaagcaagcaagcaaacaaccccccgccccccgcaaacaaccaaaaagactttagccctcagcttcaaaagctatggcgaccttggccttgcctgtatccctaatactaagaaaccataaatcctgtagtatccctggcagtgcctcctcgtgcccaagatcgttgtggttgacattttcattcttaggtgggactctaatttttccagtatatatacagaaaaatataggaaagtacaagaggcttacagaagaatttgcacaggtgggaaacagagtcgaaagctcagtggtcgcagcttttgttggccagagctactttacctcagagctcactccgtgcccccttctttgaccaacagcccctgccctggaatttcacatcagtgagccatgcagttagcaaaatcccagtgcaatctacgtgtggatttttaaaagttactttttacctttccactggggcacacacaggttttagactacagaagagcatctgtgcacttgtgattgtgaccagatggactgataagggtagtagcccttggtctataggcagtcgagcttcaggtaccttcccgggccaagagtgccccgctctggcttggggctgagccgggactggctgctgaactcagggtgttttaggaggctggaggctgcccctgctccagcagggtctttgtgatcttttctttgctgagtgaatgtgctcttggtcctagctctcttgtctcccacaggcttacgttggttcagcaatcctgtctgaagagactgcagtggccgcgtccccgcctccctacgcagcctatgctacaccaacccctgaggtagggaggtttgagcagagcatacacatgagggaagccggggctctctgctgctttcccatttctgttggtctcttttcttctgtttctggttgtagttttgatcttaatcttaagtcagtctcagggaaattagaaatacactccaaggcttccctttttatcatagtattcctctttgcttagatgaaacagatcagctcttggagctggtgatgtggtcagttgatggagtgtttgcctagcaagctggaggttttggtccccagcactgtataaactgggggtagctacacaaacctggactcctgatcagtgcttgggatgcaggagcagggcaattaggagatgcagatctttcatggctgcacaggaggccagcttaatctagagagtctatctcaaattaagcaaaaaaccatatatataatatatatatatatatgtatgtatatatgtgtatatatatatatatgtatgtatatatgtgtgtgtgtatatatatatatatatgtgtgtgtgtgtgtgtgtgtatgtatgtatgtatatatatatggtatatgtgtgtatatgtgtgtgtgtgtgtgtatatgtagtgcctgcatctgtagcacacaggtagaggtcagagggcaacttgagagttggttctctccttccattctgtgagtcctgcagattaaactcaggccagcagacttggcggtaagcacctttatccaacgagccatctggccagccctggatccgtttatctgtattaactgcaaagccttgcaaggtttctgacaaagctgctgtaagccaatgcatcacgcttagagagaaggcgtgtttgctgctctgagcctcgtggacttctctgtttgtcactctgcttttattcctggctttctttattttatttttgttttgtcaacattttacagttttcagcataaaaatttagtacacgttcgttggatttataattatcccattattttcaaatggttgtatgtaactgtctgtttttaaaagatacactttattttgtgtgtatgagtgttttgccttcaggtatctgtgagcacctcatgcatgcagtacaccccgaggccagaagagggcaccagataccctgcaacttgagttaagggcagttgtgagccctgtgagccatgtgggtgctgtaaaggcttgatcactttctcttagcttcccaaaatctggagttacaagtgtgcagcgccacaccctggctagttccagaacttgtattctttgtatattaatatatagtatgtattatactgagtttttcttatatgtttttttttttattattttgggtagagtttttaatttttttcatttaagtatgttcatttcctaattattaactgaaagatttttataataattactttaaaatcctttctagagggccaagtgtgatggcgtacccctttaatcccagcagtcaggaggcagaatcaggcagctcaccatgagttcgaggccagcctggtctatatttcgagttccaggacagccagggctatacagagcaaccctgtcttgaaaaagttctttcccgagctgagtgtggtggtgcgcacctttagactcagttctcagaaggcagaagcatgtggatttttatgagtttgaggtcagccttgcctacatagaaagttctaaagaactagtagactgtggcaggaaaaaaaatcttttccgtaagagacgctatctcaagggaataaggtgtgggagtagagggagtgagagattgggcgagcacacccagtgtcctcttttggcctctgcatgcatgcatgggcgtgtataccttctatacatgtacatttgcccctgcaccatacattgcacaacatatatacaccagagcccaatacacaagtcctttctagataattctagcatctttcaccctaggtgctgggttggaacctagcctttcttgcatgcctagcaagctccgcccaatgagctgcactccagcccacatctgacatctctacagtctcagtgtgggccttcttctgtgtcattttgtttgcgatcttggctgttcgtgctaaaagtgattattggtcaaaaccctgacattttaaacatggagagactcggatcttgccaggtggagtccagattctcagcccacagcaggggccgggctccagctcaggagtttagattttctctgagtctccttagagcactttgttgggaagagaggactgcccattactgctcgacttccactgacaggtgcatggtgtccggccagctgacccacccccacaaggcctttagtggttcttaggggtggggagggcagattgcctctgctcggcagtgatggactctgtggctcactcctcggtctgctgcatggtagagtgagtgccttgttatctggtctacaccagatcctccacgtgcatccttttctggctgtactctagggggtcaggggaggcttgctgtagctgttgtagttgtagttgaggctgttgtagcgcatgctggttagggcttccacctctgacctttggggatgggaatagggtgttcctgcagtgggctcttagtgtttgtgtagagtagaggagttattggctctttgggcagagagagcaaactttccctggtccctcccccttttctatctgtactcattgggatttctgagttaccagtgtctccactaaccaatttaggatacgccattgcacacctgtggaggtcaggtgccacccatgtatgtatgtatgtatacatgtatgtatatatgtatgcatgtatgtatcatcacatcatctctcgtctccccttccctcccccagcacccctgctcacttaagtatgttgatttcattattgctaacaaaggacagtttttagaactcaactcatcccttctacaatgtgagtttcaggggacacagcatgtcatcaggctaggtgacaagtgcctttacccactgagccaactcaccagcccctccctcaaaactgtgtttctcatgggactttgtctccttccaggtctacggctatggtccatacagcggcgcataccccgcaggaactcaagttgtctatgccgccaacgggcaggcatatgcagtgccataccagtacccgtatgcaggtaatgcacgctggctgccgctcccggtctctgcgtacagcggggcgaggaggaggaggcctcctttccagttggaagttaaatgagctgcacgctctcactggagaccccaaatcactttgccgctctgagctttgtgtatttttcttcaaatagtcttttgggttttcacatatctttacagtgctagagtgatttttatttaaaaacgattacatttttattgattttgtgtgcacttgttacacatatgtgtgtgggtacatgtatgtcacagcccatgagggaaggccagagggcaattcaaggaaatcagttgtctcctaacactgtgtgggtcccagagtttgaacttgggttgtcagattggccccactaaattatctctccagcccagtctttgattatttaaaggttttagtaatctttatttaaaatgtaaccaaatataccttagttgcttacatttcccgtatgtcactcaatttaaacatttttaaaaagatttagttttccctgtgtgtacctgtctgtagatgtgtgcacataagtgcatgtgcctgtcggggccagaatagggcatttggtgcctggaactggagttatacatggttgagttgacttgtgggtgctgggaactgaagcagggctctctggaggagcagcaggtgatctcactgctgagccgtctctccagcccccttgccagtcagtctgaaacactagcagctcatgataagtaaggaatagtgtaatgaaaccacacaacttagaaggcattctggtggcacagtacaaatctacagtaagactaaggagctggggagatggttccgcaggtgaagtgcttgctgtgtgagcgtgcgcaccggaggttacacatgcgcactgagatgggatccagcgccatgtaagagccatataaaagccaggcatggcaatgtgcacctgtgtcccagcactggggatgtggagacaagaggttccctggggctcagtggcaaagggtgcgtctgccacacatggcctctcagattctttctatagctcccaaaataattagttgttgtttaatgggacatagttatacttaaaaagttatttgttatatgaaattcaaaccaatggtgtgtctctattcttatttactaaacatgacaattttatttaaatgctttatttttcttaagatttatttattttacatatatgagtatactgtcactgtcttcggacacaccagaagagatcccattatagatggttgtgagctaccatgtggttgctgggaattgaactcaggacctctggaagagcagtcagtgctcttaaccgctgagccatgtctccagccctaaacttgacaattttagactagcaagaaagtttaaaatctagtgagatgtgatttttactgctgttggtatatgggattctgaggtgggaccaagatccatgggaaacctgctagggaccttagagaatccttggccggacactgcagaaaataaaaggcccacattgaagtctttggaacattcacttagctctgtgcatgtgaacaacaaatacaaagagtaaagaatatcaagtctgagggtgaagtttagtgcttggtgtatgtgaggctctgcattcagtgatcagcattaaaaaaacaaacaagaaagcaacaaacaaacaaataagaacaaaagcagtgagccaaatggaaggataggaacatccatgcaaggtattaaaaatggcttttggacatttacatatctttatgtagctaaagtccttttgatttaatagcactacatttgtatttatttcctgtgcatgtgttgtgtatgcgtgtgtgggcgcatgtgtgccacagctcgtgtggggacgtcagaggacagcctgaaggacagcccgctgttaaggttctgttgggcccgtgcttcagagtcctgtgcaaagcgagtgttctcagctaggggatggtctgctttatttctttggaattgagtcctgaggctatggctcaggtgggagaatcccatgtagcctgaacaaacccgcagcgtggcataaaacccaagtggcacagtcaagagaatcagaagttcaaggatttcttcagctgaggctggcttggcacagaataaacaacaaatggaagaagaagaaaaagaaagtctactttatgaatacttgatagttgtttgctttgagacagggtcttcctgcgcatcccagattggttctcggcttgagttcctcctcccagccccctaagtgctgggattgtttgtgtgagctactgtgctgggccgtgtggtagtgaacgcttgaaccttacaagctgaagtacaggatcttgttggttgccgctgaagcacggggtgaacagaaaccaggctgttttcttagtgttataactacacttgtgcagtgcaagctcaagtcagctactcctgtctgcacagcctttctaatcgaaagtgggtcattctgttccaataactgctttgaacttatgctcttatctcttggttctcttaccatctcagaactggaaatgatctagaaactttgtatcgaagtatgtgtagtcaccttgtgttctttgcttcttcaaatagaaatgcattagtctctctatacatagttgaggtggtttgaattcaatatcccccacacatattcttaggcctttgaatacttggaccctaggtggtagcactgtttggggaggtttagggggtgtggccttgctagaggaggtgtattactcagggcaagctttgaggtttcaaaagctttggaccatttcctgatagctctctgtttcctgctcatggttgggcatgtgagctctcggctgatcagctgccatgcctggtgcttgctgccttggtttcttcttgtggtgataatgggctcttaaccctctggaactgtaagcccaaattaactcctttccataagttgtcttagctatggtgttttttgttttttgttttttttatcacagcaatagaatggtaactaaggcagggagtgggctattgctgtgacagacctgactatatgttgttttgtttttgtttgtttgttttttggaagaccgaaactttgacctagacatgtggttggatgttataagcagagcttaataggccatcccagtaggttcttggaagacagtgctgagagcgatgtggtctgcggaggcccagcttgataggtttcagtgggcaacaatatctgcatctgatattgagaatattgcctgctcttattttgagatgtgaactctccgctgttcctcgttcatattgtcatgtttttctttctgtgatggcacagactctaatctctctggatccataaacccaaatgagcctgtccttctctaagttgtactggtcatggtgatttatcacagtgacagagaaactaagatggtaatctgctacattaagactgaccttatttgtatatcacatggatcaccacaggacatcaggcagggttggccttttgttcatcatgggtgtttgcaaaaagtgcagagatgggtttggtgagatggttcaatggagcatgcccaacacccacaaataaataaataaatattaaagttttaaagtgacagagtttcaggtgagtgtctatagtgtggcagctgaaattccttaagcctgcaagaaactcacttgccgtttccatggtttcttgtgagaagagttctcccccaggcctcccttctctcttgctttaaaaattaaattatgttaaattgtttgtacacctgtggataatgtgcacatggctgaggaggcctgaggtttcgaaccccccagagttggagttacaggcagttatgaacccatcaacctgaatactggaaactggactcgggtcctttacaagagccagtgtgcactctgaagcacagaggcatctcctcagatccatcctctctgtactaacactctcaagttgtctctgcagatgtctagcttctttctgccgggcataattaagacagttcgacagttgctgataacactttggcattaggcttcgcagggactcattacgagtcagagccagggactggtgagtcttcctttgctgatggtttaatctgcttcttcctctcattaatctcctaggcttccttaatgtctcctccagtagatctcttgctattacatgtatgggccactcttgctaatggtccatcctggtgtgctttaatgggactgtgttatttgagcagaacagctgttagtactggtggaggaggagatggagaaggaagtagaggcagaggcggaaacagggaaggcgaccggtgaggaggcagaggtggggcggtgggcagaggaagtgcaggaggcacaggctggctgtggcaccatgggaggaagtatagctcagaattctccaagctacggcacaggtgggcacatttgtagctgcatgcagcacattttagcaatttggataagaagatttttcccaggtgctcttctgggtttcttggaacttttatgattcattctgcaaaaaaaaaaaaaaaaaaaaacctagggagatgccgttcttgactgtagattaaggacatggcgttggtgtctgtcagtgcctcagcgccaagtgtatgcacaccatattcttgaaactttttgactacacctttgatgttggaacatttgaagctcccagatagcctcagtgggcttctcctttagtgtgcatcagttgaagaactgactgtgtttttttgagccagaggtatggtaaggaagatgtatctagctcataccgtgagtgagaagtctgtttttaatattttagtttgggcatgactgaagtctaaaagtctgtaacaaagtcatggcagtgaccactccccccaaattaaatcctcaagagagacctgtcttgaccttagaacttcagtagtgtgttccagccggtggggaagagatgccctcaaacgctgtgtgagtggggtacatagtgaaactcgttactttgtagactaacctaagtacaaagttaacaagctggatgtgggctgctcaccttcaatctcagcacttcagaggcagaggcacctgggtccccgagtttcagagcagtctggtgtacatggtgacttccagaccagtgggaatacacaggctgtctcagcaaacaaacaaaacgaaacaaaacgaaacaaaacaaaacaaaaacccaaccaaccaaaaagaaaatggccaagacacccattttacggatcaagagtgatttttctcatgatggtgttttccttctggtgacatcttcgcatctttgtcacaactgaggaaatgcagtgtggtgacacggaaggggatttgggaatacgtctccccactttgtacttcacaggaaggaaacttcagatggtgagaagccagtgtggctgccgtaagcccccacgtgctaagatgacaggggtgagccaccatggttgcttggtgccgcttcatcttcaagcagacttcccctgatttcccacactcttccccatctgtctcatcccagcaagcatgtagtggagggctgccatggaaacccgaggtgggcctctgtagctttctctgtgctctgaactttgcagtgttatagggtttggactgggcaagcagagagaggaccctggccaatctgtgagttcttagagaccagtgtttgtaaggtcctagtttcctcttgctgtcttccttactctctgttccagaaaccctatcctgcagccctctccagagtaagataagcagcctgaggtgtaactgcagagttaatcgcgtggagctagagtaaagatcattaccaaattctttggtcatattacataagatttatttattgttttgtcacacaaggctatctccctaaagcagggtttgagaaaatagcatcaaacatagaagacaatgaggtttatatagctaacaaacaaacaaacaaacccaaacacctgcaagactagggcattttcaagggttgagagatttccagaggaattttgcttaagtaggaagttggctgaatatttcaaaattattggcaggacattctatcaggatgcaggttagggtatagcgtgtggagcatgtcaaattccagaaaatgggtcaagacctgctcaaatctaagttttgtagtaaacaggaatgaacttgttttgaccttgtaacaagatggcttttaatcttaagatggagtcaggcaggtccctcagcagctcttctacagtcaagtgcgttcctctcctcgtcagatgtgggtctgcctccctccgaattccaaggcagctttccattttttttcttccttattggcgtctctccggcttctggagggtagcctaggtcacagtgtatggatcccctccatctctctggaaacctccgagtaagaaacgggagggaaccaaaggcattcttctctgtgatcgtgaggtcatatttgtcttagttatttgtctattactgtgatgaaacactatgaccaaggcaacttatagaagaaatagtttattggggcttacagttacagaaggtgagtccctgactgtcatggaagggcccagacaggcatgatcctggaacaatagctgagaacgtatggccctatctgcaaataggaggtcgggggtggggtggggcagggggagtgaagggagggagggaataagggagagagcactaactgggaatggtttaaatcccacccctggtaacacatctccagtaaggtcacaccttctaattcttcccaaacatttcacccacctggggaccaagtatttaaacatgtgaacctatgggggcattctcatccaaaccaccacactcctctaataaagttctctggaaggatgatcaacttcctctctgcaagcttgtaccaccctcttgtctttaagacagactctcactaggtatccctggcctggaactcacagaggtccccctctcactgtctcccagtggctgggattaaaggtatgcgtcaccatgccaggccttacgggcatctaacatgcctgggtgtttggctgtgtgtgtgcgcgcgcaccaagtgcacactgggtacctgcagaaaccagaagagggcattggatcgctgaagctatagttactgatgcttgtgggattacacgtgggtgccaggtcctctgtaagagcgacaagcgctcttaatactaagccatgcctccagtcccccatgtattgtcttttataaattgcaacagcgtttttcttgtgtaatgtgtggtgggccttggaaagggttgggttgaactcactgaagccatctattaacactttcctgaaggaccttgaaagccaactagtgaacaaacaaaggggccacgtggagattggatacagtgcctatgttaagggcaccatcttttcagtaaatgtcagacttccaaattacatcttaaaagatctctctcctcttggtttttaggagtttatggacaacagcctgccaaccaagtcatcatccgcgagcggtaccgagacaatgacagtgacctggctctgggcatgctcgccggggcagccaccggcatggccctgggctctctgttctgggtcttctagagccttcaacattttctgtgcatagcttctgttagtcctgtgtgcagtaatttgatttgcagggcatttctgtttgtgacaagtgtctttcataataatttaaatagttcttttgaaggtggtaatctaataattgtgactgacctgcatggtaccacaaagaaagcccgaggtatgctgtgagtgagagcctgagtccttccgggtactagcttgcaccaagtctttcttagggacttttggatggctttatgtaaacacacccagttaaatgggcaatttccgtccagttaggtgcagtgttgaattaagggatggctttccttgctatgccaatactaatactgctgatggaggaagatgtgtgcaagtgtggtgaggagagtcacagcttctttaactgtggattctcttctagacccctgctgcgtgttaccctaggagctgtgggctggtggctcctgcaagactatggtgtgaggaccctgtaacgtacctcttggagcacttaggtaccccttgaagctcctaggtatcaccagcaggattggctgctcaggatgcagagggccaccccctccctttaaaaattacgctccagtaatctgcccagttttattttcttgttattcttctgtttgcttttcctggggatgattggcattagtctggagttaggaattgattcgagtgccggtgggtggaggcatgcagggagctgcccagcgacctgctctcagtgtttgttttaggtatattgattgccagctcaggctgcagagagcctatagagactatttttctacttgtaaagaaagtatggtgaggggaattgaggagagccttgtttgaatgttcctgcctcaggcctcctggggcccacactgcgtggtcctggggaggcttttcctcagcagtggaagggaggccccgtggctgtccagagtctcaggttttgagtgagaaatgggattgggtagagcatctcagggatttgttctaatccctcatgttatggggatccagccgtgttctcagtccagacccgctcacctcagaagagcttaaaacatttctggtccccaaatgtgtggcactctgagaagctcacaatctggctttctaacgaaaatttgtatttctaaaattagagaatacatgttccacgcatttaaaatttatgttctttcatgttttaaagctcccaaatccagctttgtgactggcatattttagtttcaaacagtaccccggcacaaaggtgggatggcacagtgaaggccccccgccctctactttgcatagtcttgtttctccagggtgctcccaggaagcattcattctgactttgctcagcccagtgcatgcgtgctgccttgccgccgtgctgctgggtagctctttcttggtcagatcaagtcttcaacagatctccatgtgagacagttgccaagtagatgaggtggtgcccatagtgctttctcgatactccttggggacctgttgacacctgcccatttccagctgacatttgtttttctgtcatctctgatagatgggatatgtgacaacatggtacggacgccgttcagtgtcgctttaataagcatgatgctgattttacatcctgtgctgtatgactgccatttgctcacagtgtcaccattgctaaagctccgtgctttacttacaaaacactaaaaccagtggttagtgtttcacagtgattttaattttagagttagttactggcattcctaaagccatagagtactgagtcacatccctgaagtacttttgaaacagaattgtctcctactgtcccatgggtgtgccctgcctgtctcctggccccaatggggctagctgtaccaggcagccatagttgagcctgatcattcctgtcaccagtttgacttgattatatacccagaatggaatacattcttgggcatctcagttcctcagccctgatcctcatagacgccaccctttcgatggcttttgcggcgtcacttgtacctcagtgagtcctgcgattcttgagttagagggaacgacttgtccagcattgaggaacatgtctcctccactgagacttaaatgatgatgcagggctggaagaggctggctgctgacactgcatcgtggctgatgtcattgctctcctagttctttgatttaagaacctttcatatggaaggcctgaggctccctcagatcgtcccttgccaagaaggcctggcttaggtcattagtgcccacagtagccttctggagtgtagcaagttcctgcgtttgagacagaatggttcagatttattttctacatctgttgttgaccccatgcaccctctcattttgccttccagtctacgtagatgaaagatgaaaggcagaggatgcagacagtcttctttgtgattgcttctgttattctgttgcatctaccgagcccgttttctccctgtctgtgcatacagtatgtttataagtgaacttgttaaaatattaaatgatcactaacc

SEQ ID NO: 83 - DNA, 3231 bp, Mus Musculus
gcggagaagcaggagaagccggcgaccttgcgctctcagcctgatccctgtcttggcggcctgaacattcgcaggcaccattctgaaacgctggaagaagaattggttcgacctgtggtcagacggtcacctgatctactacgatgatcagactcggcagagcatagaggataaggtccacatgcccgtggactgcatcaatatccgcacggggcatgagtgccgggacatccagcctccagatgggaagcccagagactgtctgctgcagatcgtttgccgagacgggaagaccatcagtctctgtgcagagagcacagacgattgcctggcatggaagtttacactgcaggattccagaacaaacacagcttacgttggttcagcaatcctgtctgaagagactgcagtggccgcgtccccgcctccctacgcagcctatgctacaccaacccctgaggtctacggctatggtccatacagcggcgcataccccgcaggaactcaagttgtctatgccgccaacgggcaggcatatgcagtgccataccagtacccgtatgcaggagtttatggacaacagcctgccaaccaagtcatcatccgcgagcggtaccgagacaatgacagtgacctggctctgggcatgctcgccggggcagccaccggcatggccctgggctctctgttctgggtcttctagagccttcaacattttctgtgcatagcttctgttagtcctgtgtgcagtaatttgatttgcagggcatttctgtttgtgacaagtgtctttcataataatttaaatagttcttttgaaggtggtaatctaataattgtgactgacctgcatggtaccacaaagaaagcccgaggtatgctgtgagtgagagcctgagtccttccgggtactagcttgcaccaagtctttcttagggacttttggatggctttatgtaaacacacccagttaaatgggcaatttccgtccagttaggtgcagtgttgaattaagggatggctttccttgctatgccaatactaatactgctgatggaggaagatgtgtgcaagtgtggtgaggagagtcacagcttctttaactgtggattctcttctagacccctgctgcgtgttaccctaggagctgtgggctggtggctcctgcaagactatggtgtgaggaccctgtaacgtacctcttggagcacttaggtaccccttgaagctcctaggtatcaccagcaggattggctgctcaggatgcagagggccaccccctccctttaaaaattacgctccagtaatctgcccagttttattttcttgttattcttctgtttgcttttcctggggatgattggcattagtctggagttaggaattgattcgagtgccggtgggtggaggcatgcagggagctgcccagcgacctgctctcagtgtttgttttaggtatattgattgccagctcaggctgcagagagcctatagagactatttttctacttgtaaagaaagtatggtgaggggaattgaggagagccttgtttgaatgttcctgcctcaggcctcctggggcccacactgcgtggtcctggggaggcttttcctcagcagtggaagggaggccccgtggctgtccagagtctcaggttttgagtgagaaatgggattgggtagagcatctcagggatttgttctaatccctcatgttatggggatccagccgtgttctcagtccagacccgctcacctcagaagagcttaaaacatttctggtccccaaatgtgtggcactctgagaagctcacaatctggctttctaacgaaaatttgtatttctaaaattagagaatacatgttccacgcatttaaaatttatgttctttcatgttttaaagctcccaaatccagctttgtgactggcatattttagtttcaaacagtaccccggcacaaaggtgggatggcacagtgaaggccccccgccctctactttgcatagtcttgtttctccagggtgctcccaggaagcattcattctgactttgctcagcccagtgcatgcgtgctgccttgccgccgtgctgctgggtagctctttcttggtcagatcaagtcttcaacagatctccatgtgagacagttgccaagtagatgaggtggtgcccatagtgctttctcgatactccttggggacctgttgacacctgcccatttccagctgacatttgtttttctgtcatctctgatagatgggatatgtgacaacatggtacggacgccgttcagtgtcgctttaataagcatgatgctgattttacatcctgtgctgtatgactgccatttgctcacagtgtcaccattgctaaagctccgtgctttacttacaaaacactaaaaccagtggttagtgtttcacagtgattttaattttagagttagttactggcattcctaaagccatagagtactgagtcacatccctgaagtacttttgaaacagaattgtctcctactgtcccatgggtgtgccctgcctgtctcctggccccaatggggctagctgtaccaggcagccatagttgagcctgatcattcctgtcaccagtttgacttgattatatacccagaatggaatacattcttgggcatctcagttcctcagccctgatcctcatagacgccaccctttcgatggcttttgcggcgtcacttgtacctcagtgagtcctgcgattcttgagttagagggaacgacttgtccagcattgaggaacatgtctcctccactgagacttaaatgatgatgcagggctggaagaggctggctgctgacactgcatcgtggctgatgtcattgctctcctagttctttgatttaagaacctttcatatggaaggcctgaggctccctcagatcgtcccttgccaagaaggcctggcttaggtcattagtgcccacagtagccttctggagtgtagcaagttcctgcgtttgagacagaatggttcagatttattttctacatctgttgttgaccccatgcaccctctcattttgccttccagtctacgtagatgaaagatgaaaggcagaggatgcagacagtcttctttgtgattgcttctgttattctgttgcatctaccgagcccgttttctccctgtctgtgcatacagtatgtttataagtgaacttgttaaaatattaaatgatcactaacc

SEQ ID NO: 84 - protein, 212 aa, Mus Musculus
TFAGTILKRWKKNWFDLWSDGHLIYYDDQTRQSIEDKVHMPVDCINIRTGHECRDIQPPDGKPRDCLLQIVCRDGKTISLCAESTDDCLAWKFTLQDSRTNTAYVGSAILSEETAVAASPPPYAAYATPTPEVYGYGPYSGAYPAGTQVVYAANGQAYAVPYQYPYAGVYGQQPANQVIIRERYRDNDSDLALGMLAGAATGMALGSLFWVF

SEQ ID NO: 85 - DNA, 3299 bp, Mus Musculus
ggagtgttagctggagtattgaccaaacatggctggaatccaccagcctgtgctgtgggcttgccttttggagtgaagaaagccctcctttcttaggctgctttgacaggtagcttgggaagagaccctctagctcagcaggcaccattctgaaacgctggaagaagaattggttcgacctgtggtcagacggtcacctgatctactacgatgatcagactcggcagagcatagaggataaggtccacatgcccgtggactgcatcaatatccgcacggggcatgagtgccgggacatccagcctccagatgggaagcccagagactgtctgctgcagatcgtttgccgagacgggaagaccatcagtctctgtgcagagagcacagacgattgcctggcatggaagtttacactgcaggattccagaacaaacacagcttacgttggttcagcaatcctgtctgaagagactgcagtggccgcgtccccgcctccctacgcagcctatgctacaccaacccctgaggtctacggctatggtccatacagcggcgcataccccgcaggaactcaagttgtctatgccgccaacgggcaggcatatgcagtgccataccagtacccgtatgcaggagtttatggacaacagcctgccaaccaagtcatcatccgcgagcggtaccgagacaatgacagtgacctggctctgggcatgctcgccggggcagccaccggcatggccctgggctctctgttctgggtcttctagagccttcaacattttctgtgcatagcttctgttagtcctgtgtgcagtaatttgatttgcagggcatttctgtttgtgacaagtgtctttcataataatttaaatagttcttttgaaggtggtaatctaataattgtgactgacctgcatggtaccacaaagaaagcccgaggtatgctgtgagtgagagcctgagtccttccgggtactagcttgcaccaagtctttcttagggacttttggatggctttatgtaaacacacccagttaaatgggcaatttccgtccagttaggtgcagtgttgaattaagggatggctttccttgctatgccaatactaatactgctgatggaggaagatgtgtgcaagtgtggtgaggagagtcacagcttctttaactgtggattctcttctagacccctgctgcgtgttaccctaggagctgtgggctggtggctcctgcaagactatggtgtgaggaccctgtaacgtacctcttggagcacttaggtaccccttgaagctcctaggtatcaccagcaggattggctgctcaggatgcagagggccaccccctccctttaaaaattacgctccagtaatctgcccagttttattttcttgttattcttctgtttgcttttcctggggatgattggcattagtctggagttaggaattgattcgagtgccggtgggtggaggcatgcagggagctgcccagcgacctgctctcagtgtttgttttaggtatattgattgccagctcaggctgcagagagcctatagagactatttttctacttgtaaagaaagtatggtgaggggaattgaggagagccttgtttgaatgttcctgcctcaggcctcctggggcccacactgcgtggtcctggggaggcttttcctcagcagtggaagggaggccccgtggctgtccagagtctcaggttttgagtgagaaatgggattgggtagagcatctcagggatttgttctaatccctcatgttatggggatccagccgtgttctcagtccagacccgctcacctcagaagagcttaaaacatttctggtccccaaatgtgtggcactctgagaagctcacaatctggctttctaacgaaaatttgtatttctaaaattagagaatacatgttccacgcatttaaaatttatgttctttcatgttttaaagctcccaaatccagctttgtgactggcatattttagtttcaaacagtaccccggcacaaaggtgggatggcacagtgaaggccccccgccctctactttgcatagtcttgtttctccagggtgctcccaggaagcattcattctgactttgctcagcccagtgcatgcgtgctgccttgccgccgtgctgctgggtagctctttcttggtcagatcaagtcttcaacagatctccatgtgagacagttgccaagtagatgaggtggtgcccatagtgctttctcgatactccttggggacctgttgacacctgcccatttccagctgacatttgtttttctgtcatctctgatagatgggatatgtgacaacatggtacggacgccgttcagtgtcgctttaataagcatgatgctgattttacatcctgtgctgtatgactgccatttgctcacagtgtcaccattgctaaagctccgtgctttacttacaaaacactaaaaccagtggttagtgtttcacagtgattttaattttagagttagttactggcattcctaaagccatagagtactgagtcacatccctgaagtacttttgaaacagaattgtctcctactgtcccatgggtgtgccctgcctgtctcctggccccaatggggctagctgtaccaggcagccatagttgagcctgatcattcctgtcaccagtttgacttgattatatacccagaatggaatacattcttgggcatctcagttcctcagccctgatcctcatagacgccaccctttcgatggcttttgcggcgtcacttgtacctcagtgagtcctgcgattcttgagttagagggaacgacttgtccagcattgaggaacatgtctcctccactgagacttaaatgatgatgcagggctggaagaggctggctgctgacactgcatcgtggctgatgtcattgctctcctagttctttgatttaagaacctttcatatggaaggcctgaggctccctcagatcgtcccttgccaagaaggcctggcttaggtcattagtgcccacagtagccttctggagtgtagcaagttcctgcgtttgagacagaatggttcagatttattttctacatctgttgttgaccccatgcaccctctcattttgccttccagtctacgtagatgaaagatgaaaggcagaggatgcagacagtcttctttgtgattgcttctgttattctgttgcatctaccgagcccgttttctccctgtctgtgcatacagtatgtttataagtgaacttgttaaaatattaaatgatcactaacct

SEQ ID NO: 86 - protein, 218 aa, Mus Musculus
LGKRPSSSAGTILKRWKKNWFDLWSDGHLIYYDDQTRQSIEDKVHMPVDCINIRTGHECRDIQPPDGKPRDCLLQIVCRDGKTISLCAESTDDCLAWKFTLQDSRTNTAYVGSAILSEETAVAASPPPYAAYATPTPEVYGYGPYSGAYPAGTQVVYAANGQAYAVPYQYPYAGVYGQQPANQVIIRERYRDNDSDLALGMLAGAATGMALGSLFWVF

SEQ ID NO: 87 - DNA, 5102 bp, Mus Musculus
agccggcgaccttgcgctctcagcctgatccctgtcttggcggcctgaacattcgcaggcaccattctgaaacgctggaagaagaattggttcgacctgtggtcagacggtcacctgatctactacgatgatcagactcggcagagcatagaggataaggtccacatgcccgtggactgcatcaatatccgcacggggcatgagtgccgggacatccagcctccagatgggaagcccagagactgtctgctgcagatcgtttgccgagacgggaagaccatcagtctctgtgcagagagcacagacgattgcctggcatggaagtttacactgcaggattccagaacaaacacagcttacgttggttcagcaatcctgtctgaagagactgcagtggccgcgtccccgcctccctacgcagcctatgctacaccaacccctgaggtctacggctatggtccatacagcggcgcataccccgcaggaactcaagttgtctatgccgccaacgggcaggcatatgcagtgccataccagtacccgtatgcaggtaatgcacgctggctgccgctcccggtctctgcgtacagcggggcgaggaggaggaggcctcctttccagttggaagttaaatgagctgcacgctctcactggagaccccaaatcactttgccgctctgagctttgtgtatttttcttcaaatagtcttttgggttttcacatatctttacagtgctagagtgatttttatttaaaaacgattacatttttattgattttgtgtgcacttgttacacatatgtgtgtgggtacatgtatgtcacagcccatgagggaaggccagagggcaattcaaggaaatcagttgtctcctaacactgtgtgggtcccagagtttgaacttgggttgtcagattggccccactaaattatctctccagcccagtctttgattatttaaaggttttagtaatctttatttaaaatgtaaccaaatataccttagttgcttacatttcccgtatgtcactcaatttaaacatttttaaaaagatttagttttccctgtgtgtacctgtctgtagatgtgtgcacataagtgcatgtgcctgtcggggccagaatagggcatttggtgcctggaactggagttatacatggttgagttgacttgtgggtgctgggaactgaagcagggctctctggaggagcagcaggtgatctcactgctgagccgtctctccagcccccttgccagtcagtctgaaacactagcagctcatgataagtaaggaatagtgtaatgaaaccacacaacttagaaggcattctggtggcacagtacaaatctacagtaagactaaggagctggggagatggttccgcaggtgaagtgcttgctgtgtgagcgtgcgcaccggaggttacacatgcgcactgagatgggatccagcgccatgtaagagccatataaaagccaggcatggcaatgtgcacctgtgtcccagcactggggatgtggagacaagaggttccctggggctcagtggcaaagggtgcgtctgccacacatggcctctcagattctttctatagctcccaaaataattagttgttgtttaatgggacatagttatacttaaaaagttatttgttatatgaaattcaaaccaatggtgtgtctctattcttatttactaaacatgacaattttatttaaatgctttatttttcttaagatttatttattttacatatatgagtatactgtcactgtcttcggacacaccagaagagatcccattatagatggttgtgagctaccatgtggttgctgggaattgaactcaggacctctggaagagcagtcagtgctcttaaccgctgagccatgtctccagccctaaacttgacaattttagactagcaagaaagtttaaaatctagtgagatgtgatttttactgctgttggtatatgggattctgaggtgggaccaagatccatgggaaacctgctagggaccttagagaatccttggccggacactgcagaaaataaaaggcccacattgaagtctttggaacattcacttagctctgtgcatgtgaacaacaaatacaaagagtaaagaatatcaagtctgagggtgaagtttagtgcttggtgtatgtgaggctctgcattcagtgatcagcattaaaaaaacaaacaagaaagcaacaaacaaacaaataagaacaaaagcagtgagccaaatggaaggataggaacatccatgcaaggtattaaaaatggcttttggacatttacatatctttatgtagctaaagtccttttgatttaatagcactacatttgtatttatttcctgtgcatgtgttgtgtatgcgtgtgtgggcgcatgtgtgccacagctcgtgtggggacgtcagaggacagcctgaaggacagcccgctgttaaggttctgttgggcccgtgcttcagagtcctgtgcaaagcgagtgttctcagctaggggatggtctgctttatttctttggaattgagtcctgaggctatggctcaggtgggagaatcccatgtagcctgaacaaacccgcagcgtggcataaaacccaagtggcacagtcaagagaatcagaagttcaaggatttcttcagctgaggctggcttggcacagaataaacaacaaatggaagaagaagaaaaagaaagtctactttatgaatacttgatagttgtttgctttgagacagggtcttcctgcgcatcccagattggttctcggcttgagttcctcctcccagccccctaagtgctgggattgtttgtgtgagctactgtgctgggccgtgtggtagtgaacgcttgaaccttacaagctgaagtacaggatcttgttggttgccgctgaagcacggggtgaacagaaaccaggctgttttcttagtgttataactacacttgtgcagtgcaagctcaagtcagctactcctgtctgcacagcctttctaatcgaaagtgggtcattctgttccaataactgctttgaacttatgctcttatctcttggttctcttaccatctcagaactggaaatgatctagaaactttgtatcgaagtatgtgtagtcaccttgtgttctttgcttcttcaaatagaaatgcattagtctctctatacatagttgaggtggtttgaattcaatatcccccacacatattcttaggcctttgaatacttggaccctaggtggtagcactgtttggggaggtttagggggtgtggccttgctagaggaggtgtattactcagggcaagctttgaggtttcaaaagctttggaccatttcctgatagctctctgtttcctgctcatggttgggcatgtgagctctcggctgatcagctgccatgcctggtgcttgctgccttggtttcttcttgtggtgataatgggctcttaaccctctggaactgtaagcccaaattaactcctttccataagttgtcttagctatggtgttttttgttttttgttttttttatcacagcaatagaatggtaactaaggcagggagtgggctattgctgtgacagacctgactatatgttgttttgtttttgtttgtttgttttttggaagaccgaaactttgacctagacatgtggttggatgttataagcagagcttaataggccatcccagtaggttcttggaagacagtgctgagagcgatgtggtctgcggaggcccagcttgataggtttcagtgggcaacaatatctgcatctgatattgagaatattgcctgctcttattttgagatgtgaactctccgctgttcctcgttcatattgtcatgtttttctttctgtgatggcacagactctaatctctctggatccataaacccaaatgagcctgtccttctctaagttgtactggtcatggtgatttatcacagtgacagagaaactaagatggtaatctgctacattaagactgaccttatttgtatatcacatggatcaccacaggacatcaggcagggttggccttttgttcatcatgggtgtttgcaaaaagtgcagagatgggtttggtgagatggttcaatggagcatgcccaacacccacaaataaataaataaatattaaagttttaaagtgacagagtttcaggtgagtgtctatagtgtggcagctgaaattccttaagcctgcaagaaactcacttgccgtttccatggtttcttgtgagaagagttctcccccaggcctcccttctctcttgctttaaaaattaaattatgttaaattgtttgtacacctgtggataatgtgcacatggctgaggaggcctgaggtttcgaaccccccagagttggagttacaggcagttatgaacccatcaacctgaatactggaaactggactcgggtcctttacaagagccagtgtgcactctgaagcacagaggcatctcctcagatccatcctctctgtactaacactctcaagttgtctctgcagatgtctagcttctttctgccgggcataattaagacagttcgacagttgctgataacactttggcattaggcttcgcagggactcattacgagtcagagccagggactggtgagtcttcctttgctgatggtttaatctgcttcttcctctcattaatctcctaggcttccttaatgtctcctccagtagatctcttgctattacatgtatgggccactcttgctaatggtccatcctggtgtgctttaatgggactgtgttatttgagcagaacagctgttagtactggtggaggaggagatggagaaggaagtagaggcagaggcggaaacagggaaggcgaccggtgaggaggcagaggtggggcggtgggcagaggaagtgcaggaggcacaggctggctgtggcaccatgggaggaagtatagctcagaattctccaagctacggcacaggtgggcacatttgtagctgcatgcagcacattttagcaatttggataagaagatttttcccaggtgctcttctgggtttcttggaacttttatgattcattctgc

SEQ ID NO: 88 - protein, 195 aa, Mus Musculus
TFAGTILKRWKKNWFDLWSDGHLIYYDDQTRQSIEDKVHMPVDCINIRTGHECRDIQPPDGKPRDCLLQIVCRDGKTISLCAESTDDCLAWKFTLQDSRTNTAYVGSAILSEETAVAASPPPYAAYATPTPEVYGYGPYSGAYPAGTQVVYAANGQAYAVPYQYPYAGNARWLPLPVSAYSGARRRRPPFQLEVK

SEQ ID NO: 89 - DNA, 44633 bp, Homo Sapiens
acgccggacgtgcggcagttgcaggcgagcaggcgaggaatcgccgtggcgtcttggtgttctccacgctggttcgcaggtgagtgtccctgtttagtccggacgaccctagctcctttcccctctggcccgcgcctctccagattctcctctagagctgcccagcctcgcgcccctctgaggggaccccgcaccgcgccacctccgcggtgtccccactccctaattttccctgaggctcctggccacgggtccgcccacctccctggaccaccctgaccttccccaggtccgccctctcagtctcccctagagcagcccattcgagagccctcccagtgggcccccccggcctctcagaccccttcccatcgcttccccggcgtccgcctccggtcctttccccgagcccctcctctccggccccgcggaccctcctcctttcccgactgcagcctccgccttgcatcctttctggccgctcgggagtgtcccacatgtctgactgccgggacctgctgcggcccgccgcctggggtctcccggcgtccgatctctacccctgctgctccctctgctccagggaacttgccttctcagttctcctgcccagaggtctcccctccttaagtcccggggggcgttgaggctttaccctcgcggtgcggtccgcccccgctgcatttcacctgctcttggccttgcaatgtctttagtcataagtgcttggtgtaccttatcttacatatctctcttcatgtttgattctgttactcaactagattgaaaactccggaggtcagggatttgcatagggatccccgccccgccaccccgcttaaatctcaaatgtagaccggttcagggtgggtggaggaaaggaatgaggtggagtggtcactgtaaaaaattaaaggaacatggttaattcaaaataatactgactcatggtctcagcctttaaatttttagtgcttaggaaagggtggaaccaccaccgagggaggagggctgacagctgaggggaggaatattccaaggtcttctgtggcctttggtatgaaccagtaccaattcaggaagtgacttgtccgaagtcacatgaggaattaggacccgagctggcactggtaactgcctgtttagtgtggccctcagtatttgttgactaaactaatgaccaaaacatgtatgcacagacacagctgtgcgtctgtgcccatgcagtgggtgtgtctgcctaaggacctgtgggggtgtgggaatactgctgtgacggttcaattgtggtgctcaggagtgttccctaggttcagaaagttcctaaccctgggctggttggctggatattgataggactggagcttgtctgggcttcctttgtgcctggtgtttactctctgtggtggtgatctctttactcgactcttccctattcgtactgatctccctgaggacaggaatcaaactgtgttgcagggtttccctaataaacagcatagtgtttggcactttgtaggtggtcagtaaatgcttattgaagaaggctgcagaaaagaactcagaacctgacagcggttctttgctagcattatattttaaaggcggtggtacattctgtaagtaaatttcctgctattctcaaggactgagttgattaaatgtgtacagcagtggtatagagaggacagatactcttgtggtgttactccttgggaaggtggaggtttctctcagctctttctgaaagctttgcttatgcttttcagcttgcattaatatttttgtttctcctttcctctgcctgccttcttactgtttgtctaaagaaattaaagaattaccttattaataacagtaactaccaaaaactgcaaaacacactgttaaaaatgctcccaaagtgggggctaattgacccagttgttttgttagttatatatttgcttccacagtggatcatggaaacggaaagttggacttccttgcctctttgctttctttgcctgtctgccctttgatggtgcttgtattaggcttgttgttaagaagtggttcccaactggaaatggccaatgccacgtgggaactgacctctacatgttgatgggtcacccaaccttctttcccttctgtttcagaatgtacctgtgacatctctttgactctccactgttgcccttgaagaacagagatgagttttcttcctttttcataaggaagccacttttatagcgaaagagagctggagaactgggatatcatgaggagttgtagacagttaaacctgaattctagcttttggaacaaaatagtaatgtaattgtagcagttctcacttttttattttttatttttttgagacggagtttcactcctgttgcttaggctggagtgcgatggcgcagtctcggctcactgcaacctccgcttcccgggttcaagggagtcccctgcctctgccccccaaatagctgggattacaggcgtgcgccaccatgctcggctaattttttgtatttttaatagagatggggtttcactatgttggtcaggctggtctcgaactcctgacctcaggtgatccgcctgccttggcctcccaaagtgttgggattataggcgtgagccaacgcgcctggccaattctcacttttggaccatctactacagggctgtttggacatacctcctttaattgtcacagtaaccccatgacgtaattggttgtgcctggtcatacaggtaagaaaactgaggcttagagaggtttagaattttgctgaaggtcatactagtgagtagaaggcaaagtaggcttcaggcttagaactgtcagattccaaaggcagtattttttgtccatctgttgtctgtttcgattcaatgctttcaaagagatacaaattcaaatttaaaataatttaaattgttgaatatggcttacattttaaagctttgcataggttttattggcataaaaataatgttcttttgcagctagtttgctggtgttttattctctagagaccaacagctagggcttagtgtttatctgatgagttttagtttatgcattcagttttgctccaggatataaatagtgaaatgttgaattaagttatggagtggtgtgaaattcagcatgctaaggcaaacaaacagaagtcttctgagccatttgagaagcagcttgatgtccttgttcttagaacagggctgtccaatctttagactttcttgggccacattggaagaaggccatacataaaatacactaaccctaatgatagctgatgcactaaaaaataaaattgcaaaaaaatctcataacgttttaagaaagtttacaaatttgtgttgggctgcattcaaagctgacctgggctggggccatgagttggacaagcttgttctagaatattttcggcaaattttggtaagggggaaaataagtaatagtaataatagtagtaaatagtaataattgctgtcaaagcagctaccatttatcgagttctagtaactgtgaggcaccatgccaactacttacatattatttcacccaattttccgaacatcctgtcaagtaggtggtgggaattttcgttttatagatcaggcttggaaacgtgacttgtccgattgagtcaggatctgaacataggtcttttaactctaaagcttatacccaaacactgggttctgtgaaatttcaaaagcatatgataggctgactgcagtggctcatacctgtaatcccagaactttgggaggctgagatggaagaatcccttgagcccaggagttcgagaccagcttgggcaacatagtgaaacctcgtctctacaaaaacaaaacaaaatgtgatcaaaatcatacttcatgatttttggtttctaaagatactctctaaatttctctccccaatttaaaaacgaaagcagagcactgttggaaggttcaaataggtagattaatttaggttggtttttttgttttggtatagttgaagataattcaggttattgtttacatgtttacatttatcaaaataatacatgtacatagattgaaagaccaaataggctgagcgtggtggctcaagcttttggaggccagcacttttggaggctgaggcgggtggatcccctgaggtcaggagtttgagaccagcctgaccaacgtggtaaaatcccgtctgtactaaaagtacaaaaatcagctgtgcgtggtggtgggcgcctgtaatcccagctacttgggaggctgaggcaggagaatcgcttgaacctggaaggcgatgggtgcagtgagccaagatcgcgccactatactccagcctgggcaacaagagcgaaactctgtctcaaaacaaacaaacaaaaaaaacaaccaaatagtgctttaaaccttagaataaaaaaaaatatatcaatctcttgtccaccccctttttaaactatagacaactattttcacctttttttggcactttttaaaatagtattttggctgggtgtggtggctcacacctgtaattccagcactttgggatgccaaggcaagtggatcatgaggtcaggagatcgagaccatcctggctgacacggtgaaaccctgtctctactaaaaatacaaaaaaattacctgggtgtggtggcggttgcctgtagtcccagctattcgggaggctgaggcaggagaatggcatgaacctgggaggtggaggttgcagagagctgagatcgcgccactgccctccagcctgggtgacagagtgagactccgtctcaaaaaaaaaaaatagtattttatctttgtggatatggtaaaattgctattgatttacatgtaatcttttgacttttgatcatagaagacttttgctgccttgtaaaactcttcaatccaccagtgagtcaaaaacttgtaggaaatttgtcagttactttttttcctcccctgtagtactcggtcctgctccagtctggactgtttttttttttttttttcctccccagtccttctgcacagctgcctttctgggaatttcctcccctgccagttgaagaccgaatcctactctgtcgcccaggctggagtgcagtgacatgatcattcatggcttactgtgcttctaccttctgggctcaagcgatcttcctacctcagtctcccgagtaggtgggactacaggcgtgcaccactatgtgcagctaacttcttatttttttgttgagaatgtctcactgtgttgctgggttggtctcaaactcctgggctgaagcgattctcccaccttggcttcccaaagtgttgggattatgctcaagagccaccatgcctggccttgattaatgatttgactgggtgtggaattctggcttggaaataattttccgttagcattttgaaggtattgctctagatgtcctgtgtcttgctgattgttgatcctttatatatgcttttttctttgggaagtttttaggttctcttctttgtccttgatgttatgaaatttcagtcatcctacctatggagaatcttttaaaattcatcatgctggacagtcattggatcttttgaatctagaaatgtgttatcctgttgcaggaaatggttttatagtattatttctctgctcttttctctgtggtttatttatgaaattctcctataagcagaatttttttttttgagacggagtctcgctgtgatgcccaggctggaatgcagtggtgggatctcagctcactgcaacctccgtctcccgggttcaagtgattctcctgcctcagcctgctcagtagctgggactacaagtgcgtgccaccatgcctggctaatttttgtatttttagtagagatggggtttcaccatactggccaggctcgtcttgaactcctgaccccaagtgatctacccacctcagcctcccaaagtgctgtgattaacaggtatgagccactgtgcccagccagcagaatattttatattccaggctcatcctctaatttttttccatctcttggtcttttttttttttttttttagctcttcatttcagagagatttcttccatcttgatctttccaactcttgtattgaatttttaattttggttattatttttaattgagagctctgaatatttctttttattcttgttttttttttttttgagatggagtctcactccagtcacccaggctggagtgcagtggcactatctcggctcactgcaagctccgcctcccgggttcacgccattctcctgcctcagcctcctgagtagctgggactacaggagcctgccaccacgcccaactaatttttgtatttttagtagagacggggtttcaccatgttggccaggctggtctcgaactcctgacctcaagtgatctactctcctcggcctcctaaagtgttgggattataggcgtgagccactgtggccagctgtaaagtaatatttttaaagttttcttttgtacccagcattgtctctgattcttgaggtttttttcttgaaaattttattttctttaatctctatcttttatggtctagatttttctccagtgtctgattgtggtactgtgaaatgtttattttgtctttgacctcatttcctgccttacaactcctatttaatacaatccttaaaaatctccaaaatgatgtctttttgtatgctaatgattgattgatggcctgcagactcccttcaggatgggagctggtcatctgaaacacctatgcgactttagagggttggaactttcatgtctgccccccaaccttccaggaaggagagaggggttcaaggtgatgttgatcaccaatggctgttggtttaatcaatcatgctaatgtaatgaggcctccataaaaacccaaaaggattgggtttggggagcctccagaatagccgaacacctggaggttcctggagggagggtggtgtgcctggagaggcctgaacactaacaccttgccctatacatctcttcatctgtgtcctttgtaataccctttataataaactggtaaatataagtcattgtttacctgaattttgtgagctgctctagcaaattaatcaaacacagggagatgggggaattctaatagacctaaagaaagaaactaaagcaaaaattactataaatagagagtttatttaggccagatttgaggacagcaacctgggaagcatagattcaagttgctctgaatatatgctttgagtagcaacagttagaagtgggattttaaagggcaaaaataggggcagtttctaagttgaacataaactattggttggctgtatattgttctttgtaccacacattccaggaacatgaagaaaatgattgagggtcacattgtgtaacttgtagtaacagtcttggtaatttatcagcttgtctggaaactacaggaaagggaagattaaaaaaaccccaagtccctttaaacagttaaccctgagcgtggctggggctgtggtaactaaagacccattttctaaattttgccggctttatgttcttcagattgctctgagctacttttctttctcactgacttaaagctagttgatcacatgttccagaggccctgacttgtggctggtgtctgaagggtgggcagtcttgtgggactgagccctcaacctgtgggatctgatgctatctccaggtagatagtgtgacagttgaattgcaggacacctagttggtgttcgctgaagaattttttttttttttgagaccgggtctcactcctgcccaggttggaatgtagtggtgtgatcacggctcactgcaacctccccatcccaggctcaagtggtcctcttacctcagccccccagtagctgggactacaggtgtgtgccaccatgccccgctgatttttgtatggatgaggtttcaccatgttgcctaggctagtctcaaactcctgagctcaagtggtcccctgaccttctcctcctaaaatgttgggattacagatgcgcaacactgtgcatgggcctgctgcataattgatttcttgcttggtatgtggggagaaaccctcacacatttggtcacagaagtcttctatgttgattgttgtgacgtgagagcagaggaaaaacagtatttttttctactcagactgatgatacttgctctgtattcctatttaagagaggtactgaaaagctgattggaagtctgtgtgtttgcttcaagtctgtctcttggtgagcttctctggagggtgttaggcaaagtttggctttttcattacagaacacccagttgtcagtatcagtgagcctttcctcttgggactatgcctttgctctgagctagagtctgagaagtaaggaagaagatggagaatttgactttcacggactatattcttctaagtgtggcctgcgactttaagctgtgtgtagtgtggccacgcccagtctccagaggcatcatcttcaggatcagggagggtccctgtctgcttgggtagggtgcctagtgacccctttgaagactttccattaattcttctgatttctccccacctctagaattctctcttacccccaatttctgagtctgtttttatgtggcaggagttggcttgctgtgttttggcttctgttagcacataacaaagtagaggtggccatattttatgttagttgacacttgtctgtttgtcttagaactttcaaaatgttgtgtctcgtctgcttttgtctgctgctgttctctgtggatttatgccttgttttctccttaactctcattttagttgcatttcaggagggagtggcccaggctggagtgcagtggcgtgatctcagctcactgcaagctccgcctcctgggttcgcaccattctcctgcctcagcctcccgagtagctgggactacaggcgcccgcccccacgcccggctaatttttgtatttttagtagagacggggtttcatcgtgttagccaggatggtctccatctcctgacctcgtgatccaccctcctcagcctcccaaagtgctgggattacaggcgtgagccatggcccatccctgccctggagacattttgcccattgtcttggtgattaacattggacttcttgttacttatgcaaatttctgcagcaggcttgaatttctccccagaaaatgggtttttcttttctgttgcatcatcagttggcaaattttccaaacttttatgctctgcttcttcttgaaggctttgctgcttagaaatttcttttactagataccctaaatcatctctctcaagttcaaacttccacagatctctaggacagggacaaaataccaccagtctctttacataacaatagtgacctttactccagttcccaactagttcctcatctccatctgagaccagtgcagcctggaccttattgtccatatcactatcagcattttggtcaaagccactcagcaagtctctaggaagttccaaactttcccacatctttctgtcttcttctgagccctccaaactgttccaacctctgccttttacctgtttccaaagttgcttccacattttcagttatcttttcagtagcattccgctgtactggtaccagtttactgtattagtctgttctcacgctgctaataaagatatacccaagactgggtgatttataaaggaaggaggtttagttgactcacagttccacatggctggggagttctcacaatcatggtggaaggcaaatgaggaacaaagtcatgtcttacatggtggcaggcaagagaacttgtgcggggaactcccatttataaaactgtcagatcttgtgagacttattcactaccatgagaacagtatgggggaaactgtccccatgattcagttatctccacctggcctcactgttgacatgtggggattattacaattcaaggtgagatttgggtaggaataaagccaaaccattatcagaaagtatgtctttttttttttttttttttttttttttttttgagatggagtctggctcttttgccaggctagagtgcagtggcatgatcttgactcactgcagtctccgcctcccgggatcaagtgattcttctgcctcagcctcccgagtagctgggactacaggcatgcgccaccatgcccagctaatttttaatatttttagtagagacggggtttcaccatattggccaggatggtctcgatctcttgatctcgtgatccacctgcctcagtctcccaaaatgccgggattacaggcgtgagctactgcgccctccagaaggtatgtcttttctttaacacattctactgtaatatatctcattttaatcatcttatacccagggtacctttcagccttagttggttgtaatagactgtaatttttactttgaattttacacttgtgtcacaatttagccattagattctctttcttcagctgagtggcttcttgatgctttctgaaggcactcttgaaagcatctgtgctttttgataataagatatcctgcccctaaactgtaactagctcattttcaaagagtactggcttgttttagaggagactagtggtagagataaaaatctgctctgggaggtacatgagattgttccacagaatgaggagaggtagacaggatgacataagataagaagctacttgagtcagcagaggaattactcttttaaaaagtgaagagtttctgttgctaattccagtttaagttcttttctgtctcataatctgatttcccctttctctaatagttttattttatataggcacatgaaagatacgtttataatgtcctctagatgtagacatttccatttcttttttctttttgaatcttactcaagtggcccgagttgtttcccaagtctgctgttcagtttctccttgttgccatcccttgagactcaactgcctgaaaagtaagagaaacccaggctaacctcaaggaaacaccagagaaaacataggcacaacattcgttgtattagtctgttctcatactcctttaaagaactacctgagaccgggtaatttatgaagaaaagaggtttagtcgactcaagagttctgcagactgtacaggaggcatggctgtggaggcctcagaaagcttacaatcatggcagaaggcaaaggggaagcaggcatgtcttcatgtggcagtaggaaagagtgaacacacttataaacaagtagatctcctgagaactctatcacaagaccagcaacagggatagttgccaccgtgatccagtcacctcccaccaggcccctctgccaacactggggattacaattccacatgagattttgggtggggacacagagccaaaccatatcatctggcaaatcagatgttcacccacacaattagtacataatactccaagatatcaggaaatctcaggatccttaaggttttacctaaaagtctcttttaactctttatcggccaggcacagtggctcatgcctgtaatcccagcactttgggatgccaaagcaggcagatcacttgaggtcaggagtttgagaccatcctggccaacatggtgaaagcctgtctccactaaaaatataaaaattagctgggtgtggtgacacctgtaatcgcagctgcttgggaggctgaggcatgagaattgcttgaacctcagaggcggaggttgcagtgagcctagatagtgccattgcactccagtctgagtgacagctaaactccgtccaaaaaaaaagatagcaaatgtagccaaattaatatcaagaaccattagaaggctgggcatggtggctcacacctgtaatcccagcactttgagaagctgaggcgggtggattgcctggccaacgtggcgaaatcctgtctctacttaaaatacaaaaaattagctgggtgtgatggcacacgcccgtaattctagctacttgggaggctgaggcaggagaattgcttgaacctgggaggtggaggctgcagcgagcggagatcattgcactccagcctgggcgatggcacaaacaaagaaacaaacaaacccattagaaatgtaaagaaattgaccacagaagttcaggagactcctgttactccacgtttttatattcactgtgtcctgtaaccgcctgcgaagttgcatggctgtgtttcagtcaggttttgtatttgtcatgactacgtagttctcagtaccttttctagtaatttttagcctgttctcatttttttttgtatgaaatatactgggaattcacattatggatgcaggaagctgtagtatgaatataaatatctaggatttgacgtgaatgcgtacgtgctttgccctctcatttttttgtgttctgggttaataaccccactgcacagatgtgatactgtctacaacattccttcctttttgtttcgcctgtttcttctgctgtactaagctacatgagagtagcattttggcttggtcactgctgtatccttagtgtctaggacaaggctggacacaagtaaggtgttctaagaatatttaatgaaaatatgatgctggtagttctctgcttcaaatccttttggaagtaaaatgattgttttaggatattttaggctgtaagttgcaggaaaccaaattcaaccatcttaagtgataaacccatcatgctgcttagtagaaagtcttgggtaagggtgggtttgggggttggtgaagtaagtggctcagcagtgtgagctctgctgtctctgcgtcagctgcccccagccggttcctcatggtcagaaggtggctgccagcacagtgagcagcagtgtgcttccctgttaacatcatcttagagacagggagactggcttttgtttgctggggattgtatgtttgagaacctaaatgtggtagagaaagattggggaaaaatgaaaaacatttcgtttcttggtaaggacagatagcatgaattgaaaaaaactgcaaagagagcaagaagcttcagcgtgcatgattttggagatgccggagtatggggtgactgaggcttgtggcactctttttaaaggtttggagaaagatgagaagtcagccatgcttagatatggggaaggagctacattagagactcatttgttcttctgaggtgcccacttgcgcttgtgctaaccttaccaaccttagtgccttaaagaaatagctaaaaaagctaaagcaaggccaggcgcggtggctcatgcctgtaatcccagcactttgggagaccgaggtgggcatatcacgaggtcaggagatcgagaccatcctggctaacatggtgaaaccccgtctttactgaaaatacaagaaaaaattagccgggcgtggtggcgggcacctgtagtcccagctacttgggaggctgacgcaggagaatggcgtgaacccaggaggcggagcttgcagtgagccgagattgcgccactgcactccagcctgggtgacagagcaagattccgtctcaaaaaaaaaaaaaaaaaaaaaaaaaaaaagctaaagcagaaaacaaaagtggcccatggtctcagcttccagataataactattgatttcaaaaaataaaatggcctgggtgcggtggctcatgcctgtaatcccagcactttgggaggccgaggcaggtgggtcacctgaggtcaggagttcgagaccagcctgaccaatatggtgaaaccccgtctttgctaaaaatacaaaaatcagccgggcatggtggcatgctcctgtagtcccagctactcggggaggctgagacaggaaaattgcttgaacgtggaaggtggaggttgcagtgagctgagatcgcgccactgcactccagcctggacatcgcagcaagaatccatctcacaaaaaaaaaagcatgcaagttgttaactgtttcaaacagtacagaaaggggtaatgggaccaatcaccctctttgttctgtgacacacacagaatcgcctcattttgtttccagagacacatctttcaaaggttttaggattcctcccaggaggcagcctgcagcacatgctgctccgccttgcctgcctggtgatctgtcctgtgtggaggtacccgctcagcagtcctccgtcgtggggcatgttggcgcgcttctgcagtatgtgtgatgttgccgcgagtgtttatatatatatctgtgttggtgaacctctgcacatatctcagtgaggcaaattcctagtcatggtgagattgctggggcaaagtatatgaactattaaagtttcaatagattttgtcaaatttccctttggaaaggttgcatcagttttctttctgccattgtgctttctccttgctgggtgtcttggaggttttcatttgtgcccacctgagaggtacagtagtttactgtacagttggaattgtatctgttgaattgagtgggaaattcagtgtctttttacgagtttgttgttcttttttctgtgtgttcttttttctgtgaactgctaaattattgccttttctgtatgatatgtgtgaactttgtaagtgaaggaaataagctccttgctgccatatggttatgaatatttcttcttcttcttttttttttttttttgagacagagtcttactctgttgcccaggctggagtgcagtggtgcaatctcggctcaccgcatcctctgcctcctgggttcaagcagttctcctgcctcagcctcctgagtagctgggattaggcacggaccaccacacctggctaatttttatatttttagtagagacggggtttcaccatgttggtcaggctggtctcaaactcctgacctcctgatccgcccacctcggcctcccaaagtgctgggattacaggcatgagctgctgcgcccggccaatttttgtatttttagtagagatgaggtttcaccatgttggccaggctggtctcgaattcctgacctcaggtgatccaccctcctcggcctgagccaccgtgcccagccgtgactgtttcttctaatttatcacttttaaagtctcatttaactttttttccatacagaagatttaaatttttatggagttgactttatgaacctttttcttgatgacttttgtttttttgccctgacctggccactccacgtcactcactgctgacaccagtgcagcacccctgcctgggccatgtggaccccactgggaacgccaaatgtaggcacctcagggctccagcaagccacgagaatcccccatgtccttgacagagctaaatcctgtgtccctggggctgctttatgtttgttgagtggtgttagactcggtcaggtgggctgggtggtgaggctgaaggcgagtgtgggaggaagggagggggtacagagtgcggggcacatgaaccccaatgaggaggtgtttgttaaatgccaggggggcactgagctaaaatggccttgggcccttcctcagctgatgctgaaggggataaggatagagactcgggccggacaggctattctctttctgggtatgattttgaacctgcctgtttttgttctgtaggtgaagagatggcgtttgtgaagagtggctggttgctgcgacagagtgagtacaggatgtgcggtctgcgatcggcattgccgaagggcagtctctatttctgtttgcttaaagttgatcatatttaaaagcaaataacaaagttttatgagtgctatggccttgagtttccccttggacattcctagatctctgtgaactgtcttgcacaccacggagctcctccttggttgctgagttgacaggaaccaggaaatgatggcagtccctgctgctttcgctctcctcactagcatgctttactttttaattttaatttattttatttatttattttttgaggcagagtttcactcttgttgtggagtgcagtggcgcgatctcggctcaccgcagcctccgcttcctgggttcaagtgattctcctgcctcagcctcccgagtagctgggatcacaggcacacaccaccatgcccggctaattttgtatttttagtagagaaggggtttctccctgttggccaggctggtctcaaactcccgacctcaggtgatctgcccacctgggttcccaaagtgttgggattacaagcgtgagccaccgtgcccagctgcgtgctttattattaatgatggatctgggactgcctggatctaactgagcccagctgagatactggaacagaggtgctggtctctctgcctgtcttatctggggattgagcagtgactcagattctcaaatattggagtctttgtaattatgtggctgaagagttgatctgaggcaatgagttcatctaaaaccaaaacttttgtgtctccaaaaggactagagaagagactcagttctttttttatgggattgagatccactttcctaggcttatctctgcaaacctgtctttcatacactgtctgcttatctctgaggctgtcactccaggtgggattcatactgtgttttatttttatttatttatttatttattttttgagatggaattttgctcttgttgcccaggcgcgatcttggctcactgcaacctccgcctcccaggttcaagtaattctcctgcctcagcctcccgagtagctgggattacaggcgcacgccaccatgcctggctaattttgtatttttagtagagacggagtttctccatgttgagcctggtctcgaactcctgacctcaggtggtctgcccgcctcggcctcccaaagtgctgggattacaggcaaagtgctgggattacaggcgtgagccaccgcgcccggcctcatactgtgttttaaagtgggaagaaccagtcttatttattaaaaaatgcaagcagaatattctgctatactagaaagagtgaagttaagggaaaagtgactaccatgtcatttatgattctagtcaaaaactgagctgtatcacataccattgattgttcagagacttgagtttatctatgagggttactttcagaaatttagctaaagtcaagtctaccagtaagaattgatggcatacctgagatggtttatcaaaactattgtttacgaattgtttgtgttcctgttaaatagattttatgtatatattcttaattctcacaacagctgtatgagaggtaagtggtattatttccagttgaagaaattgagattcagtgaggttaggtacttgtctaagtgtgaactgtgggtgacaaacctacattcaaagtcaggactgtgtgatttcaacactgacattatatgcacccagagaccggtcttcagcctgtgtgtctgtgactagttccatgttcccaacctggagctgaactgtatgtccccttgtctgttagtcctgtagtcttagaatagacaaaggtgtcgtaatgttagcttcacaaagaaagtcctggcttgttgaagtctagcccaagtttcctagtcttgggttttgcggtctcaacgtccccatggtcaggggacatggggacccttgctcagaccttgagggtgtgccctcctttggccctttggatgtcctttgccacacccttgtttgagggcaagctttcccttttccaccacaacttgaagtaagtgctctgtcaacatagtgatcagtgactcttttgacaattttgtcctccccatcacgcctagcatggtgatgtacacaaaatagatgtactttaaataagtcacatagacttttccagtgttctggtccatgggtgtttcagaagtgtgtattcagacgatttactctgtatataaccccatccccatatgtatgggttaattttccttctttcctgaaagtagaagtatcaatgccagtaaaacgaggtgagatacattatattcacggggttgtagagcagcagagatacacatgtgatgtggtcacaggtaggcaaagccagccttgggacttattttcctgccattgccacatgtactgttgggacccagtcctggcctctggaggacagcctgacttgggagtctgcagccagggctttgatggcaggtgagatacttgggcagaactccctgacccagtggttccacctgtctctgtgtttctgtggctctatttagtagggctttttgtttgtttgagacagagtcttgctttgtcgcccaggctggagtgcaatggcatgatctcaacttactgcaacctctgcctcctggcttcaagcaattttcctgcttcagcctcctgagtagctgggattacaggtgtgcgccaccatgccaggctaatttttatatctttagtagagatgggatttcaccatgttggccttgctggtcttgaacttctgacctcctggtccaccccccccacccccccccccgccccccgccctcggcctcccaaagtgctaggattacaggcatgagccactgtgcctggcttttttttttttttctttttaagacagggtcttgctctgttgcctaggctggagtgcagtggcgtgataactgctcactacagccttgatcttccaggttcaggtggtcctcctgactcagactcccaagtagctgggactgctggcttgtgttagcatgtctggctatttttctctttgtagagacgggatcttgctttgtagtccaggctggtctcaaactcctgggctcaggtgatccttccacttcagcctcccaaagtgctggaattacagatatgagccattgcgcccagcctatttggtagtttctgcacagctcaggtagtcaagtggatgcttgggtatcacttagtggtcagttaggcaagtgcagtggacacccctcctggtgaggagagtgcctgatactactggcaggaaagccgaatggcgcatatctggttgacaccagttgcaggcacggcaacataaagggaagtacacgaaatgggattgtgtgtgttggccaagaatgggatgagatgtacaggaacagaaggtgtagtgggcagtgaatggatgtgaggaaggtaaagagatgaccggagctacaactggcctttaagtccactgcaggggttttcccttcatgcagtcaaggaaattactgttttatataccaagttaaaggaaattactgttttatataccacgttaaatacctggtccaagatcacaaatgaaaggttgaatttgctcaagctgacagaagtacgtgaggtagtaggatgtgcacagcatgggaggccaggcagggcctggtctatatcctgctgtgctcatttatccagtgtatgcatcaggaaggggggagccttccacactgtgggcttctgtgggaaatggtaggaaagagtatctgtgaaaactcttaaggacaaagaaaaaaaacgtgttttttcttttttttttttggagacggagtgttgctctgtcccccaggttggagggcagtggtgcgatcttggctcactgcaacctccacctcctgcgttcaagcgattctcctgcctcagcctccctagtagctgggattacaggtacgagccaccacgcccagctaattttttgtatttttagagatgggatttcaccatcgtggccaggctggtctcgaactcctggcctcaagtgatccatctgcctcggcctcccaaagtgctgggattacacgcgtgaaccaccgtgcctggccaaaatgtgttttttcaaaagagaaagatattatttttatttgcgtatagagacttcacagtccagcattttctgatcaatctggcaatttagacaatatttggaaatttagaaagttgaaaagtttgagaggtttaaagtttagtactgtatgaggaattaaatgttagatatgtttcatttgctgaaaagcaagctttttaatagaaaccctaaccggaaagtgttggaacttctaagttggttggcagcattctctgttgacagtgtgtgctgcatgcagcctgttaaagcaccagttggcgggccctgtgctctgctttccctttcattgtgagggactgctttgggtaattctatacaggtgtaattaaggggccaggggaagagttctttttgtttctgctgtgaattagaggactatgtccttgctcttttggcgcaaagccaacctttcagatttctaaattttgaaggctgagcatggtggcatgtgcctgtagtcgcagctaaacgggaggctgaaatgggaggattgcttgagcccaggagttcaaggctgcagtgacctatgatcatgtttgtgaatagccactgcattccaacttgggcgaaatagtaagactgtctctaaaaaaaaaaaaacaaccgtactattttttttttccaggtactattttgaagcgctggaagaagaactggtttgatctgtggtcggatggtcacctgatctattatgatgaccagactcggcagaatatcgaggataaggtccacatgccaatggactgcatcaacatccgcacggggcaggaatgtcggggtaagctggcctgtcttggccaacttctgtcttctgctcttcctctgtcttgctgggagcttggtcctcttccttccctgttctgctttcattaacagattgaagaagggctccatctcagaggggcgaccacagtggggccccaggcacttagattatgaaccacatggtcgggaaatatcagtgttctcagtccacgtccctcgttctcgtggagagggagccagagctctgggaacctcaggaagcacaggccaccctagactacgttgattttgtactcagaaactggcttctgtttgatggtgactccagtcaattgcttaaaatctgggatgttggccaggcatggtggctcatgcctgtaatcccagcactttgggaggccgaggtgggtggatcacgagggcaggagttcaagaccaccctggccaagatggtgaaaccccaactctactaaaaatacaaaaaaattagccaggtgtggtggcaggtgcctgtaatctggctactcaggaggctgaggtagagaattgcttgaacccgggagtcagaggttgcagtgagccgaatatattttgtggacgtcatcttggcagctggtcttgtcagtcagcctagctatgttctttctgcattcttggaaaggcagagggttctttcatagatgtagcacttgatttattgtctagtcctttgcttctctgagctggtagttcttagaaaatgtaagaagaaatcctgaaaaaagttcctttattctgcttatttttcatagatactcagcccccggatggaaagtcaaaagactgcatgctccagattgtttgtcgagatgggaaaacaattagtctttgtgcagaaagcacagatgattgcttgtaagttttgctttcttatgtgtttaatttaaaaagtattttctattttaacttctgattaccaaaaaatgaaaagaaagggcgtggagttttctttcaggcatcagaataagggactcagtggatgtatgagagaaatgcaagagtcgcttttccaattctagtttctgcctctctcagactgcctaggccgatcccattgtggtgaaaatggcagaaaggaatagcagtctcatcatgctgtctttcattattagattcacagtgggtaacgggcatagttgaaataaaatgaccagaaaagcaagaaagtaaagagtaaggaaactgtcagttcctagggctgctgtcacaaattgctgaacactgagtgacggaaatggcagaaattcattgtctcatagttctggaggctggaagtctggaatcagtgtgtcagcagatccttgctccctctgagatgctgggtaggatcctttcttgcctcttcctagcttctggtggttgctggtagtccttggtgttctttggctgacagccacatcactccggtctctgcctctgttgtcacatggccttcttcggctgtgtctgtgtccagaattctcttttcttataaaggacaccaatcataatggattaaggacccaccttaattcactatgaccttatcttaatttgattccatatgcaaatatcctatttccacataaggtcccatttgagggtactggggattaggatttatacatatctttttcatgaggacacaattgaacccataatagagacttttgagaaagatggtgaaatggattagagatcatcttccctgaggggaaaacatttcaatggtgcaaccaaataaagaagtttgatctcaagcacaaactacaaacagttaaagaaagaaatagatgattctactgagatgttcttcaatcctacccgaatcccagaagcagtgacaagatgagttaattaaatcttgcaaattttcagtattaccctgtaatctggagtgatgctgattaagtgtaagttactttttggaaaagctagggaaaaaatccttaagaatgtgatgtccttggggcctcagcagaggctggacggttctcccaggactcatcattgcagggcagtgaaaggcactgaagctcacaggagttgggtaattttctgtctggtgaagtgagccctagcatgggacattcaaaggaatatgctcagaagagagtgtaggacccagagttttcagaaaagacttactcggtctcagaagaaatgtccttctcttctagccctgtgccctcagattacagaatgttgattgtgagggtaacacctagccatcaaactgttgctgggctggactgaggtagaacagggtggaactaccagttgataccagattaggtaggaagcgtgtcaaggagaaataactcatactttatgagagcaaacagcagttttagatatcacttcccatgttaaacgtgagcaggatgtaaagaagtggcttggcaactatgcagatataccatgaaggaaaaataagaaaaggaaaatgcaagcctcaggaaaagctcctagagtggaggaaaataaaacccaagaaacaggagcagagtcttcaggaatgctttcctggccaccatatttaaaattgtatctccctgtccccatacacactcaccatctatcaactatttatcttgttcatcatctgctttcattagaatatatgctgtgtgagggcagagatttatgtttcttttctgctcttttgtgtctgtaacttagaaggtctgttgctgtcaagagggtgccattcacgttataatctgaagaaagtggtcttcccttcaatacaaccccaaatgaaaagtgaatcattggcatggaagaaaagactggagatactctcagtgacaggaaaaagatgaaaagatcagagatatgttagactaaaaaaagttcagaaagattattgatgtccataaagtgtacaacccaaaagagagaattacaaatctaaggcaagaaaaatgttctgaaataatcgaactgaattggcagaccaaagtccctactagactcttccacctgatatgacaacaaaatctatataagatatatgaataatccagtatgataccctttagcaaagtgaatgacaatggtatgccacatacaaaatcagttggggaattttgcaacttaactgcattccttagaaagctagaacacttgggctgggtgtggtggctcaagcttgtaatcccagcactttgggaggtcaaggcggatggatcacctgaggtcaggagttcgagaccagcctggccaacatggtgaaacctcgtctctactaaaaatacaaaaattagccaggcgtggtggcaggcacctgtaatcccagctacttgggaggctgaggcaggagaatggcgtgaacctgggaggtggaggttgcggtgagccaagatcacaccactgtactccagcctggacaacagagtgagactccatctcaaaaaaaaaaaaaaaaaaaaaaaaaaaagaaagccagaacacttgaaaataagtgaatgaatctttcaactcagggagatagtaaaatgagaataaaacataaaaggaattgatgaagataagagggatagggtcagtaagaaaagtaaggggtaaaggagtgagggagtgcacaagagaacactattttgttttttgagatggagtttcgctcttgttgcccaggctagagtgcaatggtataatctccgctcatgcaacctctgcctcccgggttcaagcacttctcctgcctcagcctctggagtagctgaaattacaggcatgtgccaccacgcccagctaattttgtgtttttagtagaagcttggttttaccatgttggccaggctggtctcgaactcctgacctcaggtgatccatccgccttgacctcccaaagtgctgggattacaagcttgagccaccacacccagcccaagtgttctagctttctaaggaatgcagttaagttgcattcctcaggtgatcacctaccttgacctcccgaagtgctgggattacaggcgtgagagactgctttttgcctatgaattaagaaagctcttgtgatacttaaggttcagatatctagttttttttgacaatatagtgtaaagttggtaggtatagagattgttagaatcgttttgcagggcattttggcaatacctgctgaaataaattatgtttttatcctttgatgtggtattttcagtctttggaatttgccctgtggagatgtttacataagagtgtaagggtaatagggatgttaatagcattcttttcttcttttttttttcttgagatagagcccctctctctcatccaggctagagtgcagtggtgtgatcttggctcactacagcctcgacctcccaggcgcaagctattctcccacctcagcctcccaagtagcttggactgcaggcatgcgccaccatgcccggctaatgtttatattttttgtagagctaggatttcactatgttgcccaggctggtcttgaactcctgggctcaagtgatccccctgccttggcctcccatagtgctgggattacaggtatgaggcactacatccggtccccagcattctttttaatgttgaaaaattgctaatctaaattttttactcatatcgtggaatattatatagctggtaaaaaggaagtagatctgtgtgtatgccatgaactgacaaagcaagtggcagtacatttcacatttattaaaaagtaaagtaaaaagtatagtatagattatgttttaaatattacatatctattatgtatgtaatttttaaaaatatatattcctagtgcatgtctcaagtggtttggggcaaagcctgaagacttgttttttaaacagatcttttcaggaattctgatgccagcccaggtttcagaatcattgcaatgttggattgccttaaataaagtaccctttttcttttctccagggcctggaaatttacactccaagattctaggacaaacacagtaagttgctaatggcaatcaccaataattttttttttttttgacaaggtgtcactctcactcaggcttgagtgcagtggtgctgtctcacctcactgcagcctctacctctcgggctcaagtagtcctcccacctcagcctccccttcccagtagctgggactataggcccatgctaccacgcccagcttatttgaaaaaatttttttgtagagacgaagtctcactatattacccatgctggtatccaacttctgggctcaagtgatcctcccactttcgcctcccaaagtgctgggattacaggcatgagccaccacacccggccaccagtaatgttttcacatggtcttgtgtaacaattggagaatggggaaaacgggtttcttgaccatctggccacgaatgggcaggtagtgctgggcagggcgccttttgccaacagtgagcaagctgggtttgtcaaatgtttggcaggaggcaccctgctcttacaggcatgcttgttccagtgttgctttctagaaatgcttgtatttctcaaagttctgcaacactttgaattgtgctgtggtttgcagtaaaggcttagaaagaactgcaggatccttttcacgcatgggagctcagcctgtgaaacaaacatttttgtgacttgtacttgtctctcgtcctgtttctggccttaggaggtcactgagacagtgaacctcatttgtagagcctcgtaatgctgtctttatctgtcagtgatcaagggagtgtgttactctggtcagagttttcattctttagatgggatttttctctcctttattaatctgtaagaaaagaagaaggtggatcaagcttacagaagaatgtgtgcatgtgggagaagaaagtaaaaggcttaatatcctaatagcgtcagtgttctcttcctttgttagcacacaacaacttcattctaagcttactctacagccgcagttaccttttcttcatgaaaatccccctttttttttttttttttgggtaaaattagcattaacaatccatacagttaagggcaagctccccaaatgattctttgtgtggattttttttttttgagacagtctcactctgtcgcccaggccagagtgcagtggagcgatctcggctcactgcaacctctgcctcctgggttcaagcagttctcctgcctcagaatcctgaatagctgggattacaggcacgtgccaccacgcccagctaatttttgtatttttagtagagatggggtttcatcatgttggtcaggctggtctcaactcctgacctagtgatctgcctgccttggcctcccaaaatgctgtgattaaaggcatgagccattgcgcctggccactttttctttttttttaaagagctaacatgtttttctttaaattatactggggagtaatttaatgaagaattttgttttttaaggtaaaaaacagacttatgtataggacatatctcttgatacattttagattgtagagtttttatttgtgaataaaggactgttgagagtgctgtaacatctttatttttttggagacagtctcgccttgttgcctgggctggagtgcagtgacttgatcttggctcactgcagtctcgagctcctgggctcgagtgatccttgagacttagccttctgagtagctggggccataagcaccatgcccagttaatttcttgttttttgtagagatgagctctccctctgttgcctaggctggccttggaactcctgggctctagtgatcctctcacccagcctccccaaagtgttgggattataggtgtgagccattgcacctggcctgatgtaacatcttttaaaaggcattgggtaacagtggggcctctgagtgccttcctggctgtgagagctgtagtcctgttaggggccgagtgaggaccactttgctcttgcatttagaggataccagaataggggtgggggcccccactggactgggggagtttttcctgttttgcagagagctatgtatctttttgtttttttaaatttttaatttgctaaataaaagggacaatgcacagcatcgagcacacagctgctgggaagctgtcctgtcctcaccctctcctgtctcccgcaggcgtatgtgggctctgcagtcatgaccgatgagacatccgtggtttcctcacctccaccatacacggcctatgctgcaccggcccctgaggtagggagaaccctgagcctccaggtgagggaagtttggggtctctgctgctgtcctgctttgttttgtttttttaaatgaaattagaaatgtactctaaaccttttcttcttaaaacagatgatttcttatcaacgtttgttttcatgaaatgaagcaactattttatatagttcagcacattataatgtgctgtattaatgtgtaacacgtttttaagatagatctaaaaatgcatcatgttaatgatagttgccttgggtaatgagattttgatgatctgtagtttatatggaatgaattatttgaattctccttatagtcagaaaaaaatgctatattttagggaaaataaccttaaaaaatcatgtcaaatacattgggatgtcctcttgttggggtgctgactgagctagtggaacgtatgtaagtctgttgtgtggaacacgcagcttttaaaaaaattgaattttgaaataattatagattcacaagaagttgcaaagatagctttgagagtctcatgtgctttttatgtgttttccccatttgttaatattcgatcaaattaaacccaggaatttggaattggtgtggtatttaagagtaatcctgtgtcattttctcatacgtgtagattgtgtagctaccacctcaatcaagataaagaattcttcacaaaatcttcctgctgtgacaccctttaatagtcatgccatccctctgcttccctaaaccctgtcaatcactgaactgttctccagctctatagttttatcatttcaacaatgtcatataaatgaaatcatatagcacgtggtcttgggagtttaacgtttttcactcagtatttgcccttgagatctgtccaagttgctctttgtcaataatcctttttattgctgagtggttttttttttttttttgggatggagtcttgctctatcgcccaggctggagtgcagtggctcgatctcggctcactaaaagctccgcctcctgggttctcggcattctcctgcctcagcctcccgagtagctgggactacaggcgcccgccaccacgcccggctaattttttgtatttttagtagagacggggtttcactgtgttagccaggatggtctcaatctcctgacctcatgatccgcccacctcggcctcccaaagtgctgggattacaggtgtcagccactgcacccggcccttttgagatggagtttcgcttttgttgcctatactggagtgcagtggcacgatctcggctcaccacaacctccacctcccgggttcaagcggttctcctgcctcagcttcccaaagagctaggattacaggcatgagctgatttattggcttttccttttctcggttgtgcttttgctgtcaggttaaaacttaacatgacaaacctagcccaagtttcctaagattttctcctacattattttctgaaagttttatagtgaggttttataattattctgtattaattttgaattaattttttataagatagatgtctttttcagggctctgttgagtgtatctctttctgaggtctgtggtctgctccattgttctgtattgttaccttcctttgatcccacacagtcttaattattgcagctattataaaaagtcttggaactgggtggactgatcaacaccctctttgttcctttttggaaatgttttagctattctggttccattagctttccatatacattagaataaatttgtttatatctacaatgaaatcttgcaaggcttttgcaggaattgccttaaacctgtgtcatatttatttggagagtaatgacatctttattgaatgttgaatcttccagttataaacatggactgcatgtgtatttagatcctctttgatttttttcatcagcattttgaggttttcagtataaaaatcccatacatgttttgttagatttataagtgtttcagtttttttagtgattgcatatggtattacatttttagttttagtttcctttgtttactgccagtatagagaaatagaattgatttttgtaggttgatcttgcagcttgtaaactttctcttttttttttgagacagagtgtctctcttattgcccaggctggagtgcagtggcgcgatcttggctgactgcaccctccgcctcctgggttcaagcgattctcctgcctcagcctcctgagtagccgggattacaggcacgtgccaccacactaattttttgtatttttagtagagatggggtttcaccatgatggccaggctagtttcaaactcctgaccacaggtgatccacctgccttggccttcaaagtgctgggattacaggcatgagccatggtgcctggtcggcgcctgtaaactttctaagctcacttactctatttcctttttctgtagattctttgggatatactacataggcaatcatgtcatctacaaataggaatctgttttctttgtaacctttatgccttctgtttccttaccttgccttgttgccttggttagaccttcaaatattatgtagaatagcagtagtgagagaagacatccttgccttgttcctgattttaggggggatgtattcagtgtttttttttgagatggagtctcgctctgtcacccaggctctggagtgcagtggcgagatctcggctcactgcaagctccgcctcccgggttcacaccattctgcctcagcctctctagtagttgtgactacaggcacctgccaccatgcccggctaatttttttattttttttatttttagtagagacggggtttcaccatgttagccaggatggtctcgatctcctgaccttgtgatccacccaccttggcctaccagagtgctaggaatacaggcgtgagccaccgcgcccggccagtgtattcagttttaagtatgcattcatttattatgaatgtactgtttaattcagtatttaattagtactgaattcagtatttagttttacatatgcatatatttagtatttaatgcattcattaagtatgctgttagctggaggttttttatatttattctttatcaggtttagaaattccctttttctagtttccaggagtgtttatcatgactggttgtcagttgcttgcctgcctgtcttcctgcctcctccctccctccctccctccctctctcctttcccccgcccgtcccctctcctcctctcctctcctctctcccctgaccccctgagagatgaggtctcactctcttgcccaggatggagtgcagtggtactatcattagctcacttcagcctggaattcctgggctgaggcaatcctcttgcctcagcctcctgagccaccatggctgcaaaaaaatttttttttgttgttgtagagacagggtcttgttctgttgcccagggtggtcttgaactcctggcctcaaacaatcctcctgcctgggcctcccaaagtgattttgttaaatactttttctacagtaattaatatgatcatgagatttttcttttctttttagcctgctaatatggtggattatagtgtttggttttcacatactgaaccagccttgcattccctggaataaagcctacttggtcatggtgtatgattctttttatttattgctgaattcagtttgctaatatttgttaaggatttttgcgtctatatttatgagggatattggtctatagttttctttttttgtactttgttttgttttatcaaggcaatactgaccttatagaataaattggaaagtgttttctgctcttttcttttctgggagaaattgtgtagaattggcattaattcttctttaaaatttggtagaaatctccagtgaaactgtcagggcttggagatttcttttttgggagattttaagtgacaacatcttttttctttttttctttcttttctttctttttttttttttttgagacggagtctcactcttgtcgcccaggctggagtgcagtggcgtgatctcggctcactgcaagctccgcctcccgtgttcacgccattcttctgcctcagcctcctgagtagcggggactacaggcgcctgccaccacacccggctaatttttttgtatttttagtagagacggggtttcactgtgttagccaggacggtctcgatctcctgacctcgtgatctgcccgcctcggcctcccagagtgctgggattacaggcgtgagccactgtgcccggcctctttttactttttttggcctaaccaacacacatctatttgtcacagttctggaggctgaaagcccaaggtcaaggtgttgggcagcattggttctcctgaggcccctcctgcgcttgcacatggcctcctcctccctgtatcctcacatgacctttcttctgggtccaccgcagatacagctttcttattagtgactggtctactcaaattctctagtttgtatggagtaggttttgacagtttgtagtttttgtggaattgttccttttcttataggttgtctgacttagatgtgtagagttctttatggtgttttcttattatccttgtgatgtctgcagagtctatagtaaaaatcctccagttcattcattcctgatactggtaatttgtctttgctctttttgatagtttactaaaggttttattaattttatgaatagtttcaaagaaatagcttttcgttttattcactttttctgtctctcaatttcattgattctattcttttatttctttccttctgcttgctctgtggactttggttttcaaaagtttgactataatgtgtatttgtgtggatttctttgggattatcctgtttggtattcattcagcttcttgaatatataggcttggggttttgctaaatttgggaaattttaaatcattattcttgagtgcttttccaacctcagccactttctactctccttctggcactctgataacatccctgttagtctcatgtgtcccagagatgctcatttttttttttttttttttttacttcaatctattgttcctctgttgtgctctgattgggtaatttctaccctttatattcatgtttatggattctttcctttgtcatctccattatgttgttgggcccattcattgaactatttaaattggttattgtatttattagttctgaaatttttatttggttattctttatatcttgatatataaaaaattgaatgtatgtctttatatactttttactgagatttttctgttttatggtagatactttaaattttttatttatttcaagtgtgttcataattgcttgttgaaaggtttttatgatagctgctttaaaaatctttgtcatctttgtgttagtgtgttttgttgttgtcttttctcatttagttgaggtcttcctggttcttggtataaatggcttttgatcaaaagctggacattttaagtactgtaagactctgaatcttatttaaatctcatgttttagcagacctccttctggggagctgctttattgctgccaggtagaggtggaagtccgggctcgccttgagcctcagttgacacccatgggccaggtttcttgtcactgcagagggggttgtgaatttaggttctgactagatctccactgagcccaccctgtctgagaagaggaaaggctctttcttattgcttcccccgtagcctccactgataccatgattgccactgagaggtcctgaaaggactcactttccacttggtctctgctgatcccatctcagtggaatagggaggacaccttatttctgctgggtgggagtggggttctggctccccacatggtcttcatggacaccacccagcaggatgggggtgttttgtttccatctggtggggaagaaattctcagccccccactcagtcttatttgacggtgttctgaaggcccggcagtgccttgctatttggcctgctgagcatggaaattcaggctcttcacacttggcgtttgctgatgtgaggctgaaggcttttatgtggtggttccctggagtagagaggttattgtctaaaaatgttctgtcttgctaggttgcccctttccttcttagattctttgttaaagagagcagctcttctcagggtctttttggtctgcactgatcggcacttccagcttgccaccttccccattatctagtttgggatgtgtgaagcaaaaaggaaacccaggtcctccctcaggtgctaaagttcctctcccgtctgtcttctctctcttcagtcttcttgtgtttgctttgtatataatgaccagagattgtagctgtacttagcaggaggactacaagaaagaatgtctactccatcttctagaagtgggagtcttgtctcctgcttttgtaagataacaggtttagatctacacacatgtttgcctggctacaactctgttctcccttatcagagcacttgtcacagaacgacattagttgtgcaagtatgtctgatctcctctcaacctgtgagtatgcaaggaaggccagtctttgatttcagtatttctcagcacacagtggtcattcactgccagtggaggtgggtctgctgcatgtttctcgccatgtcttttcataggtgtgtgcagccagaacaccatcagtcacctgcccaggtgccacacctcagggcaccctcatcttccatattgtgcctggaattgctgaatttgggccagagagggttccgcttctaggctggctttgcctgcagaatagtggttttggtgaatctcattatcacctggtccaaccttatcattttacagatgggcaaaggaaggcccaggtgacttactgaaggtcaggttaacagcacagctgaattgaaatccaaatctcatgcaagtccagttctcttcttttgttgtgtttttctgccttcttcattctgtagcctgaaagtggactccaattgtagcttttgtttgttttttagtaattttaaaacggggggcctaaccacactgtttcatgttttgttttgttttttttaattgactgttgaattttattgattgcaacctggagaccacaattttaatacattaccagaggtttcacaattgtatttctaatgggcctgtttcttttcagcaggcttatggctatgggccatacggtggtgcgtacccgccaggaactcaagttgtctacgctgcgaatgggcaggcgtatgccgtgccctaccagtacccatatgcaggtaactcacgccggcctttcattcctcatttctctccatttgctgagtagaccagagagacctgtaaacgtttttatttttcagtttaaggttacatgagctatattttctggttgtagactacaaatcactctgttactatgctttaagaaagcctttggtagtttcatactgctctgcaaagctaccgtaggcttgatttttagaacttggcttttgtgtgtagattagttctcagagaattttgtacttattgggattcacttacattaagaagcaaccaaagtaagaggcctattttaagggatgagaggtgacctttcagctgttctccttctggtgatgtccttggaaagttgtcactactgaggtgatgttctgtttcacagtggagtacaggcctggaagggcttgtatttattctgggcttggagtctgttctttctgttcttcacctcacatgaaacacttggcaggcatgagtaactggtgtagaggtatcatgtccaggtctcctgggcaagggggttggcagggtggaggtgtgggacaatgctggccactgctggaactgcagtgagggtggggagggcagagctgtggccgatggccactgtgaagtgaggctgggcaggcgcagtgggcacagcaccatagtgcaggatgcacaggtgggtgggctggagccagaggctgagctcaggagagacaggaatgtgggggtttgcaggaggaggagtagtcccgggctgtgagcaaaactagcatggtgtctcagcgcagaggcagtgggagacgagctggtaccagaaacgtgggtcactaatagtggtgcccagagaagtcaaggaggcctctgggttacaatcttagatggtgtccttgtagttgttggtggttgctttggcttttgatgcatttagcacttaaaatggattctggagtagaaatagagaaatctcatactcctgtgttctgggaatctgaggcacattcactcaactagcacggactttggaggatcctgctttgcttgactttttttcatgtcaagttgaaaaccattaaaatgataataagtagtccgggcacggtggctcacgcctgtaatcccagcactttgggaggctgaggcgggtggatcatgaggtcaggagatcgagaccatcctggctaacacagtgaaaccccatctctactaaaaatacaaaaaaattagctgggcatggtggcgggcacctatagttccagctactcgggaggctgaggctgcaggatggcatgaacccgggaggcggagcttgcagtgagccgacatcgtgtcactgaactccagcctgggcgacagaacgagactccgtctcaaaaaaaaaaaaaaaaaaaaagtaattatgacagattaaatatttgtccattgtcttgtgagcctagcacaaatacatttgtttgaattacagtaagtcctcacttaacatcaacagtagattcttggaaactgttactttccatgaaacaacatatgatgaaaccaattttatggtagactaattggtataaacaagagttaagtttctgttgcttatttctggtcacaaaaacatcaccacttctaatattaaccattgaaattaatgtgagccatacatacatgtaagattaataaagacaagtaaaataattacctagttatttcagttcatggcccatgggtggctggaccctctcccagcagctcagggcttaaggtgggaatccaccatggataggatgctatctcattgcagggcacactcacccacaccccctctcactctgggacagtttagatacgccgattcacctaaggggcacatctttgggatgggaaggaactgaactatcccaagaaaaccatgcaaacatggaaaaaaccttcacactccacacaggcggtgccccagaggggaatccattcttttcttcttatcaatgttataatgaaactacattaaatgaaacagtgttatttgaggacctcctgtacttcctccatataaaatattttctccttataatcatgcattgtatttctagtcttgtttttaaattatatgtattgaatcccaagtgctatgtaatactcctaagtatttttagtaattgcctattatcatattgggtgatgtattattaaaccttccagtattggctgtttttttcctctctttttttttgctattgtagatacttctttgaacatctttaatcattttcctttttgttcttattgaatatgcattagaatatgtttctttttttttcttttttttttttgagatggagtttcactcttgttgcccaggctgttgtgcaatgtcatgatcttggctcactgcaacctctgcctcctgggttcaagagattctcctgcttcagcctcccaagtagcatgtgccaccacacctggctaactttgtatttttagtagagatggtttcaccctgttggccaggctggtctcaaactcatgacctcaggtgatccatctgccttgacctcccaaagtgctgggattacaggtgtgagccaccgtgcctggcctagaatctagttctttttttctcccccccaactagactctatctctatatgcaggcaggccccaactcaggatggtttgacttaatgattttttgactttccgatggtgcgaaaacaatgtacatttagtagaaaccgtacttcaggtactcctacccccattctgtttttcactttcagtatagtactcattcagttacatgagatcttcaacacttgattataataggctttgtgttagttgattttcccagctgcagactaatgttagtgctctgagcagttgaaggtaggctatgctaagctatgatgttcggtaggttaggcgtattaaatgcattttgactatgatgttttcaacttatgatgggtttattgggaggtaaccccattgtaagttgaggagcatctctgttaacatgtcagaaggcatagacatttttgacggttttttgggatatgatttaaaaatgtaaacgttttcaaacataaaaaatagggatgatggtataatgaactatcatatgtccatcactggcttcagcagttaaccatatcatgtctaatcttttatctctacctcagcctcctttctctacctctggattagtttaagggacatcccagatttttaatcatttcatctgttaatattacattaaatctggatagcattttgccaagttgatcccagaatggtttaccaacttataatgccactagcagttactgatgcagtggtttatctgtgatcccataaagatggcctgttgtgctctaaaagttttgatagcttcagtaggtctcaagtggaatcatcgagttgctttagtttatatcaccttttatgaataattttcctttgcacatttttctgttgggatcccatgggatggagagttttaagccctagccttgccacatgagagccagcctctttctcagcttccagcccacagaatagggctgttgccgctgtttcttactgtatagagagcacagatattgcagacgtggttgtttagggcacttctggaaatgagtccatccttgcccttggctctcgtcagtagagtagaagtagcactctcacaggcagtactcggaatgcttgccgcccacataaggggctgagtcagtaggcattatggccagcctgcctcagagtggtgaccaggcagcccccagacttgcttgctgtggaagggtcaaatgggtttgtggtcgatacacagcagcttgtgttgacaaccagatgggtgctttgccacctccatgccatcctgtctgccagggtctcactgcctagagctagtccacaagaaccctcctagtcatgcacagagctggttaaggctctctcttcagtgtgattgggaccagtggttggtcagccaattgagaaagtacagagtactgtagacgtattgtaaacattgtgctgtgatttaacccgctagtgggtgttcgttcggctctcctataatgtggggttgaggtgtttgctttgagttggctcctttggttggagtcttctatttctgtcttgtagagaccatactcatgacacgtcattgcactgcagtttccaggggtaagtccaagagcagacttctagatttggggactatagtcctcccatcctcccatcttttatagttttcttaattccctgatttgatggtaatttgtaaaagtaaccttcctttatttagtttttcctgtagtatcttagttgccatagaaactgtgtctgcctttttctcattcacattttgaccatttatgtaatattagttaaattaggcaattataataagtgtgacctggaagcatccacagctgactctggcaaggactgagctcaatgcaggagcagagctcagcaggagccacaagagagtggcctggtcctgcagccaggggacctcagcatgacttgcaggggcatcagaatgtagattttccatgggaccttttcattaggtcagctcacaagttctattgtgttacatttggctagttggagttaacattactgagcattttaaaatgtcagggctgtgaaagtaaatgccgtaattccctagttttgaaatttaaacattgcaaaaataatcacttgcttccagtactgttacctgtaccagatcagcccttagatttacgatggtttcattgtactactctgtgccttttgagttttgtcattcatcatcctctgttgtatttgaggcattagtgggtataaatgcatactgtagccagagtgcctgggtttgtgtgcccttactgtccttaactgctgtgtgcctcagtttgcccatctgcaaaatagggataaaagtgcactcagttgagtaagagcattccaatgtatgtagtgctgtaagtggctggaaatgttcacctttgttaccactgcgggtttcacttctgctcttcatccacatgtgcacatcactagtgactagttttttttcttttctttttttgtgtgtttgagacagagttgcactctgttgcccagactggattgcagtgacaggatctcaactcactgcagcccccgcctcccaggttcaagcaattttcatgcctcagtatgggattacaggcatgcgccactacccctggctaatttttttttggtaattttttaagagacagggtttcactgtgttggccaggctggtctaaaacttccggcctcaagtgatccacctgcctcagcctcccaaagtgctggcattacaggtgtgagccatcaagcctggccagccagcctttgaaccattaaaggaatagaggatcaaggaggaaagttaacgctattaatacctgagcagtttgaaagctacttagctactaggcattatagctgtgaagcatggaagagagcaaacagtatatttccagttgtaaattttaatcttgcaaattaaatactaaatttgtctgtggtttgtttttttgaagttttcacctctaacataaatatttattttttctctataaagacatgcagtaaaaaagagtaggccgggccgggcgtggtggctcatgcctgtaatctcagcactttgggaggccgacgcgggtggattacgaggtcaggagatcgagaccatcctggctaacacggtgaaaccccgtctctactaaaaatacaaaaaattagccaggcgtggtggcgggcgcctatagtcccagttactcaggaaactgaggtgggagaatagcttgaacctgggcggtggaagttgcagtgagctgagatcatgccactgcactccagcctggggacagagcaagactccttctcaaaaaaaaaaaaaagttatatgtgcagatttaaggcttaatttaaaaattggtttgcgtgcatactaagaagctcatttgctttaagtgagcatttcctttttgggcttttgttgggcactgtgtgtctcccatgttccccatttgtctgccacccaataagcatggtgtcgagggctgaagtagaaatcagaggctagaatctgaaagcttcattagggttctgctttttgcagattagggactttggcccttagtgagctgaggatcttggtttcctcccagtgtgcggtttcagggatgtcggccacatgatgtgcctgttgtggaggagggctgggtcgccagtgtgacaggagacagcagatcccttttgtgaaaggagaactggtactttgcgtgatgttaaacttcacaaaccgctgctcagaaatctgctattttccttctcttttaggactttatggacagcagcctgctaaccaagtcatcattcgagagcgctatcgagacaacgacagcgacctggcactgggcatgctggcaggagcagccacgggcatggccttagggtctctattttgggtcttctaggggcctcaaggtcttgatgtgcatagcttctgataaccctgtgtgcaataatatgatttgcagggcatttctgtttgtgacaaaagtttttaataatagttttaatcattcctttgaaagtagtgatgtcataattgtactaatccacataagtaccacagagaagggtttgaactgtgctattttgttcaaatgttgactctccgggggcactggctcattccaagactgttcttgtgcaactctcagaataccttatttgagcatacctgttttgaaaggcattttctttttagagttaggtgtagtgcttaagggttaatttattttcatgttatgccagtaatatagtgttgtatgcctattgagtgattgtggcaagaaaagctacagcttctttgcgtttaactttttcaaaccacagaccagaactggttgcatgttactttaggagttgtgggttggtaagctcccaggtacttcccgaggctatggtgtgagagcccccgtcctgccctctggggctccacaggcccctggcaaggccgatggctcaggatgatggggcacagcccgcctttgaacaatcatgcttcagaaatctgcctgaccctagctgctgctgctgctcactttattcttgtatggctttggtaggcatacttggagaacatatcccacattaggaattgatttaagcctgagagtttgagggctttaatcctttaaaacttggagaagctggctgggcgcggtggctcacgcctgtaatcccagcactttgagagaccgaggcgggcggatcacgaggtcaggagatcgagaccatcctggctaacacggtgaaaccccatctctactaaaaatacaaaaaattagctgggcgtggtggcaggcgcctgtggtcccagctactcgggaggctgaggcaggagaatagtgtgaacccaggaggcggagcttgcagtgagccaagatagtgccactgcacttcagcctgggtgacagagtgagactctgtctcaaaaaaaaaaaaaaaatcctggagaagccagaacaatatacaaacaagtatgtggaggcagatttgctttattccaagaggctgtttgagtgtgtgtctgcctaagcctccttatagcctatttttctacttgctgagagagtaatattaaaggaacagtgagggagtggaaggagagccttagttagagcgttcccatttctggcctttgggggtttgcactgtgcgggagatgctctctcatcactctgaaggcccatcctgtgcagaagtgggactctgtggctgttcactgagcaccagggcagactgtagctgagcagacttgggttatggatgggatatggggcccagggaccctcaggacacagggaccggctcaaggtaccactcagcctggccaggacccccagctttgcttttgttcttgatctctttgtgatagagaagcttagaacattgaatttggaaccccaaaatgtgtgagtctttggaaaacccattccagcctttcttcaaatgctcttattttcagtatatgaagtgtgtatttgaaatattcatatttctgttatttcttgttttcaagctctgaattattgcagttttctgtcctgcatgctttcaacagtgtgcttttacagtggcagtttagcacagcgaatgtccctgccccacactccatatggtcctgttttcctgaaaatacactccaggtagcacagacttgttattttgcctggctggttacacacatgctgtcttgctttgctgctcagccacctccctctgaggccaacttaggccaacctacataggactccatctttagcgagacaccagagacacctagtgatgaccacgggtctgcttttctctctgatcctaggggacttgttgacatgggagtgtctgtttccacatggaaggatgtctgtttatctctcatctctgaatagatgtatgacaactctagtgtccatggtttaaaatgttgctttgaggattttccatcctgtataagaagaatggctttcttcagattataatcgttattaaagctgtatgtacactttacttaaaaactattaacagtttttcatgttgcactggtggtaattttgaacttggaattactgggtgggaattccaggaaccacagagtattgatttttgctgccaaaatgctcttgaagcagatgtccctgtgctcccctggctgcttctggctgaaggggggaggtgtagactgaagcttgggcactcatgtgtgtcccctccccagtccccatcctagtggggccagtctcattaggcagccatagataagcctggaacttggctgtcattagtgacttgatcctggtatgaaatgcatactgggtataaggttgctcaggtattttatttccttggccacaactcccatagatgccaatgttttgatagcctcagtttctcaacgatgtcttttgtttacagtgctacacttagtgtgagtcaagaagtgcttgagttacaagaaacttcttattcaggtttgagtaagcattttacttccatgtgtacttttaaataatccataccttgaagaagttggccaatgatattatatacatgctgatctgattgttcttttcattccttgagtcaacttcagggtcttggatactaaagagaaggagaactgtggttaatgttttggatcatcatttgtgaacaaggccagactttgcccattttaggctatccaggacttaaggtagccatctggatcataagaaggtcctgcagttgagacaaaatgacccaagtgtattttccacaagttttgatcctgtgtaatatttctttttccttccctagtgtatgtagatacaaggcatggaatgcagttccactttctccccagagttgatctttttgtgattgctttcccgtctctagtagtattctgttgtgtctagagaactgattttttcctacatacgcaaattgtacatttgtaagtgaaaatgtcaatacattaaagcattaaccttaaagca

SEQ ID NO: 90 - DNA, 3653 bp, Homo Sapiens
cagttgcaggcgagcaggcgaggaatcgccgtggcgtcttggtgttctccacgctgttctgtaggtgaagagatggcgtttgtgaagagtggctggttgctgcgacagagtactattttgaagcgctggaagaagaactggtttgatctgtggtcggatggtcacctgatctattatgatgaccagactcggcagaatatcgaggataaggtccacatgccaatggactgcatcaacatccgcacggggcaggaatgtcgggatactcagcccccggatggaaagtcaaaagactgcatgctccagattgtttgtcgagatgggaaaacaattagtctttgtgcagaaagcacagatgattgcttggcctggaaatttacactccaagattctaggacaaacacagcgtatgtgggctctgcagtcatgaccgatgagacatccgtggtttcctcacctccaccatacacggcctatgctgcaccggcccctgagcaggcttatggctatgggccatacggtggtgcgtacccgccaggaactcaagttgtctacgctgcgaatgggcaggcgtatgccgtgccctaccagtacccatatgcaggactttatggacagcagcctgctaaccaagtcatcattcgagagcgctatcgagacaacgacagcgacctggcactgggcatgctggcaggagcagccacgggcatggccttagggtctctattttgggtcttctaggggcctcaaggtcttgatgtgcatagcttctgataaccctgtgtgcaataatatgatttgcagggcatttctgtttgtgacaaaagtttttaataatagttttaatcattcctttgaaagtagtgatgtcataattgtactaatccacataagtaccacagagaagggtttgaactgtgctattttgttcaaatgttgactctccgggggcactggctcattccaagactgttcttgtgcaactctcagaataccttatttgagcatacctgttttgaaaggcattttctttttagagttaggtgtagtgcttaagggttaatttattttcatgttatgccagtaatatagtgttgtatgcctattgagtgattgtggcaagaaaagctacagcttctttgcgtttaactttttcaaaccacagaccagaactggttgcatgttactttaggagttgtgggttggtaagctcccaggtacttcccgaggctatggtgtgagagcccccgtcctgccctctggggctccacaggcccctggcaaggccgatggctcaggatgatggggcacagcccgcctttgaacaatcatgcttcagaaatctgcctgaccctagctgctgctgctgctcactttattcttgtatggctttggtaggcatacttggagaacatatcccacattaggaattgatttaagcctgagagtttgagggctttaatcctttaaaacttggagaagctggctgggcgcggtggctcacgcctgtaatcccagcactttgagagaccgaggcgggcggatcacgaggtcaggagatcgagaccatcctggctaacacggtgaaaccccatctctactaaaaatacaaaaaattagctgggcgtggtggcaggcgcctgtggtcccagctactcgggaggctgaggcaggagaatagtgtgaacccaggaggcggagcttgcagtgagccaagatagtgccactgcacttcagcctgggtgacagagtgagactctgtctcaaaaaaaaaaaaaaaggaaggagagccttagttagagcgttcccatttctggcctttgggggtttgcactgtgcgggagatgctctctcatcactctgaaggcccatcctgtgcagaagtgggactctgtggctgttcactgagcaccagggcagactgtagctgagcagacttgggttatggatgggatatggggcccagggaccctcaggacacagggaccggctcaaggtaccactcagcctggccaggacccccagctttgcttttgttcttgatctctttgtgatagagaagcttagaacattgaatttggaaccccaaaatgtgtgagtctttggaaaacccattccagcctttcttcaaatgctcttattttcagtatatgaagtgtgtatttgaaatattcatatttctgttatttcttgttttcaagctctgaattattgcagttttctgtcctgcatgctttcaacagtgtgcttttacagtggcagtttagcacagcgaatgtccctgccccacactccatatggtcctgttttcctgaaaatacactccaggtagcacagacttgttattttgcctggctggttacacacatgctgtcttgctttgctgctcagccacctccctctgaggccaacttaggccaacctacataggactccatctttagcgagacaccagagacacctagtgatgaccacgggtctgcttttctctctgatcctaggggacttgttgacatgggagtgtctgtttccacatggaaggatgtctgtttatctctcatctctgaatagatgtatgacaactctagtgtccatggtttaaaatgttgctttgaggattttccatcctgtataagaagaatggctttcttcagattataatcgttattaaagctgtatgtacactttacttaaaaactattaacagtttttcatgttgcactggtggtaattttgaacttggaattactgggtgggaattccaggaaccacagagtattgatttttgctgccaaaatgctcttgaagcagatgtccctgtgctcccctggctgcttctggctgaaggggggaggtgtagactgaagcttgggcactcatgtgtgtcccctccccagtccccatcctagtggggccagtctcattaggcagccatagataagcctggaacttggctgtcattagtgacttgatcctggtatgaaatgcatactgggtataaggttgctcaggtattttatttccttggccacaactcccatagatgccaatgttttgatagcctcagtttctcaacgatgtcttttgtttacagtgctacacttagtgtgagtcaagaagtgcttgagttacaagaaacttcttattcaggtttgagtaagcattttacttccatgtgtacttttaaataatccataccttgaagaagttggccaatgatattatatacatgctgatctgattgttcttttcattccttgagtcaacttcagggtcttggatactaaagagaaggagaactgtggttaatgttttggatcatcatttgtgaacaaggccagactttgcccattttaggctatccaggacttaaggtagccatctggatcataagaaggtcctgcagttgagacaaaatgacccaagtgtattttccacaagttttgatcctgtgtaatatttctttttccttccctagtgtatgtagatacaaggcatggaatgcagttccactttctccccagagttgatctttttgtgattgctttcccgtctctagtagtattctgttgtgtctagagaactgattttttcctacatacgcaaattgtacatttgtaagtgaaaatgtcaatacattaaagcattaacct

SEQ ID NO: 91 - protein, 222 aa, Homo Sapiens
MAFVKSGWLLRQSTILKRWKKNWFDLWSDGHLIYYDDQTRQNIEDKVHMPMDCINIRTGQECRDTQPPDGKSKDCMLQIVCRDGKTISLCAESTDDCLAWKFTLQDSRTNTAYVGSAVMTDETSVVSSPPPYTAYAAPAPEQAYGYGPYGGAYPPGTQVVYAANGQAYAVPYQYPYAGLYGQQPANQVIIRERYRDNDSDLALGMLAGAATGMALGSLFWVF

SEQ ID NO: 92 - DNA, 3825 bp, Homo Sapiens
acgccggacgtgcggcagttgcaggcgagcaggcgaggaatcgccgtggcgtcttggtgttctccacgctggttcgcaggtgaagagatggcgtttgtgaagagtggctggttgctgcgacagagtactattttgaagcgctggaagaagaactggtttgatctgtggtcggatggtcacctgatctattatgatgaccagactcggcagaatatcgaggataaggtccacatgccaatggactgcatcaacatccgcacggggcaggaatgtcgggatactcagcccccggatggaaagtcaaaagactgcatgctccagattgtttgtcgagatgggaaaacaattagtctttgtgcagaaagcacagatgattgcttggcctggaaatttacactccaagattctaggacaaacacagcgtatgtgggctctgcagtcatgaccgatgagacatccgtggtttcctcacctccaccatacacggcctatgctgcaccggcccctgaggcttatggctatgggccatacggtggtgcgtacccgccaggaactcaagttgtctacgctgcgaatgggcaggcgtatgccgtgccctaccagtacccatatgcaggactttatggacagcagcctgctaaccaagtcatcattcgagagcgctatcgagacaacgacagcgacctggcactgggcatgctggcaggagcagccacgggcatggccttagggtctctattttgggtcttctaggggcctcaaggtcttgatgtgcatagcttctgataaccctgtgtgcaataatatgatttgcagggcatttctgtttgtgacaaaagtttttaataatagttttaatcattcctttgaaagtagtgatgtcataattgtactaatccacataagtaccacagagaagggtttgaactgtgctattttgttcaaatgttgactctccgggggcactggctcattccaagactgttcttgtgcaactctcagaataccttatttgagcatacctgttttgaaaggcattttctttttagagttaggtgtagtgcttaagggttaatttattttcatgttatgccagtaatatagtgttgtatgcctattgagtgattgtggcaagaaaagctacagcttctttgcgtttaactttttcaaaccacagaccagaactggttgcatgttactttaggagttgtgggttggtaagctcccaggtacttcccgaggctatggtgtgagagcccccgtcctgccctctggggctccacaggcccctggcaaggccgatggctcaggatgatggggcacagcccgcctttgaacaatcatgcttcagaaatctgcctgaccctagctgctgctgctgctcactttattcttgtatggctttggtaggcatacttggagaacatatcccacattaggaattgatttaagcctgagagtttgagggctttaatcctttaaaacttggagaagctggctgggcgcggtggctcacgcctgtaatcccagcactttgagagaccgaggcgggcggatcacgaggtcaggagatcgagaccatcctggctaacacggtgaaaccccatctctactaaaaatacaaaaaattagctgggcgtggtggcaggcgcctgtggtcccagctactcgggaggctgaggcaggagaatagtgtgaacccaggaggcggagcttgcagtgagccaagatagtgccactgcacttcagcctgggtgacagagtgagactctgtctcaaaaaaaaaaaaaaaatcctggagaagccagaacaatatacaaacaagtatgtggaggcagatttgctttattccaagaggctgtttgagtgtgtgtctgcctaagcctccttatagcctatttttctacttgctgagagagtaatattaaaggaacagtgagggagtggaaggagagccttagttagagcgttcccatttctggcctttgggggtttgcactgtgcgggagatgctctctcatcactctgaaggcccatcctgtgcagaagtgggactctgtggctgttcactgagcaccagggcagactgtagctgagcagacttgggttatggatgggatatggggcccagggaccctcaggacacagggaccggctcaaggtaccactcagcctggccaggacccccagctttgcttttgttcttgatctctttgtgatagagaagcttagaacattgaatttggaaccccaaaatgtgtgagtctttggaaaacccattccagcctttcttcaaatgctcttattttcagtatatgaagtgtgtatttgaaatattcatatttctgttatttcttgttttcaagctctgaattattgcagttttctgtcctgcatgctttcaacagtgtgcttttacagtggcagtttagcacagcgaatgtccctgccccacactccatatggtcctgttttcctgaaaatacactccaggtagcacagacttgttattttgcctggctggttacacacatgctgtcttgctttgctgctcagccacctccctctgaggccaacttaggccaacctacataggactccatctttagcgagacaccagagacacctagtgatgaccacgggtctgcttttctctctgatcctaggggacttgttgacatgggagtgtctgtttccacatggaaggatgtctgtttatctctcatctctgaatagatgtatgacaactctagtgtccatggtttaaaatgttgctttgaggattttccatcctgtataagaagaatggctttcttcagattataatcgttattaaagctgtatgtacactttacttaaaaactattaacagtttttcatgttgcactggtggtaattttgaacttggaattactgggtgggaattccaggaaccacagagtattgatttttgctgccaaaatgctcttgaagcagatgtccctgtgctcccctggctgcttctggctgaaggggggaggtgtagactgaagcttgggcactcatgtgtgtcccctccccagtccccatcctagtggggccagtctcattaggcagccatagataagcctggaacttggctgtcattagtgacttgatcctggtatgaaatgcatactgggtataaggttgctcaggtattttatttccttggccacaactcccatagatgccaatgttttgatagcctcagtttctcaacgatgtcttttgtttacagtgctacacttagtgtgagtcaagaagtgcttgagttacaagaaacttcttattcaggtttgagtaagcattttacttccatgtgtacttttaaataatccataccttgaagaagttggccaatgatattatatacatgctgatctgattgttcttttcattccttgagtcaacttcagggtcttggatactaaagagaaggagaactgtggttaatgttttggatcatcatttgtgaacaaggccagactttgcccattttaggctatccaggacttaaggtagccatctggatcataagaaggtcctgcagttgagacaaaatgacccaagtgtattttccacaagttttgatcctgtgtaatatttctttttccttccctagtgtatgtagatacaaggcatggaatgcagttccactttctccccagagttgatctttttgtgattgctttcccgtctctagtagtattctgttgtgtctagagaactgattttttcctacatacgcaaattgtacatttgtaagtgaaaatgtcaatacattaaagcattaaccttaaagca

SEQ ID NO: 93 - protein, 221 aa, Homo Sapiens
MAFVKSGWLLRQSTILKRWKKNWFDLWSDGHLIYYDDQTRQNIEDKVHMPMDCINIRTGQECRDTQPPDGKSKDCMLQIVCRDGKTISLCAESTDDCLAWKFTLQDSRTNTAYVGSAVMTDETSVVSSPPPYTAYAAPAPEAYGYGPYGGAYPPGTQVVYAANGQAYAVPYQYPYAGLYGQQPANQVIIRERYRDNDSDLALGMLAGAATGMALGSLFWVF

SEQ ID NO: 94 - DNA, 45950 bp, Mus Musculus
  misc_feature (1)...(45950): n = A,T,C or G
atgaagacatgcatttctggtgtccctcactgcaggaggtcaaagaggtgttcagcagcctgggagcctacaaccccgccctgtacccacaggggcccttccagcacagcgcaaggtgtgtacctcccctcctcgttgctcccttctctctagacagtgcctctagcctacaaggtaggaactactgcacaagtacacatgcctactcagagtacaagcatgaccagagcccagagctcaggtacctagacaaccagtgtcccctgccccctcccactggtggaccccagacttctcagcttagtcagtacctccctcagccgacttcagtctctattcaagtctgtttgaccactgcttatagcagttcctggccagccaagcacagctttctgtcatcttgggctgggaaggggtgtatgagtgtgggtgttttaagacaggggctcatacctctcagacagacctcagactcactgtgtagtgcaggagattaaacccaggacttcctgaatgctagctagccaagcactgtaccacctgatctatgtcccagaccattgtttattaagagagaatcttgctatatagccctagctgacctagagtttactatgtatacaatgctacccttgaactcaaggttacaggttcacaccagtgtctctgacttaaaatggaaaatatccttgaataccctttagacccaggaaacaaaggcaggcagatctttgtgagttcaaggccagcttgatcctcatgaggaggtccagactaaacagagctacacagtaagactctgtctcaaaaataccatttgtatctataataaactttcttgtacaagacgaaagaagaaaaaagaaggagaaagagagagagagagagagagagagacagagagacagagacagagagacagagagacagagagaaagagagagagagagagagagagagggagaggaaaaccaagggcatcaagccagctagaaaaactaccagctgagccatgctctgtgcaccaagcactgtcttgcatatagggaccactcagcactgggcttggacatggtggacaggggtgctaactatgtgagcacttccctgccctctagggacagagccacacaaagcataagaggttgttgtcactgaatgaagaggacagaggctgtgatgtgttgtgcatcacatggttcccaaccacagcacatcccaacctccttgaaaactcagagacatcccccaccctgcatccggcagcagtctctccacccaggcagagctgggaccctttctttagctgccggatgttcctctgcagggaaagcagagctttcttaagaacctgttccacgactgtgtttagtaattgtctgccaaacccagccacacttggctctgctataaataccctacacatgtgccagcccgccacgctcctgcccctctcccttctggagtgcaacgctccataccgggtgtaataaggctcttgctgccttctaacacaacctgctatgtctgggatgagtggagagaattggaattactcagaaaagaaaagcagagacaagggcctggtgtggagggatggagtgagacagtgacacacagggcactcctgggaggggggtcagaaataggcgaagactttcccttcaggaggagactgtcctaggaagcctctggactgtggcctttcaaacatgtctccagggttccatgtacaaaccttagcatatggacttcaacttgaccaggtacagtgaagccctgaattggaagaggagacttgctatgctgcacagtgtcactcctagacatgccttttgacgcctcctttacatgggtcctggacattggcataactgctaagactttcgctcagaggagaattcagagtcgtcctggaggccccatcaatgatcacaagggcatttttctagctcgtggcttgtaagagccaaccgtgaaccatctgccaaacccttgagactagtgaagtttttctgcctgcattcattcttcctgcatctttcctggagcaggtgggtggtgaagatgttcagggctcttccttgggtttctgtgacgtttgatggttgagaacactatggatttcatcgtgtagctgtaagaccaccccctgataagtattcatgaaatgtcctgatagttccagcattccttcaccgagggcacagcaacatcttgagaaatagacaagagaaatgatagattaggccagctttgtcccatggtcttgtttgtccttattattgtccagtcttagatactggcattgtgccatttgttcgccatagtttggtttgcttgttttttgttgttgtttttgttttttgagacagggtttctctgtgtagctctgtgtgtcctggaactcacttcatagaccaggctgaccttgacctcacaaagatccacctgcctctgcctcccaagtgctaggattaaagacgtgcaccaccattgttcagtgctgctaggtatttctcatctctattggcttctgggcatgtccctaccaaggactccctctgagccacctgtggtggcacccctagagtctaataacagctcagggtagaagtaaggactgaatttcctctgcacagagccacacaactggcagtttctctagttactgtgagaaactgtctttcactatttggtcctaagctcagatgtctgccaccatctctcctctgaaatgtgcatcacggttttctagcagggctgggagatggctcagtttgtaaagtgtttgctgtgaatcctagaacccatggaaaagcaagacacagctctgcaggggtggagatagaggatgctggagcttgctggccagccagtctaaccaacactatgagctccaggttcagtgagagaccctgcctcataaagtaaggtgcagctggagaggcagctcagtggctaaaagctgaataaagctgagctaaggttaggaccaggaagcaaggtgaaaaatgacaaaagggaggcatggaccatctccagatacagtcacagatgcatgcatgtatacacacatgcatacatacgcgcgcgcacacacacacacttagacccctgcaggcatgggtacacaactctgacacatacaaaggcttcctctcagaaaggcacagcccttcaacaactgcaccatggcaatcatctgaggtccagaaaagcagcaggattgggggcaggaggatttggggaacggaaggacagaggaggagccagtgtgtgagcacagaagacaggagaggagcatcagcattcttgcatggtttaggcccacactgctgcacagctgggctttgtctgtcccccagcaatagcagcaaggtccttaggtagttgtgacagtcctctagtgctgcttcctgattacaaagctgtcagttggctttcacaaaacaacctaagggaagagggacatttcttttcgcttaccatttcagagggatctgtccggggtcagctggcttcattgcttctagtggcgaggcagagggcctggtggaggacatctgctcagctggtggtggggacactccttgaaatgacactccttgtgaccacatcctgcagccgcctctcatctcctaacaacctactgagctagaaacgcacctgtccatgacattagctctctaacgggaacaagggccagctaatgggcttgcctagatacatggatctgacctttaggagagttccactactgtcttctggaagcaggggtcagagtccgcttggctctcagacagggcctttcttgcagaggccagcaggttagtgaatgactgcatactggaagaacaccctgccaacactggggcagtaggtagctgccctatggggcaattggatccgggtgtaatttgtatgcatacacgcagcctcttgggttcagtaaggactgttcttcattcaaggagaaaccacgtccagttcctacagacttcagcaggctcactgcttaatgccagatggctctggacagtggcagtgcttgtgtgtgtgccaccctccctcctcgagggtcacagtgctgtgcagatgctggctttcatgtgattctctttcctcctctcacttcctttggtttgtttggggttttgatgcaaggtctcatgtcacccagaccgacctcaaatgcactatgtagcagaggctggcccttgaacccctgctcctatctctacttctacctcctaagtcctgggatgatagacataaacctcaatattcagctttttcctgtcttttaacccctccagtacagttaaatgttgatgtgtaggaagaggtcagttgatgtgctcctgtaagttcgctttatgagtttaaaacaatgcagctgagacttaaataaagtccaagtccttaaggcaggccatgagccctcagcagcagctgaggaaggagttcactcctaacctgctgagttcaggctggaagaatggattctgaacttttgctgaatttttgctgttctgtggcctcttgttagctagtgcttcgtctagaaccgcagtcacagatgtggcggggtgctgtagcatctgcctagcaatcctgaggtcctgagttcattacccaacactaccgaggacataaataaatcacgctttcaatagcagtcatagatgccagcagtgagtacaggaccccatggtgttgctgcccagaaagagaagggctgggaaacatccggcactcaaaagggaggatactggagaagaaaaagcttagaaaaagctctacttgagaaggccggcgtcccttcccaaggcgtatgggtctgtcgcagccacacttcccttcctcagacagttctaaaaaggcatgtcgccagctcacacttgcttttccctcctccctttggcagcagcacactgtctgaaagcctgtttctctgtaacagcccatggctgccccactctttgtgaacgtctgaaaacacgcccaacccatgcttgagccaggtgcctgctctcaggctggtactgactaagacacccacgcacgtattggcacaaacccagcatgcacccagatgtgcaaactcctacctcacccactctctgatcctaataaatgctaaactccagaagaaaggctgagcccagccccagcttccccaacaacaactttggtgtgttggccccagttcctcagcagtgtagaagacagatctctttcccatctgtggaacaccaaggccaagaagtgaagaaaggggagactttcccttgaagctgcagtaggtgctgccctgccggtgccctgccagagcatctgtgctagtgtggttatcactgttctcctcagcatgtgcagctagctagggtgcactgctttcagggactccaagcaggttcctcagtgtggagaggacaggatgggcctccgaggcagctcacttggcatagcccttgcctagcaagcatggagctctagggttgatccccagcaccatataaactggacatggtagcagacacttataatcccagcactcagaagacggggtcagaagatcaagaccattctccactacataatgagtttgagactaacttagaatagctgagaccctgtctccaaaaaaactgtggagaagtgaatgagacagcagagggaagctttgcataaaacctacttaactgacccaaagtggctaatgtacatttggtctgaaagagaataatattgtgaactaagaaactttgggggtgctgggtggtggtggcgcacgcctttaatcccagcactcgggaggcagaggcaggcagatttctgagttcgaggccagcctggtctacaaagtgagttccaggacagccagggctatacagagaaaccctgtctcgaaaaacaaacaaacaaaaaaaaacaacaacaacaaaaaaagaaactttgggggctgcccactcaggacagccatgccaggagcagctccaggctggctgtgtttgactctggtctttagggaggggatttcttcacccattccccagtcaccaatctgccccatctggagggactggccacacggggcctgtccatacacgacttgttagatacaacctaacagcctttggtaggggtgtgcagctttgtctggcttctgtctcacttgctgaatgttgccacgtggttctttttttttttttggggggggtctcttttcagtttattgcatgaaggagttacactagtccaagttaaaagcggaccccaaatgattacattatacaagctgtgaggtttttaaacttgtgacaagggacagaagggaaattctactcattgaaaggaaatcctcgcttaagcttcagagagccacaagcacttaaaacccacgagccttcagctgatcgtccttaggcagcccagtctctatcaggagctggcatatgttcttgcgctggtcaccctgtagctgaattacttctccatattctggatgctcaattacagtaccattgcaggcaaatttcttcttaaatgcctttactagtttctttttattgtaatcatcagcgatcccttggacagttgttgtaagggtcttcctgccgcttctctgttgaattcttatatggatataatcctcagtgccaccaggaagcaggtcaccacccttacttgcatcagcaaaggggtcgaaagagtggaggttctggatagcggacatacgatacgattccttttcttaccatcattgaacaggcaaaagagatggcttctgtggaaggacgaccatcagagagatgagaggtagggtttcctgctttcgaggtcccaggatgctgaagctggagagctcctctgaatgttgagcaagaggaactcagtgaccaccccctcagtgcagtgcatactctccccacacccaggtgggctacaggggtaggaacaataggggtgtggtgtccagctcaggtctgaaaagccacagcagtcatgggggtacttccctcctactctgggaaaggtactcctgtcaccatatggaagagtcccatgtggcagggactcaggaccctcccaatccatggttgtattgttgagctgagagacaggtccctagcttagtcaagcctgatatgaaggtagccccacccagccttgaagaccactgtagaactaccccctaactgactgtttctggacccttgactctcagaatctcagtggcatacttttgttgtaatttttgttgttgttgttttaagacagggtttctttgtatagtcctggatgtcctggaactcactacatagactaggctggcctcaaactcttcctgcttccgcctcctgagtgctagaattaatgacatgcacccaccagtatctggctataataaaagtttttaagcctctccttgtggaaggtctgtcctagcagatgatgaggggaccctagacaagcaggtcctctgtgcactctctgtttctctggctctgcttttctttctccttaagcacctcctaccaccttaagcacttgcatataatgatattgtttctgtcttatgtcagggtgcttgagagtgaggccagcctggattcacaggatcctccccaggaagtggccttggacattaagttgaactacatctacaaggtgagccaagctttcctttcccaactcaccccaaacgacttactcagtggtttaggtgggtagcttcaccaggcacccacagtgagccaactcaaccccagtgcaggctcagtggtggccttggtacccgtgctacagaaagcctgaagtccacctatgactgccagtatggctaaagtggttcacagaacaggtggcctgctggtctctagagtccccaccccagcccttccctcagctccatgccccctcccacccctgcttctttgtcttgccctccagttcctgaccctgtgtctcctagtccggccagcgtcctacacggatgccagcatcttggatctgatggagctgctgtgccgcgcaggcctggatgtagggttgtgcctgctgcccaagactgacctccagcaactcctgctcctgctgctggagagaatccaagagtggcctggaaaggtacacagcctgggctctgcccctgggaactcccttgcccctggagcaccctaggtggggagagcatcacttacagcttctgcaggggtccctggccctcatgaagggacctttgctcccctaagttagcagggcagaggtgacggcagcttcctccagcagcttactgggtgcctctgccctacagctccagcccctttgctgtgccctgagctgggtgtccgaccaccaccacaacctgctggccctcgtgcagttcttcctggatgtgacgcctcggggcaggtgggtgcttctcaaccacatcccacgggatctttcaaggatctagaatcttccataccaaccccaacaaacaaactgtctgcctggtttctaaagtctcagaggaagaactaaaaatacaattcactaatgagttctttacaaatgaaaaaaaaaaaaaaaacgcctaattttcttaacatgatcttattagtaaaacactgtcttatgcaattagcttctgccggcagtgcctgcctgcccgcctttctttggggctcccccaccttaggtttctgggttcttcttgtcactccttccctctcttccaccacccactcctgctcctagtccatcaccgtttattttctgcgcagcttttttctgccataaattatcttactatttatttccctatttggactcactctccccacctagtcacttccagagcaggtgccttgtcaggatcactgccatagcgccccacatctcagcccccgcctggcgggccagtggtgttttgtaaaattcttgtggaatgatgaagtgaacaacagacagcccagaagataagagctgttggctggactctcctggccttgtctctcctcatctccacctttgttctcctgctcctcactcacagccacaggggagggccctacctgggcccttggtccctcccttcccaccccggtcctgaacaggcacatgacagtagtggtccatgggtattcccctgtgacttcccaagagacctcaccccaggcccatatgagcaaacatactctactgacttggtggctcagccatcaccctgctggtttcagcttccggctcttccctaggaagctgctcaatccacaccccagtgttcgcctgtccaagcagcccacaccctggggatttctttccattttatttgaaccgactgagcctgtcccccatctgctgtccctcacagcacatccactccagggagcaagctggaatcaagcttctccacctcctactcttcacccctaaacctgggcatgttgacttcagaaccctaagtccctggtttttggttgcatctttgtgtcagctccatgatggccattgtgttgactgggtcttttcttattattatttatatgagtacactgtagctgtcttcagacacaacagaagagggcatcagatctcattacagatggttgtgagccaccatgtggttgctgggaattgaactcaggaccactggaagagcagtcagtgctcttaaccattgagccatctctccagccttggctgggtcattttaaagcaatcactatccccaccccatcccagaggcacccttgtctgttcctttcagcctttagatacttactgacaccagcaaaaaacaagtagacagattgctaatactagaacttaagagagtaccccctagcactcgagagtcatcttcaatatgatgaatagaaaatgtcatcctctgtttttaaccctcacctctccctttgtcagcgaggtggagcagcttactgcctctattggctgcttgtggttccctcactgggattaccttctggtatcccttactggcttcctgcctatcaggtcatttatcttcttcactacactgattttcacttcttgtttttgttgttgttgttctttttttttttttttcaagacagggtttctctgcatagtcctggctgtcctggaactcactctgtagaccaggctggcctcgaactcagaaatctgcctgcctctgcctcccgagtgctgggattaaaggctttcaccaccacgcctggctgattttcacttcttatatttgttgcaaacagtatattttcttctaaggttgtaaattatcctcttttaaatttagtttttctgggcagtagtggcctacacctttaatctcagcactcatggggtaaaggcaggctaatctctgtgagatcaaggccagcctggtctacagagtgggttccaggcaaccagggttacacagagaaaccctgtctcgggaaaaaaaaaagagttcaaggcagcctgaggtacagggtgagaatgtctaaaacaatggtcatgaataatatttaaagtcatatattttttaatccatcacttcctgatacactttacagtcatatttcaaaagcatagctgtgctcattcctctagccatgttttaggcagatttgggtacttggtgtctttgtagctcctaggcctataacaagtacttcttgaatgacagggagtaaaatggagcatccctcccctttatttcagacagatgtgtccacagaatgccttaggccacaagtttgctgggaagagggttcctcatcagagtgttatttattgagattagctggccagtggtgacagactcctataattccagctttctagaagtcaaggccggaagacctagagttcaaggtgagcctagctgacttattgagatcttgccaaaaataaataaataaataaataaataaataaataaataaaaaagaaagaaagcaggcaaggtggcctctaatctgagcacttgaaagcctgaggcagaggattgctgaattgcaaaggcaccaaagagctacaaagtgaattccaggcaatctaaactataaggtaagactttgtcttgaaagagaaaagaagggatggaagaggtgggaaggaaggggaggggagtggagtggagagggaggagaggtgaggcagaaggaaaagtgaaatgaaatgaaaagtcaggtgtggctgcatacaacacctgtatcccaggcactggaagggggtgggcaaagacagaaacaggagagtcccactgactgactgcccagtcagcctggctagccaaaccatcaagctgcaaattcagtcagactgtcctgttaggttcctgtcaacttgattcgggctacagtcatctaggaggaggaacctcaactgagaaaatgctcctgtagccaactctgtggaacattttcttaattcatgattgatgtggataggcccagtccacggtaggcagtgccatccctggacaggtggtcctggatgacatgagaaagcttaggcacgctctggatagcaagccagtgcaagcagtggtctctgagtcactcctgcctctgggtcctgcctggactcctacatacatgcatacacacaataatagtaatttttaaaagaagaaactttgtggtgcatgcctttaatcccagcacttgggaggcagaggcaggcagatttctgagttcggggccagcctggtctacagactgagttccaggacagccagggctatacagagaaaccctgtcttgaaaaaacaaaagaaggaggaggaggaggaggaagaggagagagagagagagagagagagagagagagaaacaaaggacagaaggaagaaagaaaggaaggaaggaaggaaagaaagaggaaaggaaaggaaaggaagaaagaaaaaaaaggaaagcaagaaagaaaaagaaaggaaggaaaggaagaaaagaaagaaaggaaaggaagaaagaaagaagcaaggaatgggtagagagctgtaacacgcccttccctgcccccacctgctgtctcattcttaagcctggtgagtggaagctccctgcagggtctttccgcctcaggcctgcaaactagctcaggaaaagccagctccagttctttttcacatcctgctgtgggtctttctttagagctgcagcaatggtggtaatggaggcgcttgctgaatgcctggctctgcccttgctggtgactgctccactgggctcagtgcccagactgaccccaggaagaacaacagtgcagaagctgtcacactctggatctaattgattggttaagtacaaagcaagaactccctcccatgtccacgcccacagattcgaactgtgcagtcagcacccctgccttgatcaggatttcaggccaagtgcccaacttaagcataaaaatgaaaacaaattgtaaagcaagccacctgaagtgggaccaatggcaagcaggggttctcaaagggaaatcaaagggaaagtgaccccacttgataagccgtagggcacttggaaataacagttactggtctgcgttctgctagggcagtggttctcaaccttcctaacactctgacccccaaccagaaatgatttccttgctacttcataattgtaattttgttactgttacggatcataatgtaagtatttttggagatagaagtttgctaaagggattgaaaaccactgtgctaggggctgagctgccccctgctgccaccggaaggagccccatcccatcgggaagaagggctatgggctgtgcttgcttcactgagtgctcttgttcccaggctccaaggacctgcctccttcaccatctgtgactgtttattaaacatcctagcatgctgctgcactgtggccttcagaggagacacacttagcctgtgtgcatgaaggcttactagcacatgtcacaagagcagcagtgacccagagttctttgcctggcagaccagcacagagctgaaagaaccatcttgcttgtgttgacaagaggtgaggagacaggccagctcccagcttcccggtgtgcacacgcactccacgcctccttgggaaggccgtgtgacaggatcagatagactttaaaagtgcagctttggcttggggagatgctcagtagttatgagctcagtcagccactcgcgcagaagccagaacccacatcacagccacctgtaactccaactccaggaacatctgttaacgctgagctctggcactgtacacaaacccacacacagacaaacacacatactcatagtaatataaataaagtataaataaatagacatgcagacttggctggacatggtgttacaagcctttaatcccagcactcaggaggcagtgacaggtagatctcaagtttgaggcaacctggtctacatagcaagtaccagaccagccaaggctacatggtaagatcctgtctcaacaaaaatacaaagagaagtatgacagaagagtctgaggctacggtgcagtaggtagaatgcttgccttctatggacaagtctggggttccatcccagagctggctgagggtggggtgtaggtagaagaaagggtactgaagtgacactagctgatgaaaataggccacagtgctagaaagctttttgcaaactgagagctgcagaaccagtcatataatcccagcatttgggaggttgacataggaccatcagaaggtcaaggccatgtgggcttcatgagactctagactgggtgtggtgtcacacagctgtgattatagcacttggaaagtgcagttgaaggactgggagtacctggctagcctttgctgcctgagtctgaagcaaacctgggctacatgagaccttgccttaaacaaatgagcaagcaaacaacaatagcaacaacaaatgtgtgtgtaattgttcaaccctgttgggggacggatctcagggcactgaggtgagcacaagtgtctttgccctttgggttcatctcttccggattccttccagttttgccttttctcccatagtcgtgtttacagcatcacttattccatgagctttttgtttatttgtttgtttgtttctctgtgtagccctggctgtcatggaactcactctgtagaccaggctggtctcaaaatcagaaatccacctgcttctgcctcccaagtgctgggattaaaggtgtgtgctaccaccgcctggcttccatgagttttgtttgtttgtttgtttgttttcgagacagggtttctctgtgtagccctggctgttctggaactcactctgtagaccaggctggccttgaactcagaaattcgcctgcctctgcctccaaagtgctgggattaaagacgtgcgccaccacacccggctccgtgagtttttatctgctcattttattcacactttgcacacacgtgtgcacatgtaccacagtaaacacgtggaggccagagggatcctcctcttatgcttgcagcctctggggatctaactcaggtcatcagcctggtggtggtgcctttacccattgagacccactgagccgtctccttggcctgagcctaagattatttgggaaagttcagataagtccagaagtagagagccctctgtggccactgtggatcctgctggcactcccctcaccccaggtcaccccaagacttcttgtcgttttatttcatatggtatttctgaaagatagggcccctgtgaggcatgtatgtatgtatgtatgtatgtgtatatgtatatacttttagtgtgaaccacggcatcatgaatacacctaaatttttgacaaaggaattgccacagcagatgagtatagtccagaaccttccaaagacaagctttgtcttcaaagtctatagagttttaggctaagcatgggtgacattctttttaattctaggacttggaaggcagaggaaggtggatctctatgagttctaggctagcctggtctacagagtaagctccagagtagctagccagggctccacggagaaaccctgtattgaaacaaagagttagatggaaacttaaccaattggatgctcctgaggagggaaccctggggagagcagccctggctaggcttttgaaccaagtccttgcctggatcacagttgcccattgtttgttggcccagtgaattccaagcctctcccccagtgccctctcagcatccttttattttgaagtggccaatcaaggaagttcaatctccttgatccctccacaaggagttagctgaagacagcagcctgggaggaagggatttcacaatgagcaggtgtgcacggggaacaaagcagagacaaggtaggtgcagaggggcnnnnnnnnnnnnnnnnnnnnnnnnnnnnnnnnnnnnnnnnnnnnnnnnnnnnnnnnnnnnnnnnnnnnnnnnnnnnnnnnnnnnnnnnnnnnnnctggctgtgctcctgcagtgtctgcagtgggaccagagggcccacatttgcttctttcagctccacacaacactcaggttctagctcaggtactgcacctcttgccactgttcaatgcctccttgcgtccactttagacttacctgccctgaaacggggtggccttgtgaactggagccttgaccccttcaggctcccactctgtgggctgctagccagccttttccaggccctcggcaatcccaacaccacgaacaagcgctgttgaagtgtcccactgccagcaaacggcagtgtctctccactcctgcccccacaatgccacttccttcccactagacccctagttccatatcttgacagttctttcctggataaggctgcactccagtaccctgcagttcttcctggagacccagtccagtctgactgtggctgtcttttttcaagatgatccatccttctttctataggagtgtgaccttcccttccaaacactgtcagttccctctactgaaaatctgttcaggatgggagtggaggcgctagagagatggcacaaaagttaagagcactggctgctcttgcacagggcctaggcttggtgtcccagcacccacacagctttttttctagtatcagcaccagaggtcttctgatccgttggagaactaagcacacatgtgggcacatacattaaatgtaggttcaacactctcatacagaaaataaagaatttttaaaaaaattcttacccttggtataactttcaagcagcccagctagtgttgtggggccttttgctttactctttcataccacctctctcaaacttgtacctgtgctccgccattcctgtcccctgccattcctgtcccccatcccctgtggatgccctcatatctgccacatcctaaaactgtgcagccatctgaacttatactgagtgtctgcttctggtttcctggagaggcttcattcccctatcttcacctgattgactaggctcaggctgatgtgccttgcaccaagtacccccactccaccccaccccatccccacccaaggggttaagggttagttggctttgctgagccttgaactagaagaatgagaaggaccacaggtggtttgctctctgaggctgggtgagaatgccttttgagtctagatgggcatcacaaagcacacagaagcagattctaaggcaaggtggctgtggcagctgggaggtcagctctgaactttgtgcagatacagcagggagggtagcatgtgtgtgtgtggggggggggtggtggcagtgtagctcactacaggccctggaccctggatttcagtgttgctccctcatgaccttaggtttgaaagataaggaactggaaagcagagcacaaagcaaagcaagcagcctgggtgggagacaggactgccagggaatgtgtggccctcagagggctgcacctgcacctctgtctttgaagtaaggggtgctatttaggggctggttgtgaaatttcaaaacttcatccttcctgtttcacttctgtcatctttgtggcaagagaaatggttttatctatggaatcagaagtggttggaggggctgaagtctcagagtggaagtgatatatgacagctctggcagtgtggagtgagggtcagctcctctgcttgctctcctcgacacacacgcacacatgcacacatgcacacccaccactgtactggaagatgtgtaggtgagacactctgacccttcactgggaggttgtgggaggcaaagccccttgacatcactccgggggatgatgggtcagcatgtgcttacaaaagaagtcctagaataagactagtgcgtgggcaggcaggtgggtgctgagagggcgctgtggagagccctgcaggattggataaagctgtcatcacaccctagggacatcatggaagctgatgtattcacctgcagggcagcattctgtgaccacctagttcacatttggagtaaaaccaatgtctcatatgaggcgattagtgaacaatggtcatattcataggcaacgtggatctaaccgacagcaaattgaggctcccagaagacctcagccaactgtaatgatgggctgagtcggaaagagaggccctgctgcacagttaagaacagagtctgagaaatcggctttgtcaggaagacaagtgaaaaaaggcaaaagacttggattcaatctgttaactgctttgagccccacggttgccaagaaaatgagcatcagtctccagccctgtgagcagagtggctcgcctgacagcgaacatggacaacccagggtctttcaaggacagacgcaaaggaaaatgatcaaaaagatggaaaagtaaggctgccctggggcctgcagtagacagagccacctgctgatcacagcaaatgcggtcaagggtgcgaacagccctgcccacaggctgactcctggagcacagaccccacaagcctgctcagaaccacacaagggccgattttggcaaactataggaagaactaactccctttgtttacccagcaaatggactggaccagcttgtcaggcagatgttgcacttctgtgacggaaataaacacttggggaaagggccagggactttcagtgagcactgacgcagtgtgtgagcagtagactaggtgtccatagcctgggggtgccatgtcaggtggccagtcagggactcagagaggatcttgagtttgccatctgtatacttaacctctggacaaaatgtcacctggtctccagaaactcccctaggcctcttccagtcatcccttctgcaagggatcaccactttcctggtaatgctccaccttactgattggtttgcctgtgtctgagcactgctagagatgagcccatgcagcaggtcctggcaggctggtgaggctggctccctgtgctcacacacatcttggggacaccaggacagctccctggtgacatgagtaattgtttcctcatcctgctttgtggccatccattgcctgggttaaaggtcactgtaaccccctcttccaggccgcatggtgcatgctgcctcttccttctccaagcccatgggattgtatgagcacacctggacaaccgggctgcatgggggccctgtacttgcagatgcaggcagaatgggactgtgtggggaaagactccccaaaccgctaaccaggtttacagcctgattcttactgcccaaggagcactcactcacattggagatgactcccattaggggctgaggagccagtggggtgacaggtgtccatagctctggggatgtaggccatacagcaaggtgtcaggcagcatttccacagaggaacaggcggaggcggctgcatcctgggctgtcctggacacattggaaaacgcagctcacgcctttggccaaatgcctggtagccttttagggcagttcagtctcagcagggccttgttccctttggagggaatgaagacgggggaggggtgtgagtgctgtaccggcctgtgtgtctttgtcctaacttccagtggcacatatactaccttcctgggtgttcctgcagggtgcctggtcccttgtgagagctgcccagacagtgacagtctggaagccaagtacctgaatcctctggtttaggaaaaaatattgtttcataattttctagtgccttgggcacctctgtgtgctgatccagtgtcctggtcttatagaggcctcttggagtgggcgggacagagaccaagactggcctggcctggcctggtctggcctaagcactaagttggaacctattgccttatttgacatctgctgggagggctccagtggcctctgcatctttctgtgcttgcccagtgtgagttctggaaaagctttgccaggtggggctaggcaatttctgtggaaaaccagcctacagcctgggcagggccctccgcgctggactggtgcttggggctgggggggcggggcggggaggaggttccctcactgcttttccattgtaagttctccatctgtcaagttaaaaagtggccccctgtccttgtttctcagtgggactggggattcaggaaggagtgtcaggaggacagtgggcagcacacattgccagtgtagggagctctgctcatagatatgggctccttgtgtccacttaccctctccgtcacagttgcctgctggtgtgtgtgtgtgcgtgcgtgcgtacgcgtgcatgttttctagattgcagttctgacatgacaccaccaccaccaccacacataacacacacacacacacctcttcccttcaggatccactccccccagtacagttgtgaggcctgccagctctagccctctccctggctggcccctcccacactctgtgggccttggtgtgtgtgtgtgtggtgtgtgtgtgtgtgtgtggaggggggggggttaatgaagcccagatgcaggacttctgactctggcagggagggaggcagctgcttggaggaaccatttacctcccactgtgtctgggcctagctgcccctggatcccagatcctaggaacagctggaaaacaggtcctagctacaggcaggccagggtggaggatatgatgaagaggaagctggagctcaggcaggacctagaggaggggccgtggaagatcaggataggctcttagtgaccatcctatggctctgctccaatggaagctgcctgtcctcaatgcgatagttctcagcatccctgaggaaactctgggacaccccccaatgcttccacagaaggagggcaagactaaagccaggcagaattctggggggatagctagcttctccctcagttgccagataaaatacaaacacaacccagaagagcattcttttaagacaaagagactttgctaaacctgacatgcacaaatgccttctagctgaatctctttttagtatgatagctttattgaaccacagtgtacagatggacagacagacaggccattgagcatgtgactcggtagagttctcacaagtcaagcacatgtgaaactagcacccaaattggaagagaaagtgcacccggagcctgcccagggccacctgtccctgctgtgggagcgatgtaaatgcatcagctccttctgtagtcctgtctccctgcggcagagcgatggacatgtgggggtagcgtgtagacactgtccagtctgcttagtggggtgcttctgctatgagtacctctctcttgtgaacatgggagcaggactgcaaaatcaaggggtaggtgtatgtatgtcctcagtaaatgttttcagtgttccaaagagaccatgggccttgcttcctgtcagctatggagtaccccatagtcctccccccctcagaggggccatttctttcttccaccatagcccttcagatgtgtgccgaccccgcctgccgttcttcttttaaatgaagagcctcctgctttgttgattcttctgatttttctgttacttaagaaaaatcaacaaaacctgcagagctcaagccctagtcttatcgtgagctctctggcctccaggaagcttggaggaggtctgcctcagcactccctcactaaggcaagtgtggccctgggatacttgctcgggagctatccgtactctggtccccgtggtgtcccttcagcagctgctgctactctaagaggccagtctcttttccagcaggctttaacacagacccttctttgctgtccttcctccgttcatcttactccctggcatggccaagacagtagtgtctggctcccattttgagtgggctacttagcactgtgtggtggcagaagtcactccagaagagaataagaatgaaattctgtggcatggcacctgccgggcacgtgtaaggccccaggtgccatccttgtcagaataaataattccattcacagggctgcctgcctgacgaccagtgtctggagatcctggaaggacacggtgccatctccccagcaaggctggctgattaattagagaatattggcttgagattttgccctgtcatctaggttcaagggtcccaggacaactctcagccacatcctctggttccttcatctcttagaccccaggatccaagtgttagcatctgaagccccactagggccttcactcccaaggagaagatggctcaggcctgagtaagcactgactaggcagtgccgcacggctggcctgggatatccagctcggctgagtgaagcaggaggcctgttcacaagcagctcaaggagcaaattgtctaggggctgggggcttcatctacaactggctctgggcattcctggggctctgtctctcttgttctccttgctggccctcctaaagtctgtcctgctgggagacaggaggacaaacagcactataaggtgaccaccttgtcacattcattagctgtccctcagagaggttatactcttttaactgtccaatgaagacccaaaagctacttcagggattgagtcactttgaggcccaggatgtaggaggaaaatcccaaaggaaagttctccaaaacagtaggtgtacacacacacacacacacacacacacacacatgcacaggcactcgcatgagcctggtctcaggaagccaatcacccaccctgctagaagtcctttgaaatctgagagtcagttcatgaggccggaccaagagaagagcaaagggattgttttccctccgatcacccttccctctctttgcgtgtttccctcctcagtgttagcccctctacagtttccttcaccgattattgctctgttcatggttcaggccccaggctctcctgtgggctgtgctctaccactgagcctcacctggttctgtctcttcatgtatgagtggtcattacgcagaggtaggaatgttggtccacttccgagtagaacttccacccatccagacccacaaatacatacagatctgaaggagttacagctccaaagaaaaatgtattaccctctctcaggtaacctgcctttcccatgctttccagaacatgcagaagcccccaggcctccagcccaccccactcagattccctcttcttctctcccaggcagctgagaagtcagctgagtcttgtgattattgcccggatgctgggccagcaggagtcacttcctttctcggcagagaaaacccaggtgagtctgcctcagcaggaccgggaagccgtctggtgggccacagcccctctccccattccccaccttcacctgaggtgtaatcagagagaccatccccagacctaagctggatttgaatgtcttactcaaattcacttgttcaaccgttcgtggagccaggggcatagtacagtggtagagcacttgcccggcatgtttgcggccctgggttctgttatctgcagatgaacttgtgtgtccaactactggggaggctgggacaggaagattatttgagcctaggagttaagggcccagcctacgcaaggttcatgtgatggctcacatctttaaccccagcacttcaattccagcactctaaaggtgatgattgtctgaacaacactgtgtcctaggcactggggactggtcagacttgtgagtttagacattgtgaattacagaaaacaaacataacgtgatgtcatttcagctttttttttctagtgttttgttttgtttagtgactgtctccccactccacctgcctcagcctccagagtgctggagttagactcagactacagtggtagtactgtcgttaatatttttatcctttgaatatttcatatatgcccacaatatattcaccctcctgctctttcttccaaggcctcctaggtccatccccattaacctcctaacttcatgtatagcccatatacacatgatgtgggaccatccactggggcaggcctcccatccaggggccatgcccttgaagaccactgacagggctggagagatggctggacagttaaaacacttgctgctcttacagaggaacagagctcagttcccagcacccaggaccttcccaaaccccagtccatgacccttttttttttttttttttttttttttggtttttcaagacaggatttctctgtgtagccatggttgtcctggaactcactttgtagaccaggctggcctcgaactcagaaatccgcctgcctctacctcccaagtgctaggattaaaggtgtgcgccaccacgcccggctgtccatgactttttgtagacagaacaataaagacagaaagaaatagtattaaagctgctcctaccagggccccccattccagggttagatgtccctggggcagcaggggtgagtcctcctggcttctccctactcctctctgaggagctctgtcactgcctgtcatggcctccgtaggctgcaaggataagctaggcagttgaaagcctcttgcctccctaggaaatctgcctagggtccttgcagtttcagggtcagcactgagtggtcaggagcaggaaacggtctgctcagcacattctcaagccaggtagctcaagaactaaagccaagtttttgtaagggagctaagaaaggcattgttggttaggttggaaggagggggcaggacctggctctcgcttcagcccactcccctctgccccccagcctcaaacacttttaccctagcatagcagaaacatgtcattcctactcagctaacatgtcatttcagggaggcctgctggccctgtctgccaccctcccttgcttgtctagtgtctgtgttatgttgcccacactcctgttcccagacagaaatcactggggcccctgagagtcggaaatcagtgatatctgcttgctctccattgccctcagcccaggaaggcagtgtaatgcttgtgggataaagagccacgtgagtgtcagggtacccaaggagaggatgctccggaagccatcattgggagggcatggccccgctgaggtcactgcagtgactgaagaagggagggcagaaggttaggaagttaagaacgggcacagctgagatacatccaccatggcagcatgatggaagagaagggaagtcaggactcgaaggaaggtaggtccctggggcggtgtgcccagaagctgtgttagcagtgactcaaaggtgggcctgtgttcaaggcttggtaggttttcttggcctgagactgcagggagcctggaggggggccacagggaggaaggcaagttgtgagttctgtttgcttagtcaggagctagctcaggaggtctctgcaacaagcaagaatgcaggatcccaaggccttggaggcaagaggaacagggctcagcttcctcactctatgtcatttcctacacctgcctgcttgtgagcactgtgggcccaattgtatacctgtctgctccatacacactgactaggaaacggctcagcctcagacgccaggtgtgacaaaaccagacagctccagaagagggtgaggcagctagctgtgacctgggtgactaacactgcctgaggctaggcttgtggatgagcccatgcttgctgggccgactgcctggaggggcaggagccggaacctcacctccgtggttctagagagaggaaggcccagcaggtgtgttcagatctcatcagctcatcctggtgtctggtgaccagacacttgccttcgcattctgacctattgcacccatttctcatgcttggcttcagaggaccaccttagccccacagccagccgtgatgcctccacatagcagtccctggctgggtcttgtcctagctggggttgtgcactgacctcttcccacctgtaatgcttgcatccactcagtggctctcactgtgttctgagtgctgttcttagtactcgccttcctccaaacctggggctggaagggctcctactttatacaggtgttataaatgaggaaagtgagtcagggacactctccagggccagaaggcagggcagaagtggagtggggattagaactgtaccatggaccactgcagcatgccacttcatcctctccagcccagcccctgggttttggcagcttggaccattgtgaagggtcttctggggtgactcttgtagaagcaagaggcttggggcttgaagggttctcagtacccaggctgctcaccctccctctgcccctgcctcaaaccacagcctgagctgcaggagcagacagagttagagagctgggtgtgagagacagcaggcaggtagacagcaatcactcagcacttggatcttccaggagagtcccaggttggaccagtaattcctactgttccattgaaatactgggaatgcttcagaaacagtttctgttttggcctcaggttccagtgtgctgtagagtctggcctgcacaggaacaagctgaatcaaatgaagtttctctcctacaatagtcatagtctaagcaggccaacaaaggcaccaaggaaaaagtaacatttggggtgaacttgcagagatgacaagagttgcagagaaaaataaagccagaaaggagatgcagcgttgggcaggtgcagtcctacgagggtgaagagacagaagggacatttttgcacagagctgtaggaagcaaggtttcctttgggtgggtgagcgggggtcacttccagcaaaggaaacagcgattacaaaggctccgaggtcaggaagggacggttaggttggaaggaaagcaaagagtagggatgagggtggctaacagaggcttgctcagatggggagtgacagccagagcccaaggagagaggacaactactgattgtcagcagcttcacaactgaactggctcgctgctgtgtgaagaccacactgtcgggagggggagcctatcattctatgggcagctggcctcagggatagcagcagagtagtgcccagatgccaaggcacttcctaagggcagccagcagggctaggggaggtaggtgggagtcccccagactagagacaggttctccccagcccagccgggcacagtgcaggtggaacaggtttgggaggaaaccaggagtttgtttcttataccagcctcttgcaacacagaaacaaggcaaaccatttgttaaaataagtattgtgtgtgcatggaggtcagaggacagcatgcaggaggccacgctggtctccttccacgtgctgcatgcagggatcgaactcaagttactcaggcttggcagcaagcacctctaccctctgagctgtcgtgtttggagacttgctatgaagccatttgctcttgaatttgagatcctcctgcatctgcttcataagtgcgtgccaccatggctggcaacaaactactttggtcaaatgttttgttttgttttgttttaattttgagatagagtttctctatgtaatcctagctgtcctggaacttgctgtgtagacctcaaactcaaaggtctgcccgccctccttctgtcttccaagtgctggaattagaggcacgtgccaccacatccagccccaaaccatgtcttgaaatttggaaaacaagggctttgaatgggatacaaaagtttgaatctcctaggaaacggttaattaatgtcctaacctgctatttagccattcacttgtctaatgaatacttaataagcatcggccatgtgccaggcatggtgcttggccccgtggacactgcaggagaagccaatgctgacagtcctgacctcatagccagggagggcctgataagacactaagcacatgaattctatgcctggtggagagtaagtggtgctatagaaaaaaaaaaaaaacaacaacaacaacaaaactgcaggacaggggacagcaggggcataagcgcaggtggtgtaggctgtgggttagatgtgacagtggactaggaccaaggagggggcagtcctgcactgtcagtatctgcactgaagccagataagggctcaggctccagagagtaacagcaggtcactttggacctcctagtgcctcacagccacctctcctgtgcaaattggagctactgccaggatttgagagcaagagccacatgctgttgtagacaattgctttgccaggatctcttctgcctcttcctgccaggaggaaggccagtggaggcctgtcctgggagatgttcacggcttcccctgcctgaggtgtctgccctaatgggctgagcgtttgctgagtcggcactctacagtggcggtgggggtggggtggagacaaggttggtctggtcctgaccctccctctacaggacttttagggaccagaaaatccctaatccctgagagagggtggtacgtgggggcggagtgattcgggaaacaaaagcgaatctgagaccagattgcaagagtgcaccgaagcaccaccaagctgctttcctggagcgagaggaaaaacacaaccctgagcaagtgctcggcctgctctccgtgccagccctgcccccaactgcctagagcagggagggtcctagctctgataaagcaggccttcagtcactctgggggtgtggatttggaagcagggcggggcagctttgtgcttgcacagctgtgagcctccagcgtgctaaagaccagggctgttttgaaaattatccccagacttagaaggcgggcgcaaggcaatgctgcttccagtgcagcttcagatggaagctatatctgcctagaccttcccctctttttttgctgcctcctttctgctttgcagagaaggcctggcctccttccaggagccaaagccagcctgactcctagcccctcacctgcctcctccctgcccagctgttctcccgggcttccaaggttggagggcagctgcagtgcagagcaggtgctggcgatgagtcacaggaggaagccaggtgcgctgtgccaccccacccggctgggcaagccaggagttgggctgggggctcagctctctggcctgtagccacactgcacctgctggatctaagcagtctgtcctcttgctaccctgttgttgctccttcatccgcatcctccccctcccccagtccatgggttgcacatggatgccttagagggatgaggactggggcctgcctgcctctacccagccatggcccagcatctgggcagcccttgttgggaccctgtctagacttcccaaacccatgtttggggtgactagagggaggggctagctgctggttcactagaaggggttgggctgtgtcttcaaagctaagcaggaggtggggtgcttgatagattcacacatgaccatatccccatgtagacattatggggagtctccatctaaacagaccaactgagagggtgtttccaagactgagaatatagatgatggatgagagtgaattattggtcattttgttagacaagaaaatagtacagtgttttaggaaatgaaacagagagctgggccaggcacacatccctggcactcagaaggctgaggtggaaagatggctggacatttgaggccagcctagtgtacgtaggaagtaccaggccagccaggaaccatggcaggcaggtccctatctataaataaaaataaaatgtgctagtgaaatggctgtcactctagaggcatttgccgccaagcttgatgaactgagttcaatccccaggatataataataataagttaaaagcgatggtaggcctggtggtatgaacttcctaatcccagcagtcgggaggcagacctgggtgggtcacaaagattaggccagcttggaatacagaggagaccttgtttcaaacccacagtgctgttggtattggtggatattgttgtattgtgggagactctcctgttctaagttccttatagcttagaagacaatagtaggaattcccgggagggaagagtgaggtacggttgaagaggacttggggacaggcaggcagagaagttgtggtcatggctcacaggatggacatacatagctgaggacacatggattgaacatgtcacagccacaagccaagggacaggaaagggatgcaggggagagtgtgctatgggttgaggtcctactcggtggcagagggaatctctttcttagtcctggttttccaaagaattaggttaaacccttaagcttcaggggagcttcctaattcatcacagggctcaccgtgtgtgtgtgtgtgcgtgtgtgtgtgtgtgtgtgtgtgtgtgtgtgttagagtgtgcgtgcacatgtgtgtgcacgtatgtccatttacatgtccctcctcctaggaagaaggggtatggaccgttttagggacaaaatacccaaagtctaagaggtcatggctcataagtaggaggtggattctaacctggaagctggggcgctgagccttgaccacgagttgagtgtgtcctgcgaggacacctgtgcacacgctcagtcacagtctcctttcttctccccagctagccctgctcagccagctcctcagcctcatgaggccttcgtccctcaggcagtgtctgggcattgaaaccttgccatccagtctagggcaacactcaaaggccagtgccgagctagactacaaggtgagtacctcaggtcctgcctgccttcactaacaccctgctgcccctgttagcggggaagatggggtggttcccattgtacagcctgtgggcccttttagaaccacaagccactggaggccagaggccagcaggccgccctctgtatgaggaggagacgctcagtattcttccaaacccttccattagcacccatacccacccgtgcatgtaggcacaggtgaagctatgggcacagacagaccaagagagctttgcccaacctctctgcttatttccactaatgttgacaaggcttaggccttgacctttccccagttcttccacataagttcttccaagcattgaccagctttcctgaaagccaaatttgagtgcaagtcaagggcactgaggttccctggttcaggaggttagggtcagtaatagcagaggcctgtgtgttctctgggttagtttcagagcagggaccacggtgggcacgggggcttccaaacggatctccatgggctcttctatcactagagactcagaatgacgacgagagataagggtcgttactttcaggaaggtgggattcagaagtgtcgctcctgagcttgagtgttaacagtccagtagtccagcctttgggcgtcactctgagaatcagataagtgagttaattacctaatgaacacaaatgagccattaagaagatgggataatccctaggtgcacgctccctgctccccttccagaccatgcagggtgcgttatctttgccttgggattcttatcagtgcttttacaaggtgacatctccctggaaggtgggtgccatctgaatgcctctcttcctttgccagatgtttcccagtaagcttagggggctgtagaaaggagttggggtcagcatctgggtaggtagtcagccatagctggatacttgagaagaggagtagaggaaaaaggaagacgaggctgctgtctgggctacctgagcagactgtctggcttccaggaaggagtcttgggggtcaggctacagcctcacccagcaggggtgtggctccttccaggccccaggcttcctcggggctcaccacatttatgacctgctgatagcaattgcaggtgtgtggaacatagtggctggatgggagggtaagcaggctgcagactcctgcacttcgtgcacagccacctctccttcttggttgcctattggaaatgatgagtttcaccttaaagctggggaataggagagcagcacacccagggtgctcaggcccccaagcaaagagtatactggctgaggatgattggaagggcagggggaggagggcagtagagccccaggcagtgaagcaaccaagggcagaggcaagcaggggaggggagaggcagggacatcgggtatgtgcgtggtgggcatggggtctagtggattgccagggtagagaagtgtgacatggttccaggcccgtgcctaggctgagtgtggtgatagctgggaggggccaggcaggtgactaggtcccaccccacctcagccgactgactcctcattaggcctgagcatgtttcatcttcaaagatgcgatggggctactcagcagccaaaatgagcagcggcgtcatccgccctattttacagggagtagtggtctgggatggagcagcctttcatccccaaagctcaaagtctttgctgttttgcttctcaagtgcaatggggaaactgaggccaatgttgaggtcaactggaggtgatcgtgcatgaaggagatggcttcttctcagcctctggggtcaccatgctgagcttctgcctatcccacgctaaactctctcctgtctgggagatttcctgctcaaaactgcaggggtcacaaccctaagccaaccctgcaaataaacacttctgcaggcttttcttctggtcttcccacctcctctagcttgcatcaggctgcctaaccctcctccttccttcagggaagatatgtgagcacaacgaggccccactgttgtccctttgcacgtctggctgtctggctggattgtgggcagctatgtgtctcaacattgcatgtttttgccactaaatgaaaaactgaacaaataaatgtgtttgagccctctcctgttctgctctgctctggccctctgctctcctgccctctctgccttcatgttcttgtatcattaagaccacagcatttatggaaccctgacttcagaagtgttaccttgggtaatgagagagccaatcacagggcattgttggtaattataagttagtaaggttgctgcctgggaaagctaaccaccaagtactttaacaaaagaagcaactgctcaggcttccattgtgtgggggcagggaggaggagtgagctgcactggaggcagaggcagcttgggttcccaagcagactgtctgtcctagcagggtcaaagtcacttaacacactactagcacagacaaaaacacgtgtgaaaagtggagggctggagcctgactcaggagttcctgcttacctagcttatgcgaggtcactaccaaaaatggaggagcgttagagggttagaggactcagcattttaaagtgtgcctagaacctattcaggaaactgggggaagggggttggagttcattcttcaatcccatgagttcaattccagccgggacaacataacaagacaccgtctcaaaatatttatatagagtgctgatctcctcgatggctgtctatgcctgggctcacctggtgtgggctgggtttacgcagggtaagggtaaacatctaggtgagaagatgctcgaggcctggccccaccagaagacaggccgcctgtcagctccaggtaggaggtgccagtgcttacacagaggagaggagagcaacaggagggctggcttctcagggcttccttttggcccagggacatgattctgccagacagctccttcccaagtccccgtgagactggccttctggctgcaggcagacaaacattgcataacttgactcggttttctcctccagtctacaggctcagccctccagtccagtgctagggtctactggggtatttgctttcaagtatggaaagtgtcatctgcatgtggccagatgtggcctagttatatatatcgtgttcagtcagagttgagttgggacccattcacttttacagagatggctgatgttttggtcttgttaaatctgcccttatgtttcttgttcctatttaaccacagctttcaactaatttttgcttttccttccctgtctgttcctatgtatgtatacatatacatttatatgcacaagtgtatatatacatgtgtatgtatgtatatatgtatatacacatgtagatatacatacttgtactttttctctgacactactgagtgtcatgatgccggtcacaggctaagcatatgcttgctactgagctacctcacagccaggatgctgtattaaggagagttccccctgagagatatgggaggtatagagaaccagaatcttaaaggtaggattgtctctctagttggttaaatctgaggaggagtgtctctctagttggttaaatctgaggaggttaaactgtcttccattgtggatgaaaactaaggataaggaagccaacttggcactggggaacttgcctccccctcccccaccctcannnnnnnnnnnnnnnnnnnncctcccccaccctcatcccctcccccaccccaaatgtgcctcctctcagcatgtcagtggatgctttccaaggatggcagcttgaggctcactgaggactgtacatgggtcagcctcctgcaggggcattcccttcatgtaagggtcactttgcaggtaggcttgtgtgtgccgcagaggcctcaggaaagcttgtttatggaggagcagtgtttgcaaagaaatgatattatggtgtgtgtgtgtgtgtgtgtgtgtgtgtgtgtatgtgtgtgctccagtgatgctggggatgggctccagctgcagctctacagaggtgtgtgtctgcccagcctgtgcagggcgtgggcctgccatgtgtttgtgtgcaatgccctgtgtgtgtctcctataaacccttgtggtgtgccaggtgtgttgagagacttggtgaacaagttttgctgctttttctgctgcaactgtagactgcagcggtctgtccctgcgctggctgaccctgccaagaactgccttaatggaaggctgtggtggggagaggccagctctcactgcagggacaggacggggtgagctgctctctggcatctctgtgctcctctctggtctctcttgctggcacttctaaccccaacaaaagggatttgtattcccttgggcttggcttgaacctgtgtcatcttagtcttcaaagacaagtggatcctggagcctctccccactttgccacctgaaaatgcagtacttggccccacacacagtgctgtaaacttgggtcaggccagggttaggagagctgggaggaaactggatttgaggaacagaaaatagacatgaagactccttagttcttccctggctggcttgtggctctgttccatcttccttcctccaaaatgaggagcatcagctgtattttgtcagaaacctgggcctccgagaagctgaccctgtaagagagttgaactacatgcaagtctaggaacctgtagaccagggcccgggctcgggccagcttcgctttgttcccagaaatcatggttctttgcaagaacatgagccaggcttgcagggacagggtgaagcccaggaggcagggtggggtccagggagcttttatttaagcccagcccgctggagggttggcctgctcgctccttcaccccaatcagcccagggctctggagggccctaagggttcctttccccacaagtgcctcgtcagcttgtcctgcagctcttacctaagtgtctccacttctccgggtgctctgtaggttaccttcagaccattatatcactctcaaacttggtcacctgaagcctctgccccgtcacctacagccctgagatcaaaccccagcatcctgcatgctgatggccttggcggtgcatcttcctgtcttctacttcacgtctgttgaaccctgggtcctaacagttgacatgtccctatggcctgtgcactcctttcatgaacataaacagagatgttttcctcagccgggtcccaagtcagccttagccccaggcctccattgaaatgcccaacctgagcagaaataagccatgccaggtatcttccccaccagccccactcccagcctggctgctgcttctctccctccgccaggcctgaattagcccagactgggttgtaggagcatgctgtaagtgctgcctcttggccgctgcctgcctttcaccccttcaatcccttctctttgtccttgctgcacctctttagatgagccagacttaggtgaacccagggttacatgcacagtgtgacaaaaccccagtgtcactttccccaatgcttgcctgtaccctatggtgcattcccagagaggttccctgttgcctttgtgggaaaccctgggttgacctccttttcctcggccaccctggccagggctaaagaaagaacatctgtcccagagtcaagtctcactggcttggtgtagaccatgattggctggtccaggtcacatgtgttctgctggagtcaactctgtagacaccaccatggaacagtttggcctaaatgtaggggacaggaagctaggccagtcttaaaatggaaggggtatgtcctaggtacctagaaactttgggctgtatagtacaccctgttcttgtcatgggttttgagagaaaccagctctctttacagatggccagttccagttactccttgaagagctccacatgctcactcatgccctcaggcccacatgctgatatgcacacacatgtgtaaacctgaactcacacacatagactcctgcagcaagagattatgggcagagctgggttttctgcctagagtcctgtgggatcagggtctctggtcccagnnnnnnnnnnnnnnnnnnnnnnnnnnnnnnnnnnnnnnnnnnnnnnnnnnnnnnnnnnnnnnnnnccagctggagaagcagctgcctatcatcttacttgccctagcccccaccccaggaacccagaggaagggtgggcagggtggcatcactctcccaaggatttgctcatagtcccgaggttcctccctagggagacacgtgtgctgtagtccagctgtcaggatggcagcactttagacatgccctcagccttcctgaatattatgtcccacccctatctcctgtgccagagcttcccagctcccacccagtcctcagagcagaaaccctcagggcccattctcaaagttgaaatagaacttacaagaggattccactgtgagaggtctcagagcttattttctgggaagttagaacagctcaggctcacactgaggaaatgtcggggggcagggggagctgtgggggtatatgggtatatcctgggcctctcaaatcctctagcaccctgggaagattcctccctcccgtctctggacccagctggggtcctaagagcaacttttcacatagtgcttgttcccagcagctgagcaggaagtcctgttcctgtctagatgctaccagcctgtcctctctcaccctaaagtggccgcatcactgttccattttcagggctccacccacccacatggcccatcactttcgtttgcagaatagggtggcctgcccagccctacccagtggtgaatctggcaggctgtgcctgtgacgtctgctgcctggcctcttgaccctgtatcttcagggactctgggctaggaagggtattatgtcacacgtctcatttcctagcagttaattatgtgtctcatcatttcctacgtgctaggactagtgaccaatgccctgtcctgggcagagtcactttagaagccagcttttctttcagaacagatgtctgcttgcagccctctgcttgctttctaatctagtgcctgccaaggccaaggtcaggaacataaccttggacctggagctgcatggacaaggagagcagcttgtaagtgtgcacacagaacagagaagaaatgatgtcctaccaatccaagatggcaggtgcaaagtgccagtgttcagataaggcagactcagaaacatgcatgccctgtgctttggaggactcctgagatgctagagccccgcttctctccttgagctgaaactcttggtttggtgctaaatgatgttgctgtttgcccaaccacaggagcacaggctgatggaccccatctacacagaaacagccgggcctctgcggcttgtctctcaagatatccgtggactcagatccagaagttctcaatgccatctctatttagaactgttatacaagtgcacgtgtgcgtgtgcacctgcactcgcacacacccgcgtgcacacacacccgcacgcgcgcgcgcacacgcacagaatgtctcctgatgaagatcccagacatctgcttcttgctagatttttccctcactggacatgctagggatctagccaagcttgagcttagacatatgcagagacatagggttaccaggccttctctgaatgtcccctctgtacgccaggttgctgtgatactagattttaaatttaattttaaaaggcaaatgaatcagagtccacctctcacacaggtgacctagtgatcagctcagcttctagagctcagcttcagccgatgtgctctcatcggtccccgggaggacccacgtgaggcaggagtggtacttatcacaggattcttctgggatcggtagtcaggctgggctgggctgggctgggctgggcctccagaccttggagactgagctgaatgcacattccccagggtaaccaccagccagggcctgtgatgtcagaggcagaaacagggtaggtagtcctggcatcctggagctgccgagcaggtgccgacacctgccagctgagcctgcgcctcagcagcatggcttagagagttacggcctgtgcatctcgcccatccttcttcctcagtattcctgggctagcctcagctctcccctgctcctccccacctagcactgcctagagcctggctggacctacttccagaatctgcttgcccatgagaaatctactgtcccctcctgcccagaaggttctgaggaaagggttccatctaaagactccggggtaagagctgaggtgggagaccgcatgctgccctgttagggaaagtggcttcctgggaactccctttccctccttccctttggtgtaagtaaaccagcctgccctccctggcattagctagcaggggatttcctgaaggatgaagttcctgggaaatgtccacccatgttcccttttgtctcatttgacaaaaacttgcaaataagttccccttgacccaggagatttaaggagtgattgctgagatcagaactaagtggaggacgacctgaggtgctccctgcctgctgcctgctgggttatgagcactgtgatccttttatccctgggtccttgttttggaggagggccagagtgagacacagcacagtgagcttctgggaagagccctgccaccagactctggggagagacccaggaagtgggagcaaaggccttgctggcagtgtgacccagagacaggactgccttagctcgtcagttctgggtccgggcacgcccgttcttcatcctctgcctctctcctctgagtccttggctgagatttcccggatctctttcccactgtggtttcccagcctagattcctgttcatgcaggaggggctgggctctctagctgatccacagccccaacaccgtggagggctaactccctccccacagcccccaagtacacacacacacacacacacacacacacacacacacacacacacctacccctaataggacctcccatggacttggggaagggccagttgtgtccctaaagagagagagagagacaaagcccatgtctccgcctctggccactacttccttctgagtttttgtggtggcagctagaacaggaaaaggtaactgtgacaggaaaatgtggttctctcctcggcctgttcacctcacatacatcctcctagtgggacccccctgcctgcccagcgtgcctactttgtacccctagcccatctgggtcccaggcagtgccatttaaaagaagggtcttgagttctgcctgctccaggcccagagcagcccctggctcctgctaataattggctgcttccctgactgatacaaatgagacctcacctgcatatcctgaggaagtaaggggagacaaagtgtggacgcaggccacactgacactgcttgtgtccatactgaaagttaggtttgattggttggttggtttctctgtgtagccccagctgtcctggaactcactctagaccaggctggccttggacccagtgatccgcctgcctgtgcctccccagtgcatggggattaaagatgtgagtcacccacgcccagcatttagttttgtttttgttttttttttttttgagacagagttttaagtagcccaggtttgccaaaaatttgttaggtactggaagctgaactcaacttgctccttccccggcccagtgctaggattgtacacacagctggagtttgcttccttcagacagcctgtggtccagctggccaggaacataaactcctcggcctctcaaatgttatgctcaaaggcatgagccactggactcttgatttagaggattagggatggaaccgagaaccttacctttacacacacacctagaccaggctcctaccactgagcaaaagctctgcaggggacccaagcatctgctggtcctgagttctgggtggagccctgaggcctcaaagtccgttaaaggggaaagcatagcaagcccaaggccgatgaacgtttggagttttcctctggagaaacagcttacagaatttggtgaacagccaacccctcctcccccagcaagacaaaacatacaaacacaaacacgcaccgaggctcagagtagtttatctgcggtttcctagattaagttctgggactcagcagcgaggcaggcttgaagctgaaacaggagctgtgcactacttgcttttcctagccaaccccatgcactggacggcacataggctgggagcctttgcccccccccaccccccccccccggggtgtgcgtgcttgggtgcctgggaacctacagcctgccctgtagcctgcactcgagaagccaagttctgcagcccagatgatgcaccgacctccacagttgaacttcaggtggggatggggtgtgctggagaaagtcatttatttacagcagaaaggccttaggggtgaggagtcactaggccctccccaacccctgctgctactctgggcgtcccgggtctttaccctgggagagttcccagtcttccgaagaagacgccctgcccccagtcccacggcccccagccccagcgccgctgcccttggaggtgatctttggcaccctctcccccttctcaccacgaccctgttcaaagcccaatgctttgtcacaaaggggcctcagcgtccttccaaggtcctgctcctttctgattccaaacccagttacgctcaattaaagtagccagggtcccactaacaaatctttaacaaatcagtaaaatctattatacagattttttttttaaaggcaggtactctagtctagccttgaccttactgtgtagttaaggatgactttaaacttctgatcttgctctaaggagtgctgggattgcaggcatgtggtaccaggccgttttatggtagcaggaattgtccccgaggtctcctgcaagctaggcaagcactgtgctatatgagttatattcctagttgccagaaatagtctcttaaaatttttttatttatttgaggacatattttttattttaaaaattaaaatacacgtatacacccccttctcttctttctgtctctcctccctatgctctctctccagctcatggtgtccttttctgtgtttacataaacagctgagcgccaggtagggtggataggaaatctgctatactgccctcaaactcacagaagtccacctacctctgcctcctcaatactggcactaaatgcatatacctcagatttttatcatttttgactcctgtgtgtgtgtgtgtgtgtgtaggtggggcatgtccacaggagtacacttgctcaaggagctagaggcattggaatcccctggagctggagttataggtgggtgtgagccttccacctggggtgctgacagctgccacctctctagccctccccccaatattcataactgagggaagaggaggatgtgggctgaggatgcagctcagtggaagagtgtgtgctttacatatgtaagctgagttgagtccctagtgcagacagacagacaagacacaaacgcatgcccccacatacacgcatcacacacacactgtatggaggacagcaataggaatatacaagacacaccttgaaatcttttgtcctaaaaagactgcgcatactggtgtgttcagcccacaccaaatactgctaccttatagcactagcttcccccaggaacctctctcatcagccatcagcaacccaatgttcctcagctcctcacactctcagctgccagccctgcccccaagccatgccctccctcccccagttcaagccctgctagctaccctgctgaccagccctgccccctccctgtgcctgcctgcctgtctttagcatcagccctccggatctgtctggtgttgtaatctactgcctctgcccccttagggccatttttttttttgcctcaaatccagtccttttgaggcccactctggcttagtcacttcctctctgaggcccccaccacagtctttccagaatcggaagactctgccctctctggtctactgggaagctgagatttggtatttgttaggcaaatcattcaatgcctcccaaagcttagacagttggggtgcacaggcctgaggctgtagaacaaaggggatctactgaggaccctggggcagcccaggaggagatggcaggagcccatttgaaaagcttggatattgcttaccctatgatggccctcttggaggccacacttgttgtcatgtgtaggcctcctcactgccacctagtaggtcatggagtcaggccctccagaggctttggctcttctgctggtcttaagcaaggcaagtgctgctgctgggcaccagggtggcatttctccacaggatgtatttggtctcaagaagtcagtccatggtgccaagttgcctaccttcagaagtggttctggggaggttctttggtccatgtaaaaagattgcagtcctttcttggccactgtgatccaaaaaggtatggaagccatccaaaaaggcccctgtgctggctcagtcctcctggccatccgtggctttgctctatcatctctcctctccctgggatgagagctctgccccaggccccaggcgtgcagccactctctttatcctagatgtaaaaggagccagtgtgcctgcagactgtggtccacagcgccaagagcaggctgcctggtgtcagtaactctgtccatcaggagccacatacttactctgtatagcaggccgatgtcccctaaatgaatacctccgatagagagtccaagggtatcatgggctaattccttttcttatccagtagaattggcaattgtcctaactttcttctttttcttgttgtctctttgtgtgtttattggtgttgtatattttctttcgtttttttttttttttttttttttttttgagatgctttctttctatgcaggagccttggctggccttaaacttgtgatcttcttgctttagcttctaagctagggattccaggtacggttcctcccaaatgacctttgtcctggtttttatctctgaagtgcccagtggcgacagtgagggtggactgggtggagaaggcttgcagatattcgatgcatactgcttctactggtctccccttctcttgccagctttctgtctgtcctcagggctgattgttaaagggtgctgtgcctaggtttgtgcaggtgcttatccactatgggtcacatttacaagatggggacctagaggtggcccaagggataggatcatctcagttactgaccacaggtataggtgacttagcaaacaggttgtgcaaaggagagggtgcacaggccctctgggcttctgcttctggagtcacaaagaaggcttagggtggtgcggctttccgggtggcaaggattctctttttcagaagccatttgaggacaatcaataattagaagaaatgtgggtcctgggtacaggctactgggacagtcacagctctgaggaagtgaggccctccttgaagatgtgttccaggaagctgctgctgctggctaagacaggagcccatggccttagaagaagttaggaagcatccttgttgtgctttctctctctctctctctctctctctctccctttccaggtctgctatctgtgccacagcctcctgacactagctggggtcgtggtcagtagccaggacattactcccaatcaatgggtgagtctcccaagatgctggagcaggaaagggttggatggtcagtagtacctactgcatcaagtagtgtgggacaacactagccaggatagagccggccttccctcaggaactgcagagtgagaggccaagaaagaagtggcgacagttgtggggggcctcctccttccattgtgtcccaaaagccattcccaagggacgatggcctagcccttagaagctgcccttcctactccagcagacactcagagatatccctccctttctgacttaattctccttcttgccttggcctctagcacatgcctggcttatgtcatgcctcctcctcctcctcctcctcagggcgagctacagctgttgtgcatgcagttggaccgtcatatcagcacccatatccgggagagccctcaggccatgcaccggaccaaactcaaggacctagctacccagacttacatccgctggcaggacttgctggcccactgtcagccccaggtggtgtcccataatcccctagacctgggaggaaagggaagtggtcagtcagtgagcggggcttggcagatccagcagtccatccacccccactgcagctgctggactccaaagggaaagggtggagtgggcaagcatgatgcagggtggggatgtctcaggggaccttcaatcctaatccacgacccagggaggggatgcagaagggagcatagggaggcctgtttatgaacaaatacagagaaacacagccctgaagaactgagcaataccagtttgccatgaattacggccaggaaggggcacccgaggcaacagctgcccacctcctgtctacttgtcctggagacctcagctggctacttgctgtgttaagagcatttcctgggctgctctgttttttgtttttgttttgttggttggtttttttgagggagcacagggagagtacttgaacccaaagccttatgcatgctcagcacgtgctccaccccccctccacatggccagcatccactctcacttctgtaggagtaacctctgttcctggaattgcccctggtcctctaggtagtaacatgttatactaaagtttacagaatgaagatttttttctgcaggagcctgaggagccctcgtgaagcagggatggatagaaacccattttacagatgagcaaagtatctagaagctctgagggtcaatagcttgccccgtcatgcacgaagattgggaggatgtgaggatgggggctcacagccagcgtcactcctttggcacaaagcggccccatctgcacaccctctccacccccagttctccaacaagcagtgccctgctgggctggccctgagcccccaagcccttaatggggacagctggactttgctccctgcttgcctctccctgactcctctcttacagctccctctaacctctgacttgaggctgacacactggccacaggctgtggcttggtgctcaaatttcacaagtccctgagaaaaagaaagctggatagaactcagacctcaccctgatccccaggaactggctcccactggcctctggtgggaagcattgcttgtcttagagaggaagcaattcaagcttgactgaggatgcatagacagcaccttcctcccatacttgggcctgtagcactaggcgggtgagacactggctgagccttcaaggcactgcctcttggccgactgtgtctagacactgaggcttatcagtacagggacctgtagatagcgagggtactggggccaggccattacaggctactctctcttcttcacagggtcagtacttcagcccttggaaagacatttaaagggataagagcaaagtggcccaaggctgtggactggagcaggaagagaactgtaggaggtgaagaatggagccggaggaggcccagcctggtgaaggtagactactgccaccacccagcgaggggttcttgtgtccctgaccatccccacccttgagctcccccacctgcacagctgtctcttctgttctgggctctccctgttggccactgactttcccacaccttgccctctctgcccatcttgaatatgaggttcatttgtgcatattaaagtattatttccagcatc

SEQ ID NO: 95 - DNA, 1024 bp, Mus Musculus
tccctcactgcaggaggtcaaagaggtgttcagcagcctgggagcctacaaccccgccctgtacccacaggggcccttccagcacagcgcaagggtgcttgagagtgaggccagcctggattcacaggatcctccccaggaagtggccttggacattaagttgaactacatctacaagttcctgaccctgtgtctcctagtccggccagcgtcctacacggatgccagcatcttggatctgatggagctgctgtgccgcgcaggcctggatgtagggttgtgcctgctgcccaagactgacctccagcaactcctgctcctgctgctggagagaatccaagagtggcctggaaagctccagcccctttgctgtgccctgagctgggtgtccgaccaccaccacaacctgctggccctcgtgcagttcttcctggatgtgacgcctcggggcaggcagctgagaagtcagctgagtcttgtgattattgcccggatgctgggccagcaggagtcacttcctttctcggcagagaaaacccagctagccctgctcagccagctcctcagcctcatgaggccttcgtccctcaggcagtgtctgggcattgaaaccttgccatgcaccggaccaaactcaaggacctagctacccagacttacatccgctggcaggacttgctggcccactgtcagccccagggtcagtacttcagcccttggaaagacatttaaagggataagagcaaagtggcccaaggctgtggactggagcaggaagagaactgtaggaggtgaagaatggagccggaggaggcccagcctggtgaaggtagactactgccaccacccagcgaggggttcttgtgtccctgaccatccccacccttgagctcccccacctgcacagctgtctcttctgttctgggctctccctgttggccactgactttcccacaccttgccctctctgcccatcttgaatatgaggttcatttgtgcatattaaagtattatttccagcatc

SEQ ID NO: 96 - protein, 214 aa, Mus Musculus
PSLQEVKEVFSSLGAYNPALYPQGPFQHSARVLESEASLDSQDPPQEVALDIKLNYIYKFLTLCLLVRPASYTDASILDLMELLCRAGLDVGLCLLPKTDLQQLLLLLLERIQEWPGKLQPLCCALSWVSDHHHNLLALVQFFLDVTPRGRQLRSQLSLVIIARMLGQQESLPFSAEKTQLALLSQLLSLMRPSSLRQCLGIETLPCTGPNSRT

SEQ ID NO: 97 - DNA, 1245 bp, Mus Musculus
atgaagacatgcatttctggtgtccctcactgcaggaggtcaaagaggtgttcagcagcctgggagcctacaaccccgccctgtacccacaggggcccttccagcacagcgcaagggtgcttgagagtgaggccagcctggattcacaggatcctccccaggaagtggccttggacattaagttgaactacatctacaagttcctgaccctgtgtctcctagtccggccagcgtcctacacggatgccagcatcttggatctgatggagctgctgtgccgcgcaggcctggatgtagggttgtgcctgctgcccaagactgacctccagcaactcctgctcctgctgctggagagaatccaagagtggcctggaaagctccagcccctttgctgtgccctgagctgggtgtccgaccaccaccacaacctgctggccctcgtgcagttcttcctggatgtgacgcctcggggcaggcagctgagaagtcagctgagtcttgtgattattgcccggatgctgggccagcaggagtcacttcctttctcggcagagaaaacccagctagccctgctcagccagctcctcagcctcatgaggccttcgtccctcaggcagtgtctgggcattgaaaccttgccatccagtctagggcaacactcaaaggccagtgccgagctagactacaaggtctgctatctgtgccacagcctcctgacactagctggggtcgtggtcagtagccaggacattactcccaatcaatggggcgagctacagctgttgtgcatgcagttggaccgtcatatcagcacccatatccgggagagccctcaggccatgcaccggaccaaactcaaggacctagctacccagacttacatccgctggcaggacttgctggcccactgtcagccccagggtcagtacttcagcccttggaaagacatttaaagggataagagcaaagtggcccaaggctgtggactggagcaggaagagaactgtaggaggtgaagaatggagccggaggaggcccagcctggtgaaggtagactactgccaccacccagcgaggggttcttgtgtccctgaccatccccacccttgagctcccccacctgcacagctgtctcttctgttctgggctctccctgttggccactgactttcccacaccttgccctctctgcccatcttgaatatgaggttcatttgtgcatattaaagtattatttccagcatc

SEQ ID NO: 98 - protein, 316 aa, Mus Musculus
EDMHFWCPSLQEVKEVFSSLGAYNPALYPQGPFQHSARVLESEASLDSQDPPQEVALDIKLNYIYKFLTLCLLVRPASYTDASILDLMELLCRAGLDVGLCLLPKTDLQQLLLLLLERIQEWPGKLQPLCCALSWVSDHHHNLLALVQFFLDVTPRGRQLRSQLSLVIIARMLGQQESLPFSAEKTQLALLSQLLSLMRPSSLRQCLGIETLPSSLGQHSKASAELDYKVCYLCHSLLTLAGVVVSSQDITPNQWGELQLLCMQLDRHISTHIRESPQAMHRTKLKDLATQTYIRWQDLLAHCQPQGQYFSPWKDI

SEQ ID NO: 99 - DNA, 112679 bp, Homo Sapiens
  misc_feature (1)...(112679): n = A,T,C or G
ctccccagctggcggcggcggcggctgtgagctggccgcttggtttggagtcggaactcaatccccagaactggatctttaggttccacgttggcggccctggatctagggacgcaactcttggggtcctcccactgcgccgcctggggagcctgctcctgcttcctttcccggctagctggccccgtcctctgaggccgtgcgaattcccgccaccctccctcaccccggagccctgcccttcccgccctatgtggccaaggcttccaggtgcgggcctcgctccacaactcaggaggcaggatcagcggctccattttacaggtaaggaaactgaggccgaggaaccgcaggggcgcgtggttagcgctcagagagcactcgacttccctgggactcctggctggtccaggccttgcaggtcagccccggtgcggccgccgggctactctggcgcttttcaggttcctgcgaccccgcgtggttcgggttccgacgtgagccgggccctcctctccacaggccactgcgcggccggccttggtggggtggaaccttagattggtttgagaactggtttatgttttggttgatgtggcatgttttgttttgatttttaatgttccccagggtgcaaagggtagctggtgttttctttccagaaaggctttctattcccagcccctgcccggtttgatggatgtggagtttatgatgctggagaccgttttctttgtgggtagaacgcatctcctttcatctttcaaattgtgagctcagtccttgctgacaggagccgctgctctcgccagcattcccaagctattaaatatttgtttaaaaggatggatataaaacatgatgttaggaataaggcgtcttgaaaaagcagtattcgcagaaacagcaccattgtaatattctgaattcatcttggctcttttgacatcagggcccaaagcacttgggattccgtaattatttggcctcatgctacactttaagacagattattttatttttcttgtagtcaggaaagtaaaagaacaaaaaaactgagatgacatgttgaaatctcactgcgaggacgcgagggaggatgagggaagcggggagggcggctgaacgctaaaggctggggctggggtttgcaggattcggggagacaagagcccaggcagagggatgtgctgggcagagggggcgccatccatgggctgcattgtagagtgagcatggccaagtcaaggagctgaacaagacgacttcagtcctgaacctggaaagaatgtgagatggaggagaaacaggtcctggctggcgggtattgggccccaggagggaaagagataacaaagttaagtttggagactaacgctgtctcctgtttgactggggggccttcatatcccctcccacgctgtcaggacacgtactgtaggcactggagcaggtcacaccaactagaatgatcggtttccatccattccgggatgcatttttgttcacattttagcagctctgaagttgggctgggtcccacagtttgtgtctttctttgtgtcatcgttcacttggcagctttttgtcggtcttagtggcacagaaagtcacagtgccttaaacccagcagcatcttagctgtgatgaaggagtcagccatggcctgagtccagtaactgcaggatccagagttggagacgcaggcagagaagatgacccacctcagcctgcacccttttgttgtttatgtctttgtctttgaaagtgcttgtttcaaggcatgtgagggaggggattggcaaaagcaaaaacctggaaacaacagatagacaaatgaaaaatgtgttactttgtggttgggagagggaagaaacagctggtagctgcatctcccttccaggtaaaattggaatgccatataatcactggtagatagcacctttgagtgaaaggcattttgcagcagctagagtcagctgcccactgagcaggcagccctggcccaagagcctcataagcagccagccagtctgaatacgctgattgggccagtgagccccaggcttcatcatctgcttgagtcttggtgagccctgggtctgtcctatgacagaaacttcctgctgctgtaagctcctctagggcagagactgcatcttcctcatccttgaggtcccaatgctcagcatactgcctgacacatagaagatgctaaattggggtttgttgagcgggaactgtattgaacaggttgggcaaattgtcttcctggtggcggagtgaaagtttttatgtaccactttggcagggcacagtggctcacacccgtaatcccagcactttgggaggctgaagcggcagatcacaaggtcaggagatcgagaccagcctggccaacatggtgaaaccccatcactactaaaaattagctgggtgtggtggcacctacctgtaatctcagcttctcaggaggctgaggcaggagaatcgcttgaacccgggaggcggaggttgcagtgaaccgagattgtgccattacactccagcctgggcaataagcgaaactgtcttggaaaaaaaaattcatagcagatttattcataataccttgaaacaagaaataactcaaatgctcatcaacagcggaatggataaataagtagtagttattcatatgatgaaatattgtatagtaataaagattactgaactgctgcatgaactactgctacaggcatatagcatgcaacaacatacatttagcagtagttcgtggatgattttcacatgcataatgttgaataaaatatatgcagaagtgcacaaaattgatgatttggctggatgcagtggctcacgcctgtaatcccagcgctttgttagctgaggtgaccagatcacctgagcctaggagtttgagaccagcctgggcaacacaatgaaactgtttctacagaaaaatataaaaattagctgggcatggtggcacatacctgtagtcctagctactcagaaggctgaagcaggaggattgtttgatcccaggaggttgaggctgcagtgagctgttatcacaccatccgagtctgggcagcagagcgagactatgtctcaaaaatatatatatatgattttatgtatgtgaagttcaagaacaggcaaaataatcggtggtgatagaggcagagtagtataacctttggggttattgactggaggaggtacttctagaatgtaagaaatattcaatatgttgatctggtaatggttaccatatgtatgtatatgtgtatatatatgcacacacagacacacatttatactaaatgtacacatatgtacataaaaatcaatcatgctgaacacttaagatttgtgcatttagagccaggcatggtggctcatggaatcccagcactttgggaggctgaggcaggaggattgtttgatcccaggagttcaaggccgacctggtcaaggtagcaagaaccctgtctctacaaaaatattttaaaattagccaggcatggtggtgtgtgcctgcagtcctagctactcgggaggctgaggcaggcggattgcttcggctcaagagctgaaggtggcaggaagctatgatgatgacagtacactccagtctatgtgacagagagagactatatctctaaaataaaataaattagactgggtgcagtggctcacgcctgtaatcccagcactttgggaagccaaggcaggaggattgcttgagcccaggagttcaagaccatcctgggcaacatagcaagaaccctgtctctacaaaaaaaaaaaaaaaaaaaaaaattagctgggcatggtggtgtgaacctgcactcctagctactcaggaggctgaggcaggagggttgcttgggcccaggagttcaaggttgcagagagctgtgatcatgacattgcactccagtctacatgacagagacagactctgtctctaacaaaaataaataaataaattaggccaggtgcggtggctcatgcctgtaatcccagcactgtgggagactgaggcgggtggattgcttgagctcaggagttcgagaccagcctgggtaatatggtgaaactccatctctacaaaaaatacaaaaattaaccaggcatggtggtgcacgcctgtcgtcccagctactcgggaagctgaggtgggaggatgacttgacgctgggaggcagaagttgcagagccaagattgcaccgttatactccagcctgggtgacacagccagaccctgtctctaaaataaaataataatatatataaagtatgtacatatactatatgaatatatatatttatgtactgtaagttatacatcaattaaaaagtgaagaatgtttcttgtgtgggttatggatccaagtgtgaaatacaaaataataaaaattctcaaagctggcatatgaaaatatgttcatgactttggaataaacgaagattttttctttttttttgagacagggtcttactttgtcacccaggctggagtgcagtagtgcgatcacagctcactgcaaccttgacctcctggactcagatgatcctcccactcagcctcccaagtagctggtactgcaggtgcacaccaccatgcccagctaatttttgcgtttttttgtagagacagggtttcactgtgttgcctgggctggtctcaaactcttggactcaagcgatctgcctttctcagcctcccaaagtgctgggattacaggtgtgagcccctgtgcccagcctagaggacagtttctttctttttttttttttttcttttttttttttgagacggagtctcactctgtcacccaggctatagtgcagtggcgccatctcggctcactgcaagctccgcctcccaggttcacgccattctcctgcctcagcctcccgagtagctgggactacaggcatccaccaccacgcctggctgatttttagtagagatggggtttcacgtgttggccagggtgacctcgatctcctcacctcgtgatctgcctgccttggcctcccaaagaggacagtttcttaaacaggatacagaaagcaccaactgcagaagaaaatgttgataaattgggctacattaaagttaaggacttttctttatcgaaatataccattaatagagtgaaatgatcctttgtggttcataagcatgatgattgagtgttcacgtgcatgtgtgagatgtgccaccctgagacctcgttacgaagtcaacgtattacccatttgagattaccaaaaaagagtgagttgggcgcggtggctcacacctgtaatcctagcactttgggaggctgaggtgggtggatcccttgaggccaggagttcgagactagcccagacaacatggtgaaaccccatctctactaaaaatacaaaaattaactgggcatggtggcgggtgcctgtaatcccagctacttgggaggctgaggcaggagaatcacttggacccgggaggttgcagtgagctgagatcgcaccactgcactcccacctgggtgacagagtaagactccgtctcaaagaaaaaaaataaatagaatgaaagagaagccattcagtggaataaaatatttgcagcgcatataactgatcaaagactcatttcaagactgtgtaaagaatacttcacagatctaaaatgggcaatagacttgaattggcactttacaaaagaagatgtctataggtacccacaaaaatttaaaatgtaaaaattgaaaaaaaaagatatctaggtcaggactccatatgaaaaggtgctcaacctcattagaaccagggaaacccaaattaaaaaattcaaggaggctggctcggttgctcatgcctgtagttccagcactttcggaggccagggtgggaggatcacttgagcccagaagtttgagaccaacctgggcaacatagaaagacctccacctctacaaaaaataaaaaattgcctgggcattatggcatgaatctgtagttgtagctacacaagaggctaagttaaggcaggaggattgcttgaggccaagagttctaggctgcagtgagctatgatcacaccactgcactccagcctgggtgacagagcaagacctcatctccaaaattctttttaaaattaaattttaaattacataaggagactggacacagtggctcacacctgtaatcccagcactttgggaggccgaggtgggaggatcacttgagctcaggagttctaaaccagcctgggcaacatggtgaaaccctgtctctactcaaaatacaaaaattagctgggtgtggtggtgcatgcctgtaatcccagctacttgggaagctgaggcatgagaattgcttaaaacggggaggcggaggttgcagtgagccaagattgcgcactactgcactccagcctgggtgacagagagagactctgtctcaaaaaaacaaacaaaaaaaccccacaaagaaacaccattacacactgactagaatggcaaacatttaagataccagcaatctcaagtattgacaaggatggaacaggagaattctgacatgtggctagtaggaggataaaactttaaaactgtttagccctatctactataatggacatacctattccctgtgacccatcaatatgatatgtaggtacattctcaacagaaatgtgactcagtgcaatcccgactcacgtcagtcagaatggctgttactcaaaagtcaaaaaatagcaaatgttggtgaggatgcagagaaaagggaacacttatacacagttggtgggaatgtaaattagtcaaacctttatgtgaaacagtatggagatttctcaaagaactaaaaacagaactaccattcaacccaccaatcccactactgggtatcttcctgaaggaagataaattgttatatcaaaacgacacttgcactcatatgtttatcacagcactagtcacaatagcaaagttatggaatcaacctaagtgtccatcaacagatgattggataaagaaaatgtgatataggatgggtgcagtggctcatgcctgtaattccagcactttggaaggctaaggcgggcagattacttgaggtcaggagtttgagaccagcttggccaacatgatgaaaccccgtctctactaataaagtacaaaaattgaggttgcagtgagtgaagatggtaccactgcactccagcctggatgacagagtgcgactctgtctcaggaaaaaaaaaaaaaaaaaaaatgcctgggcgcagtggctcacgcctgtaatcccagcactttgggaggctgaggcaggcagatcacgaggtcaggagatggagaccatcctggccaacgtggtgaaaccccatctctactaaaatacaaaaaattagccaggcatggtggtgtgtgtctgtagtcccagctactcaggaggctgaggcaggggaattgcttaaacctgggaggtggaggttgcagtgagctgagatcacaccactgcactccagcctggcaacagagcaagactctgtttcaaaaaaaaaaaaaaaaaaaagagtgatacatacaccatagaatactatgcagccataaaaaagaatgaaatcggccgggtgcagtggctcacacctgtaatcccagcactttgagaggccgaggcgggcggatcacgaggtcaggagatggagaccatcctggctaacatggtgaaaccccgtccctgctaaaaatacgaaaaaattagccgggcgtggtggcgggcgcctgtaattccagctactcgggaggctgaggtaggagaatggcgtgaacctgggaggcagagcttgcagtgagccaagatgacgccgctgcactccagcctggtgacaaagtgagactccgtctcaaaaaaaaaaaaaagaagaaatcatatctcttgtagcaacaaggatggagctggaggcctgtatcctacatgaaataactcagaaacagaaagtcaaataccacatattctcacttacaagtggaactaaacactgggtgtacttggatgtacagaaggaagccacagacactggggactccaaaagtggggaggttgaaagcggggtgaggattgaaaaattacctgttgagtataatgttcactattcaggtgatgggcacactaaaagccgaaacctcaccagtatgcagtatattcatgtaacaaacatgcacatgtaccctctgaatctatttttttaaaaatgtgtgtgtgattttgtgtatgtaaaagtcaaggaagatgatgttcatagaagcattcaaacatttggtatggtgcatgtcaatgtatagtagtgccaaacacctaattttctgagaatccattctgcatcaggccatgggctgagtgctaggatgctgagatgagacgacttccgtgcactaaggtgaggaaagaagagaactgagtcatcagtgtggagaagacgcatgtgaggatgaagaggaatagttgagaagttgtgtcattttttttccgttagcaatgacgttttctcctctgatggacttcaaagtgctccctcttgccggtcgcccccctcccccgcccgccccaccctccagcgatgaactgctgaacttgcagaaacccttgcagagtgccctgggcttcgtgatcttgagaagcagccaaaactggaacagcaaaaaccgtcagcgctggagtagaacaaaggccggtattatgcgtcctaaacttagtgggctcttacattgttaggatgacacagaaagcacttgtgctcagaaaagaaactgatctaaaaaggaggaaatatccttccctccttccccctcccccattgcgtgcagcctttgctgtatggaattcttcttggtgcatcagcagtttctgctgcttctcctattttattcttaccatccctatggactttgcaacactaaaacgtttgcttggtttagttggtagagttttcttgtctttggcaaatgttccagactcatctgagatccctaagtaaaagtttgtttaaagagcaattttaattcttgaccctccccaccaaaaaaaaaaaaaaaaaattcccaaaaggcacggtcgttcacgtttttctttttgttgttgtttttctttttttttttttttttttgagatggagtctcgctctgtcgcccaggccagagtgcagtggtgtgatctcggctcactgcaacctccacctcccgggttcaagcaattatcctacctcggcctgctgaatagcggggattacaggctcatgccaccacgcctggctaatttttgtattttctttacttttttttttttttttttttttgagacagagtcttgctctgtcacccaggctggagtgcagtggcgtgatcttggctcactgcaacctctgcctcccgggttcaagcaattctcctgcttcagcgtcccgagtagctgggactccaggtgcctgccaccacgcccagctaatttttgtatttttagtacagacagggtttccccatgttggccagtctggtctcaaactcctgacctcaggtgatccactcaccttggcctcccaaagtgctggggattacaggtgtgaaccactgtgcccagcccacatcgagtttctctagaaggttttatgtgtttatttattttattttattttatttattttttgaaaatgagtctccctttgttgtccaggccagagtgcagtggcatgatcttagctcactacaacctccgcctcccaggttcaagcaattctcctgcctcagcctcctgagtagctgggactacaggcacccaccaccatacctggctaattttttttgtatttttagtaaagatggggtttcgccatgttggccaggctggtcttgaactcctgacctcaagtgatttgcccgccttggcctcccaaagtactgagattacaggcgtgagccaccatgcctagccctgttttcactttttgactattatgaataatgctgctgtggatatttgtgtgcaagattttgtatggatatttgttttcagttctcttggatattatacctaggagtttttattgtggtcagaagatactttatatgatttcaatgtttaagtttattaagaattgttttggccaggcattggtggagactgacccctgacttaaccggtttatgttatctatagattccagacattacacgggacagcactgtgaaaaaccctgtcctgttctgttccattctgattaccagtgcatgcagcccccagtcacgtacccacggcttgctcaatcgatnnnnnnnnnnnnnnnnnnnntggcctcccaaagtgctgagattacaggcgtgagccaccaatgcctagccctgttttcactttttgactattatgaataatgctgctgtggatatttgtgtgcaagattttgtatggatatttgttttcagttcttttggatattatacctaggagtttttattgtggtcagaagatactttatatgatttcaatgtttaagtttattaagaattgttttggccaggcatggtggctcacgcctgtaatcccagcactttgggaggccaaggcaggtggatcatgaggtcaggaggttgagaccatcctggctaacacggtgaaaccccatctctactaaaaatacaaaaaattagccgggcatggtggcacgcacctgtagtcccagctactcggaggctgaggcaggagaatcgcttgaacctgggaggaggaggttgcagtgagccaagattgtgccactgcactccagcctaggcaacagagtaacactctctctcaaaaaaaaaaaaaaagaattgttttatggcctatcatataccatatggtctatcctgaagaatattccatgtgtacttaggaagaatgtgtattctgctgttgtggggtaaagtgttctgttggtttatagtgttgttcaattcccctaccttcttttggccttctgtgtagttgttttattattgaaagtagtatattagatcgggcgcggtggttcatgcctgtattcccaaactttgggaggccaaggcaagccttctgcgcttgttatttttagactgtgattgactgcagttagctgaaactggaaagtgaaatcgataagggggaactatggtacatttagtgtaacatgtttttctatggtacatttagtgtaacatgttttgaaatgtgtagatggaagataaaggggtttattaattggtacaaatatacagcttgatagaagaaattaggcttagtgttgagtagattagtagggtgactatagtttacaataatttattgtatatttcaaaatagctagaagagaataattggaatgttttgagcaaaaagacaagcatttaaggtgatggatatcccagttacactgatttgatctttacgaattataggcatgtgttaaattatcaaatgtacccccaaaatatgtacatctgttatgcatcaattaaaacaatttttgaaagaagtatgcttacactgtggaataggtaaatccagctaattaacatatgtattactttacatactaaccatatttttctggcgagtatacttaaaatctcctatcttaacaattttcaagaatactatatgttactatacagtgtactatacataactatacatagtgcataactatacatactgtacattgttattctgtcatgttatacagtagaactctggaattcattcccccatctgacagaagttttttgttctttgactacatctctgttatagcttcttgatgattggttctttttttttttttttttttttttttgagacagagtctcactctgtcacccaggttagatagagtgcagtggcacgatctaggcttactgcaacctccgcctcccgggttcaaacgattctcctgcctcagtctcccgagtagctgggattacaggcttatgccaccaagcccagctaatttttgtatttttagtagaggcggtgtttcatcatgttggccaggctggtctcgaactcttgacctcaagtgataacgcccgcctcggcctcccaaagtgctgggattacaggtgtgagccactgctcctggccgatgattgattcttgtgtcaatatataatctttgtctcttgtgctttttgacttaaagtttatttgtgtgacttaaagtcacttaagtctgttattagtgtaactacccgagctttcttttagtactatttgcatggaatatctttttgcatacttgcattttcaacctatttgtgtcttccacatatcataatgtagttgaatcatgttttttaaatgtatattgccaatctctgtcttttgattggagaatttaatccgtttatatttgaactaattactgataaggaatgacttctgccattttgctatttgttttctatatatttttctttttcttccattaatgccttttgtgtttattttcttgtagtatattgttttaattgcctcctcatttccttttttttttttttttttttttttgagatggagtcttgctctgttgcccaggctggagtacagtggcacgatcttggctcactgcaacctccgcctcttgggttcatgccattctcctgcctcagcctcctgagtagctgggactacaggcgtccaccaccacacctggctaattttttgtatttttagtggagatggggtttcactgtgttagccaggatggtctcgatctcctgacctcatgatccgcccacctcagcctcccaaagtgctgggattacaggcgtgagccactgcgcccagccccttttctgtatatttttaagttatttccttagtgattaccctggagattataattcatatcttaaatttatttatttattatttatttatgtattttgagacagagtctcactctgttgctcaggttggagtgcagtggtgcaatcttggctcactgcaactgccgtctcctgggttcaagtgattctcctgccccagccccctgagtagctgggattacaggcgtgtgccaccatgcctggctaattttttttgtatttttagtagagatggggttttgtcatgttggccaggctggtctcgaactctgacctcagatgacccaccctcctcggcctcccaaagtgctgggattacagatgtgagccaccgcacccagcctcattattataaaattttaatgttttgattatttattgaccatgtgtcatagtcatgttgatttgaatttctttcactattgagtttgaatcttgttgtttgttttttgtaaactgcgatttcctttgatcattagactctttattagcctttcatctgtgttgcagtttgagcctgggtccgatccaatgggagatgtctgtgtgtgtgccatggtccatcttgactggagacaggcagttcctcctactggaggacgcttgttgggccagccccagggcctcttaaatcactcattcattcagcgaaaatgcacaaatgcctactgtgggccaggtctgtgctggtgcttgggaaatggcaggaaccagacatccctgttccataccttgtgaacaaacagacttacagggtggcaccaagtaagtaagatgggtggggcgtcatctcagaacatagcttttctgctgagctgtgctggttttgttttggttttggtttttttttttttgaaatggagtctcactctgttgccaggctggcatgcagtggcaccatcttgggtcactgcaacctctacctcccaggttcaagcaattctcctgcctcagcctcccgagtagctgagactaaggcacacgccgccacgcccggctaattttttttatttttattttactagagacgggtttcaccatgttgcccaggctgggcttgacctcctgacctcaggtgatccgttcaccttggcgcatgtctgtaatcccagctacttgggaggctgaggcaggagaatcgcttgaacccaggaggcagaggttgcagtgagccaagatcacgccgctgcactccagcctgggcgagagagtgagactccgtctaaaaaaagaaaattgatatcctcacatttgcccatcatgtccttgaaatgagaagtcagattgttctctccatctcagcaacttgaccttggtgggatcagaaggccagtcctcagggcggaccctcttgggcacagtgggcccaggccctcctctgtgggaatcacggggtttagaacctttagctttcttctggaggttcacctgccctcacaggcgcttccttccaggacagatgtcccacggcttgcagatggctgggccccaggagacggtgctagcccttcctctgagagaaggtaggcgtctctcacctgcacaggtaaatccccactgaggtttgggggcgagaggaagtggagagcccatggctgaaggatttcccttgcatccttcccacagcaaccccaagttgttctctcacccatttgctgctctccttacccagtgtggcttgacgtctgggacagtggcaggtgggcagagggaccacagtattctgtcctgtctgcaggggtgcaggctgccgccaccgcgcccatcctcctgtacaacctggaggatggcttgtcagaccatcccctggaccaggggccccgctgccctgcccggcggccctgcagccctgcctcggctccagctcccacatcgccaaagaagcccaagatgcaggcacctggggaaacgtttcccactgactggagccccccgcccgtggaattcctcaacccgagggtgctgcaggccagtcgggaggccccggcccagaggtgggtgggtgtggtgggcccccagggcctgaggagactggctggtgagctgcccgaggagttggagcaggaacacctggacttggacccgaagaggggcctggccttgccagagaagctgttctggaacacgtcaggcctgagccagcaggctgcggccccagaggtgagcctgtgtccacccttggcctcttctccttggctacccatctttagccacccttttacagtcaccccaggccaccctctcctgagccacgccccagctgctcttcctcggacacttcgccttgaccatccctgctcagcccttgggccctcatggctggaagcgcaggcccccaaggccaggatgcacctcgccctgtgtctccaccagtaactcctgctgacaaatggctttgggtggcaacaaattcgatgccacttcatggggccccttgaggctttcatggctgaggttagggttatggccccggagcaaggagggatctcagagctgaggtctgggcttggttgtctgtagagactcaagctgactctggtccagtggatcgggagtcctaaatggaacttcaatgatgaacttcaaattgggagtaagctcctgctgctaggtagactgtgggacatttacaggctgtggatcgagaacagttattctaagaatgggtttcagctgtttgtaacagcctgcgagagagagacagacagacagacagacagagacacaagggagagggggacagagggaaggagagagagagggaggggggagagagggaaggagggggagaaggagagagagggagggagggagaggagaggaggagagggcaatggggaggggcacagtgggaaagggagcagatagggagggggagagaagctctttggctttgatagggaatgatgtcagatcattgagattgaaaagtgtgtggtgcaggatagagcctggtgcaggataagctgtgtggtgtggtgtgctggcgcctgtgatgtggtgttgtttgctgtctctgtgtgaagtgtctctgaaagcacatgaggaatgcctatcccatgggcacctgtggggagggaacaggtggctgggggtggggatgggggcagggagacattttaccctgcgcctttatactttttgattttttaatcctgtaaacatagtatcttttcagaaaagcaaacaaaataaataaagggcttaatttagttttttttcttttttctcctctatctttgtacttctctgtcgtcctcattcccatgtcctgtttctccagttttcctgggggggctcaggaagctacttcaacaacctggactacttactgcaggagaagaggtgagcacagggcgtggcctgtcatggggtgcttatttctgcagggttggcagcagtcccgggactcactgcagagtctggtcggagtacagcggcctcccacccagactcagcctgccctgtgtgctctgatcagtaacaggcaggtcgccagggcagggggtggcatcaccaaggcagagagcccccagactcccaccacgaacagagccctccttctgggtcccctctccaccttggctccattctgcccaactcctgccagtttgagggtgtctcctcccactcaagggttatgtgagagggaagtggaaaagcagactgttttgtggctgagggttacagcctggctgtggctggagggtcatgctgggcagacgggacttcctaacatttctgccgctgctttctaccccagtgtgcaggcacgcgttgcccattttcccatcctctctgagtttcacacctgccttctcccagcatattagcttctaactagctctctccctgtctgccataagtagtttccacggaccgctgaaggcaacagtcacgtctgatgagattggaaatccctagggaggtgcaggtggctggggacagacaggggtcgtcttcatgggggcatgctctttggtggcatgtgagcaggttgttcacacttcctgagtctttgtcctctcccgttgttgtgttgtgttgtttttgttcagtgcatgtccattgtgtttgcagaagttaagtgtgggcgggggcgatgccaccctggaacacccagctctcctggtgggaggactgatacccactctttccaccctcctcaaagttcccagccctgttggcagagagctcctcatgcactgggatgaattattctttggtccattcttggccctctggcccgccctggagtcatctcatctgcctctgccgtgcagcccctctgggctcctccgacccgggaacttgtgttgttcagctccttcacctgagtgattttctcccattagattgtacgttagggaagggaccatgcctatatatttccacggtgcccagcatggtgatgtacatttagtagacgcttgaaaatattggcaggaaaatgagcagctggggcctcctcgtgactgcttgttggtgtgcctggcattgggagggtcctgctctgtgctagtcagctcgggctgctgtaacaggatggcacacactgggggcttaaacaatacagttatttctcccagttctggtggccagcagcccaggattgaggttctggtcagtcggttcctggtgagggcactctttcttgcttcttgctgtgtcctcacgtggcagagagagcacaagctctctggtgtctcttcttttaaggacactaatcctgtgggatcagggcctgtcctatgacctcattttaccttaattactttcttactccaaatatagctatactggggttagggcttcaacataggaattctgggaagacacagacatttagtccataggacgctgtgtgctgcaccatgccaggctctggatagtggagctgatggtgcagcccctgcttccctggcaatttagcataatgatctcatactacccacactgtcatgttgccgtggaggagcccagaagagtgacacctaacttaacccggagtcggaaaaggctcccagatgtatccttgtcactgaaccttgcaagaaaggaagttttgtttggtgggagggggatgactgcacatgtaaaggtggataagacagactgtgccggtcaggacccaaattctcagtgcagaggggttggaggggcgaggcagaagatgcagccaagatgagatgtgcatggggctggagcctgaggggccttgttggacacaaggctgagtcatgggagaaactgaagcaggcagagatatgttttctcttgtttaagaaactgcaggctgcatttggagaagggatgggaagggcaagagcaggacagtgatgaggggctgagggggcctgggatggggctcacagccaggaggcccctgggaggagggtgatggggcttctggtgggtctggtggcctggctggtagacatgggtcattggaggggcccagtcacattcagctagaaatcactcagtgagtggctggctagcaggatctgagctcacgacaggcctggggtggagagaaaatgttagagaactgaggacccatgggcccaaccagggtgggcacctggaggggccagacaggggctggggaggctcccagggctctctccacagcctgggcgcaaggacaaggaaggctgtgttggtttgcagggcgggaggagggtaggggttggggctctggcaaggtaacaggtgtgtggggcctattgtgggggccagttgaagtgaggcgcgcaggggctggtggcggaaaacagagccccaggagtgaggccggaaggctaaagagagaaagggaatgagcaggagcagaggggctgccctaagtggctgcagagtcaggccatgcacgtgtcagggatgccgaggagccagggcacgagatctttcctggtcacgtggctgaggagcagaagggctagccctaggccttggtgtgtttaaaaaaaaagaacgaatccgagtgcttgcctgttgtcccttgagaggctgaggtgggaaatcgcttgagcccaggcatttgaggctgcgatacactttggttgcatctgtaaaaagccactgcactctggcctaggcaacacagtgatgtctggtatcaaaaaaaaaaaaaaaaaaaaaaaaaaagaccaaacagggtacacaagtaaagatgcattggaagttgtgtggtgagaaccatcttctggcctgcttgctcctctctgctcatttggggaaagcacagtctatgtaatgcaacccgtccccattgccttaaaaatctgtgtgagcggcttcacaaggagaccagccaggacggcgcagccctctggtcttgctgtgttggtggcaacacctgcagcccagtgacagggttgcacgatggggaacaacactgacccccggctctggccctcgacttcctatagggaacaggccctggagcaggagcgagagaggctgcttctgcaggagtgtctcaatctcaactccttggatcttgatgaagaggaagtgccactcacacccgagcacaggtgaggggcaggggcctggcaccagcctccgaaggggaaagactgaggtgccaaccccctctggttttggacagagttttgaccaacatggtacagtgatttgtgtactatttgtgaattctaaagctacctctttctcttaaagccacattcactcattgattcaagaaagatctgatcacctactgtgcatcagggtctcatttgagcctttgccacacagggatcataaaacacagcttgctctgccccaattatctgcccaaattcttagaaacagatctcttgggaaaataactacacaaaaccacaatctaaatgaaatctgctttcaaggggaggttacgaccatgtgagatttttcatcttcccctaactggagaagagaaagtagctctgagtgggggccctgatttaattgggccattggctggagggagggctggcttcatctctacttcggagcatcagagatgcccagggccacaaccgaatccatcttcagggcacactgttttccatccgtcttggtctgttggggctgctagaacaaagggccatagactggtggcttctaagcagctgaagtctgtttcccacagttatggaggctggaggtctgagacccgggagccagcagggtcggtcctggtgagagcgctcttccaggttgcagactgcctaagtctctgtgtcctcacgtgacagaaagaggcaagagagctctctggggccctttcataagggtaccaatcctattcatgaaggctccaccctcatgcctcatcacctcccaaaggccccacttcctaataccttcaccctgggggtgaggattcaacacatatattttggggggacacaaacataagcctgtaacaccatccattcacccatttgtccatgtgtccatccatccactcacccagcagacatttatcgagtgccaactatgtgcgaggctctgctgtagcttcgggatgtggcaggaacaaaaccagacagatctctgccttcccactgcttcagctttccttccggagacaagcagtaaataagatcagtgaagttgtgctgcaagggctcctgagaaaggctaacgctgggggcataaggagtgctgggaaaggtgtgggctctgatgatgtgggctctaatcatgtgggctttgatgatgaaggctctgatgatgaagggtgtgggctctgatgatgaagggatgtgggctctgggaagggtgtgggctgtgatgagggctcagggaaggccttgtgagcgggtcttctaagcagcacctcgaggaggtgagagccagttccagggaccctgctgtgggagtgcacctggcgtgtgggagcctggaggagggggctggtgagggataggaggtgagggaggccaggggcaggcactggctcttggaggctttcctctgagttaattggacacatgtctgcataggaccctctggccgctgtgttgaggatagaccagttaggtgtggaggccagggcaggagggaggggaccaggagcagaggaggccttggcaggaatccaaaagtaatgacggtgcttgaggatggggtggacactgaggagtgggcaaattctgggtgtattttcagggtagaagtgacaggatttgctgacaaatggatggaaggtctaggagaaagagaggactcaaaagggacccccggagcttaggtctgagcaactggaaggttggagttatctttaaataaattgggggaggctgggcacggtggctcatgcctgtaattgcaacactttgggaggccaaggcaggaggattgcttgggcccaggagttttaagaccagccccggcaacacagggagagcttgtctgtcctaaaacatttttaaaaagtacacagatgtgttggcacatgcccgtagttccagctacttgggaggctgagataggaggatcacttgagccggggaggttgaggctgcagtgagctgtgatcacaccactgcaccacagcctgggtgacacagcaagaccttatctcttaaaaaaaaaaaatggggggagactgattgactgcgctacatgctgcgggtagggtgggcttggaatcaagggttcatttggggcatcctggggcaagatcagggaggctacttggagaggcaagcttgggagtcactgtgtacgtatgacatttaaagccacaaaaccagggcagagcatggtggctctcatcttgtaatcccagcgctttgggaggctgaagcaggtgaatcacttgagccaaggagttttgagaccagcctggccaacatggtgaaaccctgaaccctgtctctactaaaaatacaaaaattagctgggcgtggtgacgcgtacctgtaatcccagctactcaggaggctgaagcaggagaatcacttgaacccgggaggtggaggttgcagtgagctgagatcgtaccacctcactccagcctgggcgacagagcgagactccgtctcaaaaataaaagtaaataataaataaagccaccaaaccggatgatcacctggggagagagaacagcaggggcccaagggtatggagcccacagcatttggcagccacaaggaggagatggcaaaggagatggagcaggttgcagggaagccagatgcctgggtgccaggctgctggcccagagtgggaatgattgacgtatgatttagaggtcacggtgccctgcacaggagcagctctgctggaggctaacctgactggagtgggctcctggaagaacaagaagggacgaaggagaagaatgggcagtagctgaaaagggaagtggggtcagatcagtggggtggtttctttctggcttttctgtttctctttctttgatagagagagtaacagcatgtctgtaggccaatggtagtgaccaagggagcggggaatcgatgctagggaggctggaggggaaacttgaagaacatgtgcattgggctgcaggggaggaggtggccccagctgtgtggccagggtgggtcaggcaatacaccccgtctcctctgccacctgggccttgctgcttctgtgagcctggccgaggtattatttagtgctggtctaagcaccacatgggcgaagttcagttgcacgccctaggttagcattctgcattcactctttaaaggcctgttgagtgataacacacagagttcctggtggagggatgtggcctgcttttaggatccccacattacatgggtgcccagagatagttatgagtcacacctgggctggccatttaccttttttttttgaagtttttctgataatcatctctctcttttattttatttttcccccaagatggagtctcactctcgcccaggctggagttatcttggctcactgcaacctccgcctcccaggttcaaacgattctcatgcttcagcctcccgagaagctgggactacaggtgtgggccaccacacctggctaatttttatatttttagtagagacaagattttgccacattggccaggctggtcttgaacacctgggcaccagggctcaagcaatctgcctgcctcgccctccccaagtgctgggattacaggcgtgagccaccgtgcccagcctgataatcatctcttgactaaatcaaggatcagcaaactttgtgaaaagtttgtaaatagcaaatattttaggccttgaggaccaggtggtctctgtcaactctgctgctgcagcaggaggctcctgcagatgctgggtgaatgaaggcgcatggctgtgctgcagtgagcccttgttgcagaaacaggccccacacaggactcggcctgcaggctgtactttgcctggcccaaattagaaggacccctgcctcctgactggtgccagtttttatggtgaaagtttaggaatgtgttgggatttgagcagccgtcccaggtggacaaagagagctcctcacacactgcccagagttccagggaaaggcagccggccgtgacgtcccacatggactcccacgaggcaggtgctgcttcctgtctgatgttgcaggaagcatgtggatgggcatggtggggcatgtagactgaatttaattagcgtgtttagggccaaaggccttcctcggcaagagcactttggcagcattatatttgatgaaagcaactttctctctgagctgaggtgcatggatttggtttccaggttctccactcactagctacatagccatggaatcaaaccttttaaaacctttttaaaaatctctgcagcaagagtaattcttccagctctgtatctttctactgagtacctccagcattccggaagtcatggcttggatgttttgaaactcctcacagaaaggaagttatctgtgcaaccagcttaacgcagaaggtagtcctggctttgaaaacactggtaatttgctgggcgcatgacgttttctagtggtgctttgagaaagcctctttgacagcagccactttgaggtggtggttttgatgtgggatcatctggatgggactgttcagctttctgctttacaaaagtcattcaccagtgtacaaagccagcagcctcttcatccctgaatagggccagggaagggggtgcaggtcaggaagggatgcttagggtgggggctgaccactgcctgccagacaaggcgtcatctaattgccacaactgcccgtcacagataggacccctgacagtcccgagcaagcatctgtgcatgctctaacaatcggcttgcatcttgaatgggtgacatcctcaattctccatttcttaaagttaaaagaccttgcgtgtgtgctgagcctggggcagaggcagatatttaaaccacaacatcatcctttattctcagctctaggctgcacaggaaatccccaattagatgtataagagtcgcctcaggactcttaataatgcacatacattacagccagcatcacagaagtccctttaaaagatggttttagggacagggacaggacccctttatagattagcctagttcttataggcttttttttctttctttctttcttttttttttttttgagacgaagtcttgcactgttgccagggctggagtgcaatggcacagtcttggttcactgcaacctctacctcccaggttcaagcaattctcctgcctcagcctcccttttgtatttttttccctttgagatggagtcttgctctgtcacccaggcaggagtgcagcggtgcaatctcggcttaccgcaacatccacctcccagattcaagcaattcacctgcctcagcctcccaagtagctgggattacaggtgccggctaccacgcccagctaatttttgtatttttagtagagacggggtttcaccatgttggccaggctggtcttgaactcccgacctcaggtgatccgcccacctcagcctcccatagtgctgagccaccgcacctggcctaggcttttaataatttgttcattttttcaaactaaaaaacaatttaagcaatagatacaaaactaatggcaaagacatgaaccaaacaggaaattgttttaccgtttgtgtggtggtttggtgagatgcttcctgaagcccgcagggtcagagtcctcccgggtctgcagcatcgttcccatttgttgtgccatttcattctcaggaccaccctgtgatgtgggtcagggccgtaccttgggtcacttggccagaaagtgagacaggttccatgtgctaggttggtgggctgcaggcgacgccacaccacacccagtgccagttgctcatgtccagatcctaagggggcccctgggctgttctgcccctgggtttgctgtcccaaacagtgggcctagccggaaaccagggaatgggccgtctcctgattagaggaagagaggcagtgtccagagcttgttttattttattgttcctgttgttaaatttgtgttatattgctataaaatcaagcagaacatagttatatgaagtaaagaggaagttgccctcttttcctctcccctccctctgattctgctccctgggatgaccctcagttgtagtgggatatgtcatatgctgggggtgggcgttgcacgtgtctgagcatgtctgtgtccgtgcatatgtgtgtaggcttgtgtgtgtgtacacacacacacacacacacacacacacaccctctgctgctgttttcacccaagaacttgggctcagccacgttgccagtccttctttatgtagatttagctcattcttgggaaacatcttcgctgcctcccttttccccatcctcatttcaatgggtcattaagtcctgacagttttcacctctctccgatactgttgaaatgtatcccttctcctcgtcccttctttgtccatggggccagctcccatccactaaatcagactctctgggccggaccgggcccaggatctgcattgcagcagctgtctgggtggtcctcagagccctggagcttgaggactgctggccctgagagagaatcaggctccttcatatgggctcaagaccctcctgcttccgcccacgcccatgccacctgcttgccagccttcctgcccctcccaggatgccgtccccgacactggccgcacccagcgctcctctcctgggcccttatggagccgccctgtaggcctctctgtccactcgccagaggggattgccgtgatttgtttatgcccttcctgggtggtccattcctgactcaccctccgtacctggcattgtaggtgtgcagtggaagtctgacctgacagatccagtgggtggggttgggtcttctggctgctggactggtgccctgagcaagggataggccttattgatgggagactgaagggctcctgcgtgcctaggtgggctcttcctccatcagcaggtggcgctgtccccttggtttgccgcaaggactgcaaggcagggagcccgtggcccccctctatccttccctgggctaatggccatgcctcaggccgaggtgcatctgctgatgcccggccctcctgccccttgccttgccaggatgctggtggaaaagtactcagtgtccctgcagaccatcccgccggtccatccaggtgagactgtgtttctgcccaggtgtcaccccctgccatgcatcctggactcctcactcctgaagccacgcagccacctggaagggctgttcctcaggtaagtgtggggaggaggggtgagggggtggcgcagcctgtccaggacccctccctcctggagtccagggataagggccaccccaaagggggaagttcgaagaggtgatcaggccaatttgaatgtgtcagtttttagagatataggtgacattgtctacttacagtatttcatttactaattttgttgcacataattaaaaaattcccacattatagcagatagccagttgtgcatttacaggttcatgttgcttttccctcccctacaccccagtgtcacagaacagcagactcaccatgagtgccttggggctgtgtctccatcagcactggccccttcctgggccatcgagggcacgtgatgggcccttccacatacttgttggaggcacttcagtgtgtgtgtgatgcagacactgaaaagcgtgtccccagctgcaggcacatgctctaacaatacaacagctgtcttattctttttgggagtaaatgcatgatcattatcacgtaaccattgactatattgctttttgagagaatttttaaaagatttaccacaaccttatccaacacttggaattatgagctaatatatccaagaagaagaggaaagaaagtcctcagggttcagtgcagcggcgtctgctgggtgctcacacaggctggtgccctgtggggctggaggccagggcggtggagaaggggctgtccttgcccacctggtgaggaacacagaggtggagctgctgctgtggtctcttcggccaccttaggacttgaatgccagagtcttgctctcttttccagttatacagggcttatgtttatttcatgaattccaagtccgtcttattgtatgatacaaagattactgttaacattctgatatgcttcctttgaaagtttttatcgtggaaagttaacaaacacatatcaaagtatagagaaccatataacgtccctccacacacccatcactcactttcagcaaggatcaactcaaagccaatcttgtttcctctcaacctctgcctaccaacaccattattgcaggattactttttttttttttttttttttttttttcaaaactgagtctcgctctgtcacccaggctggagtgcagtggcgtgatctcggctcactgcaacctccgcctcctgggttcaagcgattctcatgcctcagcctcctgagtagctgggactacaggcacctgccaccatgcctggctaatttttgtatttttagtagagacggggtttcaccatgttggtcaggctggtctcgaattcctgaccttgtgatctgcccacctcggcctcccaaagtgctgggattacaggcatgagccaccgtgtccagccacctcaggaatacttttaagcaaatcctcagacacagaaaatttaatctacaaatacttcagtttgtgtctctaaaacataagactctatttttagacataacttcgatattactatcatacctgaagaaacagtaatttcttaatagtgctaatatcagttagtgctcagatttcaattttttttttttttttttttttttttttttttagtattttgagatggagtctcactctgtcgcccnnnnnnnnnnnnnnnnnnnnnnnnnnnnnnnnnnnnnnnnnnnnnnnnnnnnnnnnnnnnnnnnnnnnnnnnnnnnnnnnnnnnnnnnnnnnnnnnnnnnnnnnnnnnnnnnnnnnnnnnnnnnnnnnnnnnnnnnnnnnnnnnnnnnnnnnnnnnnnnnnnnnnnnnnnnnnnnnnnnnnnnnnnnnnnnnnnnnnnnnnnnnnnnnnnnnnnnnnnnnnnnnnnnnnnnnnnnnnnnnnnnnnnnnnnnnnnnnnnnnnnnnnnnnnnnnnnnnnnnnnnnnnnnnnnnnnnnnnnnnnnnnnnnnnnnnnnnnnnnnnnnnnnnnnnnnnnnnnnnnnnnnnnnnnnnnnnnnnnnnnnnnnnnnnnnnnnnnnnnnnnnnnnnnnnnnnnnnnnnnnnnnnnnnnnnnnnnnnnnngtaaccccaacctttgggaggccgaggcgggcggatcatgaggtcaggagatcgagaccatcctggctaacacggtgaaaccacgtctctactaaaaatacaaaaaaattagctgggcgtggtagcgggcgcctgtagtcccagctactcaggaggctgtggcaggagaataggcatgaatccgggaggcggagcttgcagtgagctgagatcgtgccactgcactccagcctaggggacagagcgagactccatctcaaaaaaaaaaaaaaaaaagattcttcaaatcagaatctgaacaatgtccaaacattccaattagatgataaaatgttaataatgaactaatactttattacattgatgccctaacatatttaaccattttctcattttttgaacataaaagttttttccaaccttcctttattataaataatacggcggggaatattggggagtatttgtctggaggtctaaaatgtgttcatagctgcagtgtgaggttattgggtctgagtgtaagaacattagtaagggttcacatcaccatgttggaaaggtatttaataaatagatagatggtgaaaagaagaaagagctggagaaaggagagagccaaagaatgtctgggcaggaactgaggtgaacagcggagaaaggaaggtgtcttcctgggctgcttcagccttggagtttgtgccgacagcaggttttctgtcctagagtggatggcgtgcaggaagtgtttgacagatgagatggcccatggagcggtgacctgggatcagagcaggcctgccaaatggggccaggtggctgcccagcttccctggagtgagggtttcagaccctcctccctcagatatgctaatgaggctcagtagagagggtgttgccagtgcctcagatctgcagtcttgggaatcggctttgggctttctggagggaatgcccgctgtgtgactcgggctcagtcctgggacctctgccgggcagtggcgaggcccacttcctggaggtcaccatttagccctgggtcatctttcatttcctccttgtgccaaggatttcaaggccagacataagagtgggaaaacactagtcagtcattcaataataaccttaccatattcagccagaaacatggccatggaggcaggtgacaaggggatctcttaagaagcagtcagccggggcatggtggctcatgcctataatcccagcactttgggaggatcgcttgagctcaggagttctagagcagcctggccaacatggagaaaccccgtctcaacccaaaaaaatgcaaaaaaaaatgagccatgggtgatagcacacctgtggtcccagctactcagcaggctgagaagggacaattgcttgagcctagggaggttgaggctgcagtgagccgtgatcatgccagtgcactccagcctgggcaacagagtgagaccctgtctcaaaaaataataataaataaaaagctgtcagtccaattccatacacaaagttgctgctgtggtctgtggccatgccaccctgaacatgctggatgttctctcatctcagaggctgagcagggcccggcctggttagtacttgggtgggagaaagttcatgctgtgggagctgacagctaggttttcattttcctcgttataccacgtttatattcctaactttctacagtgaacgtatatcatttttatcattagaagagaggaaagtaaatgccattttttaaaaaatcaactcttgaaatagattcacttctccttacctttctgtgaaagggggaaaatatctttcttccctctgaacaaagtaggcaatagcacaaattaagcagtttgtttcagactgcagagcgagcttgggtgggcttggcgtctgcgtcccagcagctgtcctgttggacctatccaggtttatgtgcaagaaccctcttcccggggagcctgccttgggagtgcatgtggtccagatgacctgctcatccatcaccaagctagctgtgcatcccagggtcagtcccctgccaccacagtcacatgtcattatgacggaagctgataccagctgattgcaggagctgaacttttttcctccacccttgacagtaattcaaaaggaaatccaatgctcctgcatggaaaagtgtcaggaccaaagcccacatcccactcgggggcggaagttggaagggtggagtttgtctgccctgctcagttagtcataggcccctcacagtatttgcaaggacattggggtgtgcgtttgtcctctgggtgcatctgccactgttggtgccaggaccagcgtgctttccacaagcccgatgcatgggccaggccgttcctccatgaatatccagcaggcaggggaagaaggaggtggatgaggctcagcttctcccggaggcccggcagccccgcctcttgttttgccactagcttctcttcctggaggaacaggccagggttgaagcccaggtgcaataaacccagcagttctgaagtatggagagggctgagccttccagctggctgcatctgccccccaaaataaagagcaagcggaggtagcaagcagggccattatgggatccctgagtttctgcctgtggtaacactcgcttatttatttatttatttttggaacgaagtttcgctcttgttgcccaggctgcagtgcaatggggcaatctcagctcactgcaacctctgcctcccaggttcaagcgattctcctgcctcagcctcctgagtagctgggattacaggcgcccaccaccacgcatggctaattttttttttctttttttttgagatggagtcttgctctgtctcccaggctggagtgcagtggcgcaatcttggctcactgcaagctccgcctcctgggttcacgccattctcctgccttagcctcccgagtagctgggcctacaggtgcccaccaccacacttggctaattttttgtattttttagtagagacggggtttcactgtgttagccaggatggtctcgatctcctgacctcatgatcttcccaccttggcctcccaaagtgctgggattacaggcgtgagccaccacacccggtctcgcgtggctaatttttgtgtatttagtagagacggggtttcaccatgttgaccaggctggtcttgaacttctaacctcaggtgatccacctgccttggcctcccaaagtgctgggattacaggcatgagccacgatgcccggccaacactcatttttatttcatttttttcttgtttttagtcaggcccatgctctgctgcccatgctggagtgcagtagtacgatcacagctcactgcagcctccaactcccggctcaagaggtcctcttgcctcggcctcccaagtagttgggaccacaggtgtgcactaccatgcttagctaagttttgtatttttttttagagacagggtctcactgtgttgcctaggctggtctcaaattcctggcctcaagctatcctcctgcctgggccttccaaagttctgagattatagacatgagccactgcatctggcctctcttatgtttaaacaaagaaagagaaagcaaaaggccataggtgaacgctttggttgctattggtttctattgtatttaggcattttattcagactgatttgagtaacttggcaaaggcccaggagctgatacgtataaataactacacttggtgtttatccttcggccatcacttgggattctaaaggcatttagagaccttgccctctgggactgctgcccataaaataaatgaggaggttgaggcgggaagaatcttcccttgggtgtgataaggaacagaaattccaagatgaagctggtcagagctctgcttaggaaggcccgtgtgctgagcccagctgcccccatttcctgtcactggttttgcgggtttccccgttgtagctgatgtccttccctcgcttccttctgctccagtgggcggcgagggtggaggcagacacctgcccactgtcattgctgtcatggctggggattagcagctccctcctcatctctagtcacagctgaggactccgatgggaacctcccttcatgggatcctcaggtctgacagctgggggcttcccactcagccaggcctgcgtggtatctgctgccgatggaggctctgtccctctgtctctccctccagggccctccaacattctcaggataacttcggacctcagcattggcttggccgtggacagaggcacccccttggacccagcatccgtgttcttgatgtggggacgtgactctgacaacagccaattctgtcacccaaggcgtttgagctttcactgcacacacctcccaccccctttcctttttgccttttcctccaggcttcccagcccaggtgctgctgttgggatcctcctcctttccccagagttaaggcattgtctgtgcacaaggcccattccctgcccagcagccaagcttgaggtcaccctgtgataacctgaagggcgtggaagggcttgtggctgagccaaggagaagcagcactcccgtcccaccgagcatgcactcggcctgcagaggggagtccttgcctctaaccctaaacacagaattccttgaaagccagtcacctcagggcagagcaggactatgtcctttctggctttctgttgctcctggtcccatagacaaaattttctcagcagcaatgaactcagaggccaatcaatcatttctctggcagaaactgcaaagcccacatagcagaagggagatgttgcaactgtggggtctctcccttggagcagcagttagaaatgtgttgatctgagccaacagggccttgtacaatcaattctcccactaagaaactggcggggtgccccctccagcagaatgccagagccagcgtctcctcagagtccctgaagcgccagcctcctcaccacatggcccttgtcggggttctgccaacttgcaaggtcctccagacattgtttacatgggtattgtctgcgttcgggctgctgtgcatgttcttgaaccatgcgtcttgctggggtcagtccctgaaagtctccatgtgaccgggcatgtggatagaatggagcatgccagcagtcctggggtgcacgtgtatttgtatgtacaaacgaaggtctatttcagggtggtaaacttcacaaccacaggaacaaagctgctttctcctctgaacttaaatgacttagagaaaaaacatgcaatttgtaaactgcctggacattctcagagagacagcagcttggctcagaggataatctttgttttgtagcattctgttcctggcagattaaaaaatgatgtcctttttaaaggagaaggaggagaagcagaaggaggaggttgggctgactgaaaaactttttatctagggtggcaacgttaagtactttctgaaatgttctttgcatgcatttgggccattaaaaagaaaaacaaatgtgacttacgttttcatttcctggaatccatgttaatgatctttgggacgtggtctagagagagcaagcaaagatggtggtcacaaaatgcgcaggacgtaggagaatcctaccccaaacccaggctctctggggatgaccaggagctcaggaacggtgacaaagtccagccaaccccctataaaatgacttctgaagcaccttctaccagaggccctacaaccatatgaaacatttcaacaactcattttgcaaagatctggaatcttgtaggtcaaggtgatctaccgggtcagtggtccccaaggcagggctcatctccacaccagcgccgattttgagagctcctgttaggaggaagaggcccgagggggtggtgtgaatgggcacacggtcacggccacagccgcgtggctggtctgagcacgcccccatccctggaatctgggacacttgcagctcacatggtttctgaagaatcctctatggaactcttgtttggtatttccttcccagaatgtcttcatcccgggcccctttctgttattttccggtcttctcaggtgtcccctttgtatctgaaaaacataaggcagagcagaaacgccctgtgtaaccagatcgcgagacgctggcctcgcgggggtaatcgtgcccgccccttgcagctggaggaacccgaggctaagacacccactcctggcctcactcctcacctttccacacccttggcaaatattccactttcccctgtggtcaaatggaaagggcagactgcactgccccaccatgtttttttgtttgtttgagacggagtgttgccctgttgcccaggctggagtgcagtggcatgatcttggctcactgcaacttccacctcccgggttcaagcaattctcctgcctcagcttcccgagtagctgggattacaggtacatgccaccatgcctggctaatttttgtatttttagtagagacagcgtttcaccatgttggccaggctggtcttgaactcctgacctcgtgatctacccgcctttgcctcccaaagtgctgggattacaggcgtgagccactgcctccagccacccgccatgtgttttaaacaccatgaggtgtgttcacgcaacattcaagaagagcaggtgattctgatgctagcctgggttcttttccttctgacagatcatgcactgagggcttgaaaagcacatttgtctctagcgttacagatatgcttcccaacagccagtgaagctgggtagtgacagcctcccgcggtgtcaccgagacaagtgtgctggcacagaggcctcccctaacctcagccctctgccccccagctccccgccagcccaacagctctccttcctgcgcagtggcctcctgaacatcctctacctgcacatgcctgactgcccggtgtccctgctccagtggctgttccaggtgaggaccgcaggcctgccactaggtggcgggagcgctgcagtctggtggcccggcaggcccacaggctgaggggtgggcacttcacctcttcttgccttaggtgctgcttggctgggctcaggctgggaggagggaggagagctgattgggcatcgatccccacaatggtgctaagaatgccaaggccagggaggtgcagggggttcgcctgtggtctcccagagcggcgagcgctgggagcctctgcttcccccgaaggtgtgtgtctctgggtgctgcctgtgccctcacgtggctttcctgagggacctggtgtacccagtggacttacggtctaacctctcagtgaatcggtccaagcccctcaacaagtgcttcctatgcaacaaagctaatttcttcaccagcggtcacaggtccctcatcccatacgcagcgggagggccgttcagggcccacggcaatcctgcagtgcctggtttggatccctcgtgaatttggagccgagggtgcttgggcgtttgagcgtgtgcttcctgtgtgcagttgtagcttggctgggaaaacctggaacggctgctctggctgtgctgttttttccctcctggttgctgctagagcgttttgccataggggaacatacattttgcccagggcttgacacctttgcacagagagaggcagtgagaagccagcagggacaggagccaaccgctgtgatctgaatgccaggcataaggatgccgtcctggccttggtccccacccagaatcgtccctgtctggggacaggtgggtcacaagttccagctggtcccattcctgccagttggagcctggaccccagctgtaaatcagagccatcatgtggggcggattattccaggaactgcttggcctcggcaggctggctgcagtccagagagagccctccagctctcccttcgtgctctgggtccttcaccttgctcctccttaccccggaggaggaagacatgcagcttctggggccctggtatgtagctgctaaccttgtcagcccccaatcccccacccaaggcccagaaggagcagtgggtgagtaatggggaacagtggggccattattccccacgctggcggtgcagcccctgctccttgcacagtgtgtgacggaacacacaatcgagcattgggaggcacaaaggacccatctgagacggcacccacagaggggccctgcgtcaccctgacactggcgtggagtgccttcccgggggcgtgtcggtttcttccaggttcagagacccccatcctgggaggcacagacgagccttcccctgcctctttccccgtctccatcatgctgcgagggggctggaggggagaggagtgcaggacccagccctgaggtcagacagacagacttggtgtgagttctggccctgccacctactcctgtgtcgctacagacaggtttcttagcatcagctctgtgcctcggagccaggcctgatgggcccatgtggagttaagtgggacatccgtgagctgccttgtccttgtgcccccacagagctctgctctgggcctgggtgtcctctgtgaggcacgctgttagtgcagagttccagttcacattctgcaggaaggagagacaaaagctcccatcccccatggctgaatccagatccatgaaaggggtgcactgtctttggggggccttctgggcagtgtcctcaggggacttagaacctcgagcagttactggggactgtggttgtgggaggcagaaacccatgggggctcccttctgcaggtgcgagggtggttcctgaggtcccagggtaggggcatgctgggccccaggaggagctggacccagggatggggaagggttgggatcctaggactggcctctgctgctgtctccctgcaggttccatggccaagtaaggccagacccttttcccaaatctggttcctcaggaaggagaatctggttaggctaagaggggttaagtggtccccttgtccagtcaaaggcaactcgggaagtggggtcccagggctgctggggccatgcctgtacctggggtccctactgagccagggcgtgggtgaggggggcagactgctccaaccctgctccttcgatgttcttggaaaggacagcctgagttctctctcagggactcgatcccgtgtactcctccctggggctttaatagggtgtgcatgggcactggctgagctgtgccctcgtgtgggccagccttgccgggagagtggacatcagcaggaggtgtacaccctcaatgaatgtatgttcttgttgggagagactcaagtgttcagccatgaaaatgttgtaggaagttacaacaggaggagaaaggcagagttctagatgccgaccggagggcatccacgcaggcttactggggggggcgtgcttgggaaccacacctgtgagggagggagagtatttgcccccaggagtcccactgggctctggagcccggtgacccctttagagttgacccagttgaggcgaggtctccagcctcggccaattatcagacgcagacacttggtgagggctgtgaccttgcactaggtgctccctccaaggtcaaggctcagagagggtcctgggctcagggccctggcagcgacactgcccagcccctggaggaacaagagcctcagtcctgaaaggagatgtgcccacagtgcccacaaggcaaacttttctgggtactggggaggaacgatgtcatgcacagcatggctgccactgtcgtgaacttggtgagtgcccctagaccagatggcacctgtgggctgctgctgtcccattgcttattcccttgtcagcctctctgcatgtttccaaaccccagcttctgactgtcaggctccaggagcattcagataaggatcccagaaatgaccaccctgcccttgtttgaggacctgtgttcagtaccaaggaccgtctaagctggtggtctcagatgacagtgtgttaaggcgctgacctggaaatgatttgaggatcacagagagggcccaccctgtgattgtcctgctgcctgtgatgagtgcaggcatgctttctctccccttacgctgggccctgccctggaggggcatggctatgaccacagggagcaaggggcagagggaccaagacccccatgccaggaggtggacggagtaggaggtttcaagtggcacagacctgggtgtctgggcctgagtgctggctttgccgctcaaggctgtgtgactctggcaaagttgtttgacttctctgagcttggttttccatcctctaattggcaacaatgacaatgtccttctaccacacagacttatgataattaaatgggatttatttaacgtggagtaatagaagtttgctactattgcttcttaggaatgacccagctcaccaggtttttgtttttgttttttttttccacctagctgctgacatggcctccagaaacgtctttgggagcctttggtcttctgtgggatctcattgtggatggaatcttccttcagcctggtcagtactgggatgcagggtggagattggcgcactgagctcccaagcctgtgatacgtgactctcagtgcccagagcccagctgcaggcgagatgctggtgggacattgcatccagggtgtagaggcatcaggccatctttggctcaggctccagcattagtaaaaagctgaaccaacaggctcctcggcaccttgaactggcctcagatctcagcccctgtggccacggccaggctgacctcacaggctcttgggatcccagagcagtccaggacagtgggttcagactgagacagtctctaggtctgaggggacagctcacccccaagtccttcctgaaagcgccggttagcttgagagggttccaggaatatccgcatcaaatcagggtgctccttgggttggagtcaccaaagggaagagtctgaagctgtctccctcactgacagccttctttggctgataggacatccacagtgcccctgagtttggtctgggtgggaatgagagcctcaagctggtgccttggttgtggcatttaggaggtatatttaattcctctttataatgcttttggatgttcagagttccacagaaggaattaatttccccccctagtggctgcaccctccctagactgtcatcatttggtacctgaacctagacactttggcaccaaaaaatatcatgtaaccagttgaaagttgcttaagcagacagtaagagggactcccaggtggtcagaccccgcctctgccccagctgtaggctgctcaccccagagcaagaaagcacatggccctgaaggccaaggccaaggatgtaccatgagcccccagccctttaagtttctgcttttgtgcctcttctgcttcaggagttggctgagctggagccatctgtcaaattagagcattccagactcctccgcccctgccctccatggagccctctaagcgaggtcttctgagtagcaccagtctcagtgccctctcccttttcgtaacctctgcccctgtagcccccgatgcactttggagccccaggggccgcctctgcggcatgcctgccctttaggggaacagaggcttcccttgtcctgctccctgcagtggtatgtgtctcctccgctgaggcagaggggatgccccactctcctttgcttcttgccacgttgtctctgatgcgctccccattaggaaggatcagaaacaagctcttgagtcccctgtcagcttagctctggctcttctaactccagagcatctcctgtggccactacctgagagcccagcctgggattgtgtttccctgcccaggggaccagggactggcctagagaattccatgcctggggtcgggatctcaactggtatggggaaagtgagaggcccggtccattagagaactgaatgcagggacttgagcagatagttgcgtacccaggttcttagcagcattgttcacaatagctaagaggtggaagcaacccaagtgtccacccgtgaatggataaaccaaatgtggtacatacatacagtggaatattacttggccttaaaaaaggaaggaaattctttgaatgtccatgatgtattattttaaaaaaagaggaaggaaattctgacacatgctacaagatggatgaacattgaaaacattacgctgagtgaaataacatacaaaagaacaaacacgtatatgagttacccagggtagtcaaattcatattccatgtatatgaggtacccagggtagtcaaattcatagagacagaaagtggaatggtggttaccgggggctaggggaaggagagagtggggagttactgtttaatgagtacagagtttcagttttgcaagaaaaaagagttcggagatggatggtagtggtgattgtactacagcgtgaatgtacttactaccactgaactgtgcacttagaaatggttaagatggtaaattttatgttatgtgtattttaccacaacttaaaaaaaagctaggtcaagagcaaaagggccaggtgcccagagagaatctgccaggagtcaggactaaagatcaactgccatttcaggaagcatttctaaggttaaattagatccaggattgatgcagaaggaagtcatttcctcagggtttcactaatagcctagggctctgagtgtctgagaggacagcaggcctctggggcacagagctcaggatagactggggctgcctcccttcacccgtatctatgatttgtgtgtgcgcgcgcacgtgtgtgtttgtgtgtgtgtgttcaagccgcttctcatatgtaaacaggagatttgtttgtgtgtaaacttccatcctttcctggagtttgtggtgaccagcagttcttcccagactatcctagggagattcttacgcacttgcctttatcccaacctgctgagtaaggaaagagttgaggggaccaggacttaagagcattgactattacgggtgtgctctagtgactggggctgagggcccgagtggcccagggcactctagtgtgtgtgtggggggtggggcggtaacggagaattgtattcctggattgagaagcaacacgtgtacatgtcagctgtgcagagagctcagtgcactcagagaagggatactctggcacattgccatgcctcattgcagtgagcattcatttattcagcaaagacacattgagcacctccttcctcaagcacttcgctagatggcaaagagaggatcagggattaataaagtcctgttctcaggaggctaataggtgggaggggattaaatgagcagcgaccatcagagacagaaaggaggcaacgggaagaggaattacttgtagtcaggtaggtttgggatgtggggaggcaggaaccaggaagtgctttgtagaagatgagacagttgagccatctgtaccagaaagcagagactgcaaactcagttgcctacggggactgagtgagcaaagtctgagagctcctgcctgatgtaaaggggctgtccacatcaggtttggtgcaggtaaacgcaggtctggtattcccaaacctcttcattttcaagagaagccacattttagttaggtcgtattttgactattgataacaaataccaagagcagtttgttagctcacatgacaaggaattcagaggcaggtgattctgtgacacgttcagtagatgcgcagtctcagggctctggattctgcatgtgtcttctcactacttcctctccgggttgcagaatggctgccgtagctgccaccaccactgtgttctcaggagacaagagtgttcaaggcagcaaaggaaaggatgggacatacgaggtcactgcttctcatactttcccctctttttatcagaacagtttttccattttgtttcattagaactggggtcacgggctttagaggtcacttgccatgttgtttgtctgtccagtgccctttgaacatcacggctatgtctgaagaatttccagcctcatgaatcctatccctttagggttgaatgcatgagatttactcttccagtcttttttttttttttttttttttgagatggagtcttgctctgtcgcccaggctggagtgcagtggcacaatctcggcccactgcaagctccacctcccgggttcacgccattctcctgcctcagcctcctaagtagctgggactacaggcaccgctaccacacccggctaatttttgtatttttagtagagacagggtttcaccatgttggccagtctggtctcgaactcctggcctcaggtgatccacccacttcagcctcctaaagtgctgggattagaggtgtgagccaccgcgcccagctgggatatagatgtttatgtgagatgtcctgttggtaactaactcagttaaaacaacaagaaaaaaccaccgcgaacccatctgcagactccattcaattcagaccactgatctgcagcctttgggcggagtatcagggtatacagggatgcaagggaagcagggagcagtgggaacaaagacgaggtggaagagtaggggctttccttgaagggagcagaggaggaaataagacgaggtcttgaaggccaggtcttgaaggatagtgggggccattgcaggcacaatggagctttattaatatttgtcaagaccaggatggaatggttggttgttttaaagatacaattcacataacatacaactcacccttttaaaatgtaagattcagtagtttttagtatactcagagttgttgaatcatcaccactgtctacttccagaacattttcatctccccaaaaagaaacctcttaaaatgtgctatatccataaaatggaatactattcagccataaaaaaggaaggagtgacatatgctataacatgcatgaaccttgaaagcgctgataagaaaatggatacgaaaatttcatgcctattctgaaatgtccagaataggcaaatccatagagaccaaaagttgattaacagttgccaggagataggggaagaaggaatggggagtgactgctgatgggtaagaggtctcttttttaccagatatgtgatttgcaaatgttttctctcattttgtgggttttctttgtaatctcttgataatgtcctttgatgtacaaaattttaaaattttggtgaagtccaacatatctatttttttcttttgtggtgtcaaaattactgacatcattgtctaatctcaggtcatgaaaattttcacctatggtttcttctaagagttttatacttttagctcataaatttaggtctttgatccattttgagttcatttttgtatgtggtttgagacaggagtctagcttggttcttttgcctatggatatccagttgtctcagcaccatttgttgaaaagactgttctttccctattgaattctgttggcacccttgttgaaaatcatttgaccataaatgtaagggtttatttttgaactctcaattttattccattggtttatatgtctacccttatgctagtactctaaatttgttattactatagcttgtagtaagttttaaagttgggaagtatgagtcctctaactatactttttaaaaatttgttggccaggctcagtggctcatgcctgtaatcccagcactttgggaggccgaggcaggcggatcatgaggtcgggagatcaagaccatcctggctaacacagtgaaaccccgtctctactaaaaatacaaaaaaaaattagccgggcatggtggcaggcacctgtaatcccagctactccggaggctgaggcaggagaatggcgtgaacctaggaggcggaggttgcagtgagccgagatcgcaccactgcactccagcctgggcgacagagcgagactccgtctgaaaaaaaattgttttggctgtttggggtcctttccatttccatgtgaattttaggaccagctcgtcaatttctgcaacattgaaagctgggattttaatagtgattgtcttggatctatagataacttttgggtactattgctatcttaatagtaagtcttccaatccatgaacatgggatgtctttccatttatttagatcctctttaatttctgtcaacaatgtgttgtaattttcagtgtacatgtcttacatttctttggtcaaatttattcctaagtattttattcttttggtgctgttataagtagagatgttttcttaattccttttcaaattgttcattgctcatgtgtagaaatacagatttgtatatattaacctgctgaacttgtttattagctgtgatagtttttttgtggtagaatttggtttcgaaggcaaacatactcttgtgcaactagttgattaagagaaatgaaatgacctcaagtttctttaacaaaaatgttttagctgagctggtatatgactgtccgttaacctagtgccagtcttgaagcaatgtcttcggaaaaggagctctatcagcgagatcaaaacgctttagaaaggagtagagcttgcgtaggttcttttccatttgcttccaagacaattgtccatttttacctacccatttcattctctgttggcttctataatatttgtgtaggaggagggggatataataaaatagaatgaccctggccagtacattctttggatattttgaaagtgggcgagacgttcagctccaagaacagaattcatttcacgttcttgagcagggtcttaggacactttgttcttcctcacttgatcatgcttttccctttgttctcctcgagctctggcctcgtggccactggggccttgggtttccgtacaggcctcattttgtgggttactttcttttctgccgttgcctgttgcattctctttccttcatctctcccttcctttctttattcctccttcccactcctcctctcagaaagcattcataaagttgcttcttgtaaaaggaataaaatggaaacaagatggccagcaatcttaccacccaggtaacccctgttgttattttttaaactactctctgtaccaagtttagcaaatttaaataatagagaaagatgcaaaataaagagtgaaagtcttcttgccagccactccccacaaccacttcctcctcccaagtactcattagtacagtttcttgtgattatttcccggcacaaaatgaatacacaatacacatttcatctatatttgtatgtttatatgtttatctataccgtatttctttcgccacattagtatccatctgaaattacctccagtgccgattgctcttcccagagtttcccagttctccccactggtgtctggagaggccacagcctgcacaaggcaggtcaggtggggctttctagaccacaggtccgccgagtgagggtcctggaggtgggatgagccactggggtgcaaaaacaaaaaattaatacatatttctgttttagctcatccgtctttaaaaaaacttattgaggcataactgaatacattaacttgcagacatttgaagtgtataatgtatacacttacatatgtgcctgtaaaatcattgccacaattgagctagtgaatatattccatggcccccaaaagtttccctatgcctcttcatgattgatctctcctccacctcttgtctgtaggaaaccactgatctactttgtcactacaggttcgtttgtattctctagaattttatataaatggaattatgcagtaggtactctttgtgggctgtgggtggggagggtctggcacatttcacacggaataattattttgaaatttaagcagtctttagtctatcaggttgacactctctgttcttcaccatcttattaggagatgtcctcgccccacccgatctgcctctcttgtggtttgcaggacagcctcctgctgcaggaggtgggaagcgagccagtcagagcccctggagtggaggccccacgaccttctcatctgcaggtcgcgtctcctgtggcggtggcagcagcagctgcccatatgtgtggagcacttaagtgcctgggccctggaccccataccgttctcatgccgggtgccctttactccctgattccacagggctggtcccattgtcctcaggcccagagaggcgggctgggatccaggtctgccacgccagctgcactcagtccccgtgctggtgctgtgagaatgttgtctagacccaaatgggcaggaaaacacttggaggaccacccaggagaccccagggcccagctccctcagagctgtcatgtgcttggcatagtcctttcaaagtctccaattagaatttgataacagtaattcagcgtcataattgatctctgttttttaaaaacattattcttggatatgataataaaagcagtttaattgaaaataataggtgacatttccagagagcttaatttgtgctaggcaccaagcccagggcttggcctatctcatttaatcaccacaacaaccctacaagtagataccattattgtcccatgttataggtaattgggggctggaaagcctgcccaagctcctactgtgtgtgcaatgcgtgccatctcctctgtggtcagccagcccttgtccagctcattttacctcaccctctctgactctctgtgctgcgacctctctgcatttcttttcttccatcttccttctgccacagggcctttgcatgtgccagcctctttacctggcatactctcctccttcccctcagcagctctctgactttgcctttgtttttttgtttgttcatttgtttgttttgttttgttttgagatggagtctcactctgtcgcccaggccagaatgcagtggcgcgatctcggctcactacaagctccgcctcccaggttcacgccattctcctgcctcagcctcccgagtagctgggattacaggcgcccaccaccacacccagctaaatttttgtatttttggtagacacagtgtttcactgtgttagccaggatggtcttgatctcctgagctcttgatccgcccgcctcagcctcccgaagtgctgggattacaggggtgagccaccgcgcctggccttgttttgttttgagacagagtctcactctgttgcccaggctggagcgcagtggcatgatcttggctcactgcaacctctgcctcccaggttcaagtgattctcctgcctcagcctcccgagtagctacgattacaggcacgtgccaccatgcccgtctaatttttgtatttttagtagagacagggtttcgccatattggccaggctggtctccaactcctgacctcaagtgatccacccacctcagcctcccaggtgctgggattacaggtgtgagccaccacacccggcctgactttcttcttaactccatctcttcctctctgttatggacttctctggcatcacctgctcaaggaggcctgccctgcgggcgtgtgccgcctccttgcttctacgcttggctcccttttccactcgtggctttagtcatagttgatggtgggttctttgattaatattgtctctcccaatgggccgtgagctccaaagtacggggaccatgtttttgttttgcttttagttttagttatctgttgggttcctggcagctgtgtgagcagggacactgtaggacccaggtggtttttgttgaatgagtgggtgggtctccagaaacactgcgtctcccggtggacagcagcatcttttccagatagctgctctgatcctgtggccagtcagctgtggagctgggtgtaccagagaagctctgatgtgctctctggtcctccagcttcaagccctgaggtctgttggccctgtgggggcaggcatgcatgctttaccccagctcagcaggcatctccagagtctccctgcctgtggcgcactcagctcctgtccccaccactacattccaccacctatacaaggggaccctcaggtactgcgccattagtagctcgtgaggcccaggtgagttcgttcccttaggacagtacctgtcatcaggaatttttaaagctctcaggtgatttttatgtggagctggggctgagatgctccaggttttgagaactttggccaagtgcacagacctcttgcaggagaggtggccaggcaatagtgggggttttgcccaccactttagctcaggactctcaacccccacttttaaaatgaggtgcaaaataaatttaagtgacttaaactcggagagcacttttttgttgttgttgagacaaggtctcactctgtcacccaggctggagtgcagtggtggcatcagggctcactgcaaccatgaccttgacctctcgggctcaggtgatcctcctgcctcagcgtcctgagtggctgggactacaggtgcgtgccaccacgcccggctaatttgtttgtattttttgtagagatagggtctcactgtgttacccaggctggtctcgaacacctgggctcaagcgatctgcctgcctgggcctcccaacttgtggggattatagatgtgagcccccgcgcccagcccaacacttcttaatgtttgacttttagactctgatcagaggatggctgcagctcccccagtactgagcctccggccctggcaattttcagctatggctgagcgttaaaaagtatgacgtctgtgtcctaccctctgagatcagtctgaggcacagcctgggcattagcattttaaagcctcccctcctgattccagtgggcatccagaactgagagcccctgggctactgagccacgggcagttggcctcaggtgcggcgagaggggagccggggctggcatctgaggattcctgcccacccccaccaccctcatcatccaccagagcacgggagtgtggccctgagtaatgctccggagccagggccacagctttccctagctcagtggagcccaaacttggctgtgtattagaatcacttggaaattttttaaaattccaaagcctagtccacaccccagactaattaaaccacaattgctggggggtagggcacaggtggcagtaatttttgacactccctaagtgattccaacatgtgcaaacaggccaggtgtggtggttcacacctgtaatcccagcactttgggaggacagaggcaggaggattgcttgagctcaggagttccataccagtctgggcaacatagtgaaatctcgtctctactaaaacaacaacaacaacaacaaaacctgggcattgtggtgtgtgcctgtagtcctggctactctggaggctgaggcaggaggatagcttgagcccaggaggttgaggctgcagtgaaccactgtgttaggctctcagctgggtccttgattgagatgagagcaaccaccatcatcccttccagtgccgggtctgctgtgctgcccaagaaatggtgtgtggagacccccctcctgttgttatttttttaaagaacgcttttgttagccaggtgtggtgtctcacgcctgtaatcccagcattttgggaggatgaggtgggcggatcacctgaagtcaggagttcgagaccagcctggccaacatggcaaaaccccgtccctactaaagatacaaaaaattagtcaggtgtggtggcaggcgctggtaatcccagttacttgggaggttggggcaggagaatcgcttgaacccaggaggcagaggttgcagtgagccaagatcacgccattgcactccagcctggggtacagaacaaagctctgtctcaaaaaaaaaaaacaaccaaaaaaaaaaaacccgggcgtggtggctcacgcctgtaatccagcactttgggaggccaaggcgggcagatcacaaggtcaggagatagagaccatcctggctaatatggtgaaaccccgtctctactaaaaatacaaaaacttagccgggcgtggtggcgggcgcctgtagttccagctactcgggaggctgaggcaggagaatggtgtgaacccgggaggtggagcttacagtgagcagagatcatgccactgcaccccagcctgggcaacagagcgagactccgtctcaaaaataaataaataataaataaataaataaaaagaagaatacttttgttgttgtatttttttttaatagcctttattttttagaacagttttgggcttacagaaaacttgatcagaaagtagtttctgtatactcattctccactcccacccacccaccagtttcctctattatttacatcatatgttagtgtgtatatttgttacaatatcaatacattattaactgaagtccatagcctaaattagggttgtgttgtgcagttctatggattttaacaaatggccaggcgtggtggctcacgcctgtaatctcagcactttgcggagccgaggcacgtggatcacctgaggtcaggagttcgagaccagcctggacaacatggtgaaaccccctgtctactaaaaaagtacaaaaattatccaggcgtggtggtgcatgcctgtagtcccagccacttgagaggctgaggcaggagaattgcttgaacttgggaggcagaggttgcagcgagccgagatcgtgccactgcactccagcctgggtgacagagcaagactccgtctccaaacaaaaattaaaacctgaaaatccaaactgggagagaatctgatagattattcatttagggacattactgggaaactcttaggttgagtctaaaccagtctcaaccttttgctttccaaacttggaagggtagtttgctactgctaccttcctgagtcgtgctgagggagccctgtatccttaaaaacaaccaagaatgcatgcttaggtggccaagtgagaaggcgattgcctggagctgagccgtaatagctgggcctctaccagccgtgctggaccatgatgtgacctggagcatgagaggcacatgctaagaacagcagagctgagagacgggctcctgagatcctgcaggtacagttgggtctctgcaccggctgtgacctgcctacttgcagacttcttttttgtcagagaataaaattctttttgaaggccgggtgggtttttttcttttgtttttgtttttgtttgtttgtttgttttaattttgttccattttgttatttgtagccaaacctaattctagcagatatgagtggttctgtggtttggcacaatgtcgctctgtcacgcataccgggggcctcgagtgcttgctggtattaggtgacaccaggcagtggtgtgagttacagaagggcaggggaaaggagaggtgccctggggatggcatcacctgccctgtacacatttctgtgaataagcaggccaggggcctatagagatggtgttggcgggtgcagagttggttatagccaggtagggaggttgtcaggggcaccacaggaaaggccttgggctcagggtgagtggggagaaaaaggaaagaaaggcaccctcagagctggctgcagggtagagaagaaacaaaaagaaggttccaaaagaatgtgggtgcagatctggaaaagagccggtgagagagagaccaggaacagcaagcggtcagcatttcgcagtgtctccctagacacacggttttctcaggagaggcagtggcactctttgggagaacgccggtctgcctgcatcctgtgcttacactgtcatcggggcaacaaaatgtgcatgtttttaaaataggaaatggatatgtcatagtgtggggatacaggatttttttgttgttgttgttgaggacctggctccctttggtaatgacactccctgtttacaagtccagtggcttcccttcatccctggtccttgccccagtcttccaggccagctgatctgcttctctctcgcccccatctgcctctccatcctcacctccagcccctggccttgcacccactccagcaccctgggctccttgctcaacctagaagacagccgtgctccctggcctcaggtctctgccaggctccccaagtcactcagggtgctccagcgtcccctgaccacccttcctcccagccacggatgccacccagcatcattgggctttatgtatctttcatgtgtgcgttgtgtgtcccccacccaacaccaacaacccgagagcagggctgctttgtgttttgttcaccactgggtccctggcatttagaacagcacctggtgtttgcttgccatttgctgagtgaatgcacggttgaaatgactaaagctaaagctaattgactaaagctggcaatattgaaacaagtttaaatttaagtagaaaagtgctgcgggaagataagtgattagatttgggaggatatgaaagaattggattttaagcctcccgtaaacattgtgagccccgcactccagttaagatcggactcagtgggatgggtagcttgctttcctttaggaaccagcctcctggccctcttgcccccttgcccattaaggctgatggggacctcccctcctcctgtggtatctcggattcagggaactagaactcaggcagatggtgctgcttggccctcccagtgcagccacccagcagagctcattagctgtttgatttgggggttggggaggataagaatggagcctgcagacccagtctcctgccgccaaagccctaaggcccaggctgaggactcagggcacgagggaggcccagaaggggggcaggagccaggtcttggagctgaggctggcgcttccagtgaccgaagaggttcttgggatgtgcatggatttccaattccatgtaagaggtgccaggagaacggtagtgaattaacagcttcttccacgacacagatggaaaagccacttttattttaggcctgatgattttcttcctctatcttccccccatacccccaagtgtcagttccatcccagaagggtaacctaaagggacgcctgcagactcacagcctcttacacagagcccagagtctttgggctgttcatgctggcaaatttttttaatttttttttttatttttttatgaaacggagtctcgctttgttgcccaggctggagtgcagtggcgcgatctcggctaactgcaacctccacctcctgggtttaagcagttctcctgcctcagcctcccaagtagctgggattacaggcgtgcactaccacgcccggctaatttttgtatttttagtagagaccgggtttcaccgtgttagccaggatggtcttgatctcctgaccttgtgatctgcccgcctgagcctcccaaagtgctgggattgcaggcgtgagccaccacgcccggcttttttttttttttttttttttgtgagacggagtctcactctgttgtacaggctggggtgcagtggcacgatttcaactcactgcaacctttgcctcctgggttcaagcaattctcctgcctcagcctcctaagtagctgggattacaggcatccaccaccatgcccggctaatttttttgtatttttagtagagacagggtttcaccacattgaccaggctggtctcgaactcctgacctcaggtgatccacccacctcggcctcccaaagtgctgggattacaggcgtgagccaccatgcccggcccatgctggcattttaaaagacacagtgttccggtgctcccctgggcatcacctaaaatgactgttctgtgtctggaggaactgagttggggagctggagcctggcagcctgacatctgagtttcctctgtgtcagctctccagaaagccctcatcggggacaaacagagctcaggaaaagctgagtgcatggcccacttctaggcagtgttaattatgggctccggggtggtattttcctgtcctcaagtcaccagcctccacggctgctgatagggacttaactgtcccgaggcctcccaggcccctcctctgacactgctcctgacaccttggcctgggtcgtgctgtgctgtggagcagttgctgggtaggagaggggagaagggatgatgcccagctggaggctggcagagtgggcactgctgcctgtgagtcaggaggtttcacagcagaagatgcctctgtgtgggctggggtggggatctcaaggggaggcgggcacaacctccttggggtctgaggctgctggcgggaggttccaacccacctgggcctcccggggcctcgccctaggttgattgtcttcccctccctggaaagttcatctgcccgcccacaggtgcatgcacatacgtgcacagtcccctgaaggccctggtgaacagttctctctttccagtggagtctcattgtgttttgcagacttcattcttcccagctcgtttgtgaggcgagtaaggggtatcattaccactctttacttgttaagttgcccaagagaggaaaaaaaaaaaaaacaaacaaacaagaaagtttttcctcctccaagagtctaattacttgtttggtgagtctcaacccatatacatttccaaagagggatactcgatgcctgccgaagaaatgtccttgggcaggtttcagagaccctctgcccgccatcctgccgtctgccagcactgcagctgggcaggactgttgccagcacttttcagtgagcttaggaaactgattcttacggtggtccttgcggaagtccccaccccgcagcagccctccctgctttgtgcctgttctgcctccagtcttgacatgccatgctgctttgtgctgccctgcctccgtcttttctgtctctgtgtcagaaaagagacattcccattccaccttccacatttcatattccttgtcttgtccgctcaccacctccaagtaacacctgctcctctgagaaggctctgtaccttttacctgctttgatttttgcataaagacattcacttgtatttcttgatctggcttctgttcctcctagaccatgagctccttgaggtcaaggtctcctctagcttgcctttttatcttccacacctagctagttcctgaacacagtggagtgtgctgaagtgggtcctcagggtgggacactcaccctctagaatggtgaagtctcacgtatgtgcttctgatgtatccctaacccagcttccaggttcttgaatctgatgccccacccattgtcaaatttaacatctgccttctggatactgccagcccatcttatgacttgttttcagtctccctgttttggtccatttgagatgctatgacaaagtaccttagtctgggtaatttataaactgggaaatttattgcttacagttctggaggctgggaagtccaagatcaaggtaccagcaaatttggtgtctggtgagagctgctctctgccccaaagaggaggtcttctggccaattccttatgtggcagaagggtaaaaggggcaaccagctccctcaggccttcttcctttatcagggcactgatcccatttgtgagagctccattctcatgacctaattttcctcccaaaggccccacctcttgatgctatcacacttgggattaaatttcaacatatgagctttggaggctatacataaacactcagaacatagcaccctcttagctgtgtagtacttggtcagatttgttttggattctctccattcattcattctaattcttccatgcaccggccacgtttttaggcatggggcctgtagagatgaccaacacagatgtggcccctgccctcgtgggactcctgttctaccggggagagacagaaggagaagcaagtcaactgctaagtaggacaatgctgaggaatgagagcagagtggaaacataggctctgtccctggatgaggtgtgggagctcacggtgcagagaacacatggggcaggaggtcttgggcagccatccttggagaagacgtctggacccattcttttttatctttctactctcccacttataaaaatgtccttaagtagtctgacagaaaaaaaggccctgagtacctgagtatgtaaggttctccctgtttgctgacgtggtcagatttttttttttttttttttttttttttttttttggagagacggagtctcgctctgtcacccaggctgctggagtgctggagtgcagtggctctatgtcagctcattacaacctccacctcccaagttcaagcaattatcctgggactacaggctcatgccgccatgctcggctactttcttttgtattttagtagagatgaggtttcaccgtgttgcccaggctagtctcgaacttcttgagctcaggcaatctgcctgcctcagtctctgaaaagtgctaggattacaggtgtgggccactgtgcccggccgatgtggtcagactttatcatgaatgtttggttaaattgggcaagggaaactggtccccatagcgcacacttgcttaggagacacgccccaggctgtgggaggcaggcgaggtgtgctcccagcagggatggtggactagggatgcccaaatgttgcagcagcaagagtgctgcagaggctgcagtgggctgagtgtcagcctcggtgctttgcagcaagagagtctaaggacgtgagcctggtgtccagtgagccttgtagctcggggcctctggcacaggactcttcgtgtcacttggctgtgggcagccgagcaccctgactactgcctgatgtggatggccagatggtcagggagcggttgacccaagtgcagccataccttgaagaccaggtaagagaatattcaagaaaacattgaaattcacaaagccccagaagtacttggaaaccaccagttgcttcatttccccagataacacctgtggtgtcagagaaggcaaaaactggttatcttgggccaggggtcacggccagccccttcagtgggagtggtgcgccctgccctccgttccccattctaactctctgctcccttttggcctgacagatgaagacaagcacctgtggtgcccctcactgcaagaagtcagggaggcattccacagcctgggtgcccacagtcctgccctgtaccctctggggcccttttggcacggtggcaggtgagtacttctgcttcctcactgcctttttctttcatattttttaagagacagggtctctctctgtcactcagaactggaatacaggggtataatcatagctcactgcggcctccacctcccaggctcaagtgatcctcccacctcagcctcctgagtagctgggactacaggtacgcaccaccacgcctggcgaattttttaattttttgtagaggtggcgggggggggtctccctacgttgtccaggctagtcttgaactcttaggctcaagcgatccttctgctttggcctcccaaagtgctgagattacaggtatgagccaccccatgcccagccacctgttctcttgtttgtttggaagttgctggactcaggctgtatcccatgtgtagggaattacagaacaaccacacacccccgcctgaggatctgagtatcacaccaggaaggaatttccttgctcccagcctcagggagatgggaagcccccaggatggatgagcctgtttttggcacttcctgactcagcccccgctgcccccactctctggtgaaacccagacttcacagcctggttagtatccttgcagacacgtcccagtcccttgagtctcttcaagccgcttgtttggcccgttacctaatatccactcaggaacagcagggcatgcttttatgttcccacaaccctcagttttgtgtcatgagtgcccccgttgagccccgggctgacttgctcgtggacagtcatgatcatttgcctatgcctggtccctgcctgtggggaggagtgccacgtgatgcataaatagctctggtgggcggatggcgacttagcttaaggtcgtaaaagtgttatatatcgtcatcttgttctacaaattttagcacatccaaactctcttgagaacccttgaagaaggtgatttgagatggaacagagtgttttgaagcctggaggggctgttgtataggacttccccccatgcttcccgctgacaatccgtcagcgccaggaggtgccaggccccccttccctcgcctcggcgggcagatgttcctctgcatggaaagtgggagctctcctaagaacctgttccacgactgtgtttagcaattgtctgccaagccaaaccacactcagctctgctataaataccccacacatgtgccagcctgccgtgctcctgcccctttccctcccggagctcgcagctccatgtctggtgtaatgagccacttgcctcctcctggcacagagctgcaatcgcacaccgtcttggatgagcgggggagagaattacactcagaaagacaaatgaacgtctgaggcaggcaggggccgtggagtccagaagagccacttgtgactgctgtgatgagtgtccctgtgtcctcctgggagtgggaggcggcactggagacatagccactgggtctcgctctgctctgcaaagagctgcttcccccactgcctcccggttctcccaggatttgactgcggcttgcccttcatgctgcgtgacaaatccgttgtctccagaggcagagtgggcaggagagatgagaactgtggccctttaaacacatcatctcaagtactttgggacacaaaccccggcacgcagacttcagctttcccaggcgcagttaagccttgtgtgggaggaaagcagggctgtgttgtcctagatcgggcccagggagctgccagggcctcatgtcgtgtcccagacacaccgttttaacatctacctcttttgggccccagaccttggcctggcgttgacaccatttcccatcagaggattcagaactaccctcgaggacctggctgacagccgcagggctgatttccctgctcctggctctgggagcaggctggggaccaccggtcaagcccctcagggctggggaggctttcctgcctggagcccctccccatgtcttcctcggggtaggaggatggcgaaaatgcctgggtaggtttcctgggctgctgcgttgtgtcatggattggagggtgacccctccggagtattcgggaagcatcaaggaggttccagcatctcctccccaagggtatggcatccttcatggatgcatgggccacaagagaaaccccacggcaggctatcttctccctgtgttccttctcgtcctggctcctcaccaactcagaggctgtcttgtgcgagctggctccgcccaggcatcttttttctgctgacttccagggatgcctccatccaggggaacggatacctctggggcttctcctgggctacccacagtgcctcacaatggccagggctcaaaatgagggcctcagacatctgtgcatgtccccaccgtaactgggctgtctctttagttgctctgagaaagacaagtcttcccacatttcttcctaatctcggatttccttaaaagccatcaccatctcccatctagcgcttccagatttcctttcagaaagatgcagtccttccgcagctgggccatgcagatctcctggcatccaacttgttggaaacagtggccctctgctcaatgatgagactggggaggggaaacaggaggacatttcaaggaaaggatggagcgtggatatgaatgggaagcgggtggtgggggagctcatcagcatcctcagaggggctcatgcccacgctgcaacacagaatgggacttgccaggtgcccccatctcccccaggagcacaaaggaggtctttaggtagctgtgcatggtcctccaaggctgttcctgctaccaagcccagctgaagttagagccctgctctgatgcgcaggcctggccgctgaagaccaaaagtctggagctgtttcctggtgccagaagccttggccacttggttttcttttcttttttttttgagacagagtttcactcttgttgcccaggctggagtgcagtgatgccatctcggctcactgcaacctccgcctccgggttaaagcgattctcctgcctcagcctcctgagtacctgggattacaggtgcgtactacaatgcttgctaatttttgtatttttagtagagatggggtttcaccatgttggccaggctggtcttgaacttctgacctcaggtgatccactcacctcagcctcccaaagtgctggaattacaggcatgagccaccatgccccgccagccacttggttttcaaaggagcagcctggtgcagagaccaaaggggtaaatacatgacaattaacacattgacagggcgtcctatcaagtgagggggcaattgattaaagaggcagctcttggttaaggtggtagtggtgctcatacactgtacctgccatcttccctctgagaatgtcagaatgccatgcagatggtaactttattattttttcaacttttgggggaagaagatgcggagacctgggtagaggccagtgacatgccccttgtaaggttaatgagtattgaacggtgtctccgagacagaaacccagttcctaggtgctggccacagaccctggagccaggcgtgggaccagtgaagctgctttgctcataagagtccaatggtgggaccatcagctcactctaacctgctaagcccaggaggggagcagggataatagataggccgttgaattcccgggctgtggccccttgctggcagcagtggtggagtttcggggatcagctgatgctgcagctcagaacagcagccacagatgccagcagtttagtcaagtgattcctctgaaaagcgaggattagaggacccccattatgttgcccattagtccatgggctcacaaagttctggaactctgaccagccaggcattcacttgggaaggctgacatttctttccaaggaggacagggctctccccacagccacactcctctctgcagctcaaaaaacacatgtaaccacctcacaccttcaatgttccttctccccttggcagcgtctctcttctgcagatgtttgtagtcgactctgagtgccccgtgctgagaaacctgaaagcacacccacctatggctgcgcgtgttgcacgctcaaggctggtacgaaccagagcttcccctcacgtactggcgcaggcccagcctgcgcccagatgtgcaaatgccagccttacccattcagttagggccctaataaatgctgaaatctggaagaaggactgagcccagccacagtttccactcccccaccaagtttggtttgtcggcaccaacttcctggtacctcggagacagatctctcctccttcccctctgagcccagcgccagtgccaagcagagaagagcagagacttcacaggagctgtaggacagtgctcttcctcccctgtgccagggggctgcctggagcctgctgtcatcagcagtgtggttgtcatcaatatcttcacttaccactgttagcaggaaccttaagccgtttcttaagagtggagaagtgggtgagacagcagaggggaccctcatcataagctcacttaacatacttgaaatcaacaatgtacattcggccatacgatgaaggtgatcccgcccaggctctcgtcctgtgagcgcgtgcctgggagggaggcttgtggaaagggtgatgagactgccatccacaaagccccaccgaggtccccctcaccgtaagcatctcaccaccctgcgtgtggcttgatctttaaagggggggatttttctttccccagccctggtctctaacatcatctggtgctcagccagattgggtccgtcactcggggaaactggccatgcaggtcttatcagcagacagcacatcagctcagggtgacacctttggagggggttttcagggatgttttgttctgatttcccccatacttgctggcttgtgagccagcccgtgtcagctaccacgtggtgcactttgcagtgtatgcaggctcacccttgtcgaacggacccagggagaactcacggactttggggggattggaagtgtgattttctggtttccaagtcctggaaaactaaagctcgaggcctcacctgaacggtagcatgtgggagccagtccccaaggagcccccctccatgtgtcccccattcttagagttcacatagttctgtagcctcctcctacaccaagtcaggtcggccctgtgtgaccagtagaagagatgggatgtcactttcgaggttaggttgtggaaggttgtggctctgtcttgggcatattctctctccctctctctttcaccactggctttggagaaccagcggccatgtggagaaactctgtggagaggccctggggcctgtggatcagtgaccaggtgagtgagccgggaggcaggccctccagcctgtaggctcaggtgaccgcagccccacccaacatcttgagggcaacatccgagagacccccgagccaggaccacccaacagagctgccctggattcttggccctcagaaactcatgagatcatctgtgtggaagaatttgctgtgtccagcggatgagcagcctcagggcagcagtgtcccactttgcgcctcactcctgcccctgtgccccctcctgggtttcccatcgtcactgttgttgtcttaccacagggtgcttccaggcgaggctggcctgaatgagaatgaggagcaggacgctccccaagagattgccttggacatcagcctgggccacatctacaaggtgagtcaagccgcctgcctcatgcagggcactctcggcttacagttcagacccattcagcagctaaattccaggagcatcacggagaatctccggcgagctcagcaccatggcaggcactgtgctggctgtgggccggatgctacagaaactgtgttatcggacacgggtcctgatctaggccccaagagagagttcttgtacaagaaagaattggggccaggcatggtggctcatgcctgtaatcccagcgctttgggaggctgaggcaggtggatcatttgaggtcaggagttccagaccagcctgaccaacatggtgaaaccccatctgtactaaaaatacaaaaaaaaatcagccgggcatggtggcggacacctgtagtcccatctgctcaggaggctgagacaggagaattgcctgaccctgagaggcagaggttgtagtgagccgagatggcaccactgcactccagcctgggcgacagagcgagactccatctcaaaaaaacaaaaaggctggatgcagtggctcatgcctgtaatgccagcactttgggaggctgaggcgggtggatcacctgaggtcaggagttcgagaccagcctggctaacatggcaaaaccccgtctctacacaaactacaaaaattagccaggcgtggaggctgaggcaggagaattgcttgaaactgggaagtggaggttgcagtgagctgagattgcaccattgcactccagcctgggcaacaagagagaaactccatctcaaaaataaaaagaattggaagcaaatccatagagtaaaatgaaagcaagtttattaagaaagtaaacgaataggccaggtatggtggctcatgcctgtaatcttagcactttgggaggccaacgtgggtgaatcacctgcagttaggagttcaagatcagcctggccaacatggtgaaaccccgtctctactaaacatacaataattagtcgggcgcggtggcgcgtgcctgtaatcccagctacttgggaagctgaggcaggagaattgctggaacccgggaggcggaggtcgcagtgagccaagatggcgccactgcactccagcctgggtgacagagcaagactctgtctcaaaaaaaagtaaaagaataaagaatggctacttcataggcagagcagccccaagggctgctggtgtagtatttttatggttatttcttgattatgtgctaagtaagaggtggattatgagttttctgggaaaggggtgggcaattcccagaactgagggttcttaccctttttagaccatatagggtaacttcctgacattgccacggcatgtgtaaactgttatggtactggtgggagtgtcttttagcatgctaattcactgttattagcatataataagcagtgaggccgaccagagatcactctggtcatcatcttggttttggtggtatctggccagcctctttactgcaacctgttttatcagcggggtctttgtgagctgtatcgtgccaacctcctatctcatcctgtaagaatacctaacctcctgggaatgcagcccagtaggtctcagccttgttttacccagcccctattcaagatggagttgctctggttcaaacgcctctgacaagcacactctccacacctgtgcctgccacccaggaccctgcaggggcctcactgtttcctgagctcctacccaacatggccgcggggctcacagtaccatcccttctgcctaagtgtctcccagggaactggtcctcgaagtactctcccgttcccccatgccctggccacccctgccctcttttctctctccagtttctggcgctgtgtgcccaggcccagccgggggcctacactgatgagaacctcatgggactgattgagctgctgtgccgcaccagcctggacgtggggctccgcctgctgcccaaagttgacctccagcagcttctcctcttgctcctggagaacatccgggagtggccagggaaggtactagacgcccagagcctggtcctcatacagcttcatcactagggaccaaggtggcccctagagtgccctgggtggggatggcactgcctggaggtcatcggaatgtccctgatctccgtgactgcccacttactcccctgtgcgggctgggtggcgagagcaaggggaaggcggtgtcctcctgtagcccatggggtgccgttctcctgcagctccaggaactgtgctgcaccctgagctgggtgtctgaccaccaccacaacctgctggccctcgtgcagttcttcccagacatgacctcccggagcaggtgcgtgctgctcccccgctgcctcctccctctcacacgcatctcttcggggtcttgtagggatccagagtcctccccatcagccccaacaaacctcccctgcccaatttctaatccccaggagggagaactaaaaatataactcactaatgagttctttacaaatgaaaaaaagcttaattttcttaacatggtcttattagcaaaacaattgccttgtgcaattagctcctgcctgcagggcccccactctcctttctttggggctccctccccagtcttcagctcctcctcgtcattcagacctcagctgaattctgtcccctgatcacccgactcccactcgcacactctcgattcatccttctgttttcttttctgcctagcatttacccatgccagaaattatgttactctttgtttccttgtttatggctgtggctttcctcgaagttacctctaccagaacagctaccttgtcagggtcactgccatattgtcccagatctagaacagtgcctagcgtgctgttcggcgctctgtaaattttttttttcttcttcttgagacagagtcttgctctgtcacccaggctggagtgcagtggtgcgatctcggctcgctgcaagctccaccttctgggttcacgccatactcctgcctcagcctcccgagtagctgggactacaggcgcccgccaccacacttagctaatttttatatttttagtggagacagggtttcaccgtgttagccaggatggtctcaatctcctgacctcgtgatgtgcctgcctcggtctcccaaagtgctgagattacaggcatgagccaccacgcctggcctgtaaattcttttcgaatgaatgaagtgggtaaacaaactcagcccaggaggagataaggcccattggctgaatctggcccggcttctctctccactttccttctcccacttttggctacggtcttacaggattgcctgccctttccggagcagaccactcccatccactcgccttgctcttctctctccctcttcccttctctttctgggcctgtccctttgcagctcctcctgcctagaatgactcctttcctacccctcaactttggcagacacctctgtgttaccctccactgggaccccttcccttcccctgcactgttccaagggtggtctctgggagccggcttggagtttgaatcgcctcacaccccagggcccagcctggtagaggctctgcttgttgactaagttaccttcagttgtcctgggctccgcttcagtgctgagcaggcagtcccatctctttctgtctttcctgggaatctggctggcagagaggcagcctgtgcacagttgggagagggcaggtttcatcctctctctgaaagaatgggacttctggaagctctgtcagaggactccaggggcctcagtgagggaggctgcctgcagcccagcagcctggtatttcttcatgggatggagaggccgaccctgcctcctgattccctgttctccccagaccgcccatccactctgctttgccagctggaaattacagtcctagaggtttctgccatccccacctgttacccctttcgtccctaaatcctgtcctttctgccttctgtatcctaaatccaactccgtgacagccaggaccatgtctggctcacgtaaatcagtcacctcctttcatctcaccggctcacctggagggtggcagaggcatttcttcctcttctccaaagtctgcctgctctgtagatgcctgggggttcctgtgatgatcacgtctctgccttaccatgctccccattgcctgcagggccaggtgcaaattcttaggctggtccctaggccccctcatccacctcgtccagccagtttctcatttgctccatccagggcatggtgtttgtggttgtttttctcacacatacacacaataaacctcactcttttcacagctgcatagtatttccctagtgtgtgtgccactgtagtctcctaatgtagcagggcgaccacagtccagaacccctcagacaccaagttgtggaaggaaagggctttattcagctgggagcattgacgggctcacgtctccaaaaaccgagctgcttgagtcagcaattcctgtcgcttttaagggcttacaactctaagagagcccgcgtgagagggtcgtgatcgattgagcaagccgtgggtacgtgactgggggctgcatgcactggtaatcagaatggaacagaacaggacagggtttttcacagtgctgtcccgtgtaatgtctggaatctatagataacataaaccggttaagtcaggggtcagtctgtaactaccaggcctggaacgcagcactgggctgtctgactactgatttcatttctttcttttctttaactcctactttttctttgaggcagaaattgggcataagataacatgaggggtggtgtcctcccttactaatactggacattcttccagtgactgtttagtgtctgtgcagatatttctatgagataaattccttgatgtgaaattgcaaccctaaagtatgtaaagctggacctattagtaacaccaccaaataggtatgaaagtgcatatttttctgcattctcattaatactacatattcccagttttgtttttgagttttagtcaatctggtgagtggaaaacatcatcctgtggttctaattttcatttccctgattgccagtgaaactgagtatcttttcatgtatttattggccttttgtgtttctcttactgtaaattaccttttggtatttcttacccactttcctatcagttaatttatcttcttatcaactctgttgatcttcatgttgcttattatgttacagtatgttttctccaaaggttatatagattgtcctttttaaatctttatgtatggtacctttcagtgaactggaattttttttctttttttttttactttttcagtcctttttttttttattttagaatagatttagatttacaggacagttttatggataatgcagagaattgattgggatttttgtgtaatgtaatctttccatgtggaagacgaagggtttccccaccaagaccataaagatagtgtgctttcttctctttcaggactggctttactttgtgtccatcagctcttaatcccaactcaaatctgtttgtccttggtatgagagaaggatctaacttgattttttccatccccaaacagccagtggggacccaacgtcaatttttctgccttttgttttgttttttgagagagggtctcactctgtcacccaggctggagtgcagtggtaccatcatggctcactgcagcctcgacctcttgggatcaagtaatcctcctgcctcaacctccttagtagctaggactacagacagatgccaacacacccatctaatttttaaatttttagtagagacaaggtctccctatgttgtgcaggccgatctcaaatccctgggctgaagtgatcttcccacttcagcctcccaaactgctgggatcacgggtgtgagccaccatgcctcagctttttggtcttaataattcatcctttcaagacagatttgaagctaccttctccatatcctaagtttatgacttcactccttcatctgctagccatgttaaactgtgatttcatgaatcagtgtcttttgtggaatctgtgggtagctccagggcccatggcaattgccctttaaatgccaggaaatgaatgaaacagagcatcttgcgcctgcctttcaggcagccacgtcagcagggtgatgctttgtgccaagagctttactaggaaggagggtgccttatcgggatcagtgttattgattttatttttctaaatagataaaagcattcaaataaaacaaaattcgtaaggtaccaaggagtacctttttgaaagtactcctttcaaatttgatgttgaaaatgcgcttcttcccctgagccagagccacctggctggccgccagcctctgtctgcgtgtgcacgtacccgccgtttccgcaccttctttgctcttcagggtgtgttctggccgtcatccctgattgggttgtaaagggctcctaattcttttttcctgccgcgttgtactcactgtgggtcttcagtgagctgctgctccactgtgcttcccgcggcggccacagagcttactggctgccttcactggtggctgccccactgggctctgtgcccagactgaccccaggaagaagggcagattggtgtacgaagggctgtcacactctttgtctgctcgactgactggttaagcacaaagcgagaactcctgctgacactcatgcagtacacccgcagcccctgcctcagcgttcaagacttcatgggatgcactgcaaatgtaaggaagagctgggcctaaccatgaaaaatgaaagtgaatactaaggcagaccacctgaaacagagccaaggggaagaggaggttcttggaggaacatccaccttgggaggtggcgccattggggcagctcaggcagctttgggaagagcagcatgccatccccacttctgttcagggctcctgcaactgcttgcactctactgaaagctgatgtcccaggctctggggatcctcttccttcactgcctgcggctattcattaaacatcctgtgtgcgctgcttcaaagcagaaggtcagatgaagccagctcccgcaggctgcctggtcagatggaggaatggacaaagcctgcgtaaaacggctcacgaaaccagccctgacaatgacgtagagttccttgcctggcagaccagaatcaatccgaaaggacagtgctgcccagtgttggcaggatgtgaggaaacaggcatatgcttccctgctcatgagatgcggtcagtagtccctctggaggccagtttggcaaaatcaagcaaatgactttaaaatgtgcacacccttcaaaaagctagatcgttttctggggaactagatggcaaagattcattgacaaggatgtttggcatagcaatgtcatgatagtgaagaactggaaattgcctcagtgccccaccatcgattcagttctgcccgtgctacggagtattatatggtacctaaaaatgatgtcacaggaaaatgggaaagttaatgaaatacgctgagtggaaaaaaggctttgaagccatatgtaaagtgtgatgccaattctgtttaggggaaaagaaaggccatctttgggtgtgaggttaataggagtgtttttggttgcctagggcttatttccccctttctttttttctttttctttttttttttttcccactctgtcgcccaggctggagtgcaatggcacagtctcagctcactgcaacctccgcctcccgtgtttaagcgattctcctgcctcagcctcccaagtggctgggactacaggtgcgtgccaccacacccagctaatttttgtatttttagtagagacgaggtttctccatgttgggcaggctggtcttgaactcctgaccttgtgtagaaggaaaactaacaaacagaaaggacatccacaccaaaaacccatctgtacatcaccatcatcaaagaccaaaagtagataaaaccacaaagatgggggaaaaacagagcagcaaaactggaaactctaaaaagcagagcgcctctcctcctccaaagaaacgccgttcctcaccagcannnnnnnnnnnnnnnnnnnnccgtgcccatcctcttatttcccctttctaaagaccctgtcggcctccaagctcctgctcttacccccacagccagttctcaccaattagccagaatcacttctatttaataagtttttaaagttttgttggctgggtgcggtggctcacacctgtaatcccagcactttgggaggccgaggtgggtggataacttgaggtcaggagttcaagaccagcctggccaacatggtgaaaccccgtctctactaaaaatagaaaaaaaaaaaaattagctgggcatggtggcatgcacctgtaatcccagctattcaggaggctgagacaggagaatcatttgaacccgggaggcagaggttgcagtgagccgagattgtgccattgcactccaacctaggaggcagagtgagacttcgtctcaaaaaaaaaaaaaaatttggttatagataatttcaagacatatacaaacgttgagaggctagtaaaatggactccatgtacccattttccatctcagcaaacacagccgtggagactcctccttccctcacccattgccccccacccctgccccacatcattgtgaatcagagcaaatgattagacttattttattcagtacgtgtctctaaaaagataaggtcttggtggtttgtttgttgttgacagaatctctttcgccgaggcaggagtgcagtggtgccatccaggctcactgcagcttcgacctcctgggcttaagtgatcctcctgcctcagcctcccgagtagctgggactacaggcatgcaccatcccacctagctaacttctttaagtttttgtagagacaggatctccctgtgttccccagcctggtcttagacccctgggctcaagtgatcctcccaccttggcttcccaaagtgctgagatcacaggcatgagccacagtgcccagcccttggtgggtattttaaaacataattacaacattatgatgacacctaaaacactgaaccataaaagaactgtcataagcaattgagtcacttccctgctccagaatcttccaagactttgcatcatcttggaaggaagcctggagtctttaaggtggccgctaaggcccctttgcggtgtggccctgccctctgctcttcttctccctgtccctgcggtgcactgggcacttgtgtcttgatgcccaccctccctcatgcccgcacgttggtaggagactccccccttctcatcatggtggtctctgctcacatgtcactgcctcagagaggtttcacctgatccttttttccaaatgagctgccacctcagggctctgcacaacctccctttccttcatttttctccacggactaccaggaccagaagtgaactatgaccagccctccccatgagtatgagctccctgggcgggagggccccgtccatctcccccatgtctgcatcctcagcacccagaacagagcgtggactagaatatcacgggtgctgagtaaatatttggcaaataagtaaaagccaacaatgtttggctctcttctgatctcttcctgtgatggaaatacattgaggtttgcggggggtgtgggcttccttcctgtgttgaggaggcgtcttcctcgcaccctcctctgcacagaagccgggagtcaggcactcctttgttccacctctgggagcgagacccaggcctaaccacttggatgctcctgaggaaaggactcagggacggcagtcctcacaggcttttctggccagggaccctgctgctccacaccccttggccaggttctccatcttcctgtgaattctggagcaccccaggatcctctcagtgttcttatgtctggagcagccagccaagcaggttctgtgtggccaccaaggaggaactgactgatggagcggaagtgcagacaggctagggagagagcagcctcacgctcgtcaggtccttgcgcactggggataagagctgggacaggcgcagatgcaccgtggcttccctcgaaaccctcgtttccctcccattttgttcacttcctcactgtggggccagagggccccacctttccttctccccttaccactgcccggccctgggtcagctcctggaccccttctccactgtggactccctgcctgcctgttctcagacttgaaactgcacggccaaacagtgatgccacatgcatgtcccttgtccccaccttggctcttgaccccttcaggctgcccggagccacagcgagttcctggccagcctcctggggaccttagcagactccatgcttcctgctgctgaagcctctgcactcccagcgaacagccacccccactagacaaacgcagtgctctcagttctcacctccctgctgcccactgcacccttaattctggatcctggcagtcctgcctctcccaaaaccttctgcagtcatcccttattcttgtaccgtttgctttttgttcactagctttctctgcagcaaataaatgcgttcctgcgtctcctaccttaaaacagccgttctgtctccacccacatctccctcgagctcctgccgcagctccaagcttcctcccccagttctctttcactcatggctgaatcctgcccaccctcgggcaggttggattcttcggagctcagagtgtcacagagagctctcactgtgggcgggtgaggccagaaggtctggaaggaggcagtcaaggcccagtcaacctggagatttcagaagggcaccaaacctggaggaaggaacaagaggcaagatgaaggtcgcatccggagcctgggctggagctgggaggcagacagcagcgtgaaggtgggcggcggtcaggccatgatcgccaggagggggacatggctggagaggacgcggctccctctcaggtgggatgtctgaaggacctaaagggccaggagctgaggagacacctcttggggcaccaggcactccagccaagctgctccgtcaccagggacctctcgggctcttcctgatgagcaaccagcacttccttccctgggcttcccagggccctcctggcttcctcagctgccctcagggatacccctcccccaccagccctcgagtcttggtgggcctcaggattccaccctagcccttactgtgacacaggcccatgaagtcgggggtgctaggtgccccccacttgccccgatccaggactggggcactctttccactgctgggggtggcagaggagtcacctctgccaaaggtggtcaccttaccagggctgggccccttccttggcagcagcccagtgctgagacacaaagatcttccccgttgccttagttgaggatgtctccgaaggaccctgctggctccggagtccttgtggggtcagctgaggccttcactggctgcgtggcagcctggtttcctttgtctctccccgcataaattccctgcatcctctctccctacgtaaattccctgcttgctaatatccatttcagagcctactttctggggaagccagcctgagacaccatctcatctgcacccgaggcctcagctccaggcacatgctagcagctcccaaatgaatacctgtggccagactttgctgctgagcaccgatctgtgtggcacatgtctgggattcagcatgtgggaagcaggagtcaccgccttcccaggaggaccccttccctgtcttccatggctccatgagtggcaccagtgtctgcccactgcccaggcctggagtcctatggacagattcggtgccctggagctccccaatctcccacagtgctcattcctcctcaccctccctgtcgctgccttggtgcagctcttcctgcaacccccttggatttccgccagagcatcccactgtctctttccaggctttctccaccagctccaccttgtgctgtcccggagtgtgaccgtccttcagatgctcatgtgttcgcattgctgatgtgcataaaatctttcagactttccccctcagggtgaaatgccacggtgcagcctggggttggagggcattggtgccccctttcccaggctcacatgccaccctgctccctgcaggcttccacgcttttgccgcgtcctagaacttggcagccaccccaactcaagatgatcatttgcctccaagcttttccgcatctgtctcctcctggagaggcctcttcccattgtcctcctctgcctggttcacatctcttcagcctcaagacgaggctccggccaaggcatctcctcttcgagcagcccttgttgcaggcccatcaggctgtccccctcactgacgcgggccgtgagcatcagagggacaggtgctgtggccgtactccctgagtccacagagcctggcatggcagggggactcactcagcacactcgtgctttgtctgcttctggagggcagatttcaaagaagcataaagaggtagaacttaaaaaaaaagattctagggccaggcacggtggctcacacctgtaatcccagcactttgggaggctgaggcaggtggatcacttgaggtcaagagttcaagaccagcctggccaacatggtgaaaccccgggtctactaaaaatacaaaaattagccgggcattgtggtgtgcacctgtagtcccagctactcaggaggctgaggttgttgtagtgagccaagatcacgccactgcactccagcctgggcgacagagcaagactgtctcaaaaaaaaaaaaaaaaaaattaagaagagagatgtctcaggtgggctgggagatcttgcactgaagctttgaatatggattacaaaggagcccagtgaggaaaagaagggaagcattaaaggctgcaggggctcccctcagagcttgttcgtggtctcaggtttggaaagaagggcaccaaagtaaggtagccggacaaacggcgtggaccagcgggagtgttgttgggaaatgccgaaggccataaaaggagtttctgtgtagttacttttgaagcaaggagtgcggtttggggctgacagtaaaacgttagccctgatgcagacggaacaacactacacaattcgtattttgcttttgccgtctttgtcaaggagaacagtttttcatttggaatcaaatattggtcgtcgaagggggttaaagcctaagagagtgtgggaggctgcatgaccaacctcactgtgcagaggaggccgtctccccggtgggacggcgtctcactgctcctgggagacatgaagttggggccgtggctccatggggacttttggaggcggagggcttccaggagatgggggcaatggtgcttgatgtgctcctccaggttattctctaggggattccggcttgggagcacatacgtagaaaaggaaacactgctttctaggagtcctaacaagaaatcataccaggcaagcctcacttttccacaggtcaaccagaatcatactccagagaggactgtgcagtgcctgtatgtaggtttcctgggcatttggtagaggctgtcaccataggctgggttcggcatgaaggaatgcgggtcaaatgatgacagaatgaagtgggctcattatcaaaaggtgctgctggccatcagagtgtgcccagagggcaggccctgtcaccaccccgagttctgtctccactcacaggttggccagggcaggcccagtgttttggatgaggctattaatggaacaatggtcagattcacagatgacatgaatacaactgacagcagaccgaagatcccagaagatctcaacagactgtaatgatggactgagttgaaaagggaggcccagctgcacaattaagaacaggatctgggaaatgggatttgacagcaagacgtgtgaaaaaaaaagactttgggctcaatctgttaactgcgttgtgttgtggggctgccaagaaaatgagcatcagcctcaactccgagtgtcgcacttgaaagggaacattgacaacccccagggccgtcagaggacccaaaccaaaatggcaaaaaaagatacaaaaagatgggaatgagggggctgtggcacctgcaggaaggggcagccacgggaatgtggcaacttcttccaagcgtagaggacctaggttggcggagagctccctcctggaggccccagaggacaggatccagaagctttgagtggaagtcccagaagggcaggttttggcaaaatatgggaacgatttcctttggttagtccggtaaatgaatttgggctgtcttggcagatactgcacttcctttgctgaagtgaacacttattgggggtgtggcaaagagaattaaaatggataactatgcagaagctagattaggtgacttcaaggtgttttcttttttcttttttcttttttttttttttttttgagacagagtcttgatctgtcgcccaggctggagggcggtggcgtgatgtcggctcactgcaacctctgcctcccaggttcaagtgattctcctgcctcagcctcccaagtagcaggcattacaggtacctgtcaccacacccggctaatttttgtatttttagtagagacggggtttcaccatgttggccagactggtctcgaactgacctcaggtgatcctcccacctcagcctcccaaagtgctggggttacaggcgagagccactgcgcccagcagacttcaaggtgttttctaagcctgaggttctgtgatttttatcatacaaagagggagatgagaatggaagttggtatgattgttcatgtgtaccttttaatttacttataatacgtgtgaatggaaggacccatatcataggtggacacttcgtgccctttgcaaaagagatcatccatgtaccacctgaccatgggacagaatgtctgccgctccccagaagccccatcaggcccctgccaggcgttccctcctgcagaggtaatcactttcacagcttccatcacatagattcattttacctgttttgttggttggttggtttttgagagatggggtctccctatgttgcccaggatggcctcgaactcctgacctcaaatgagcctcctgcctcagtttcccaaagtgctgggattacaggtgtgagccactgtgcctagcccaattttgcctgtttttaaacatttatataaatgggaccatgcagagcattctcccttgggtctggcttccttggctcaacacctggtttgtggggcctctccacgtcaatgtgcgtggttatatatagacgggttcctcatgttgccctgtggtggtccactcgtctgggtctgtggccgactgtgtcccgccgtctattcccgtccacactctgtgtgctcagactggtctgtggatgaccaggcagtctggtggctgtgggcttgcagacccccgggagggacaaccagcttctaagcccacccccttgttcttcccacctggcaagtgcgcaatgaagagtccagggaaggagtgccgagcaggtggctgacaggcagcctgatggacaagaggcccggggtgcgagccaggcggacgccctgaggcagcatgtcaggcagcattgccacggtggaacaggccactgccgttgcttcctgagctgccctggagactggaaaaggcagctcatgcctttggccaggtgcctgacagccttttagggcagttcagtcttggcagggcccagttctcctcccagggagtgaagacaaggggctccagaggggctgtgctggcctatgtcactgcccgacatcccagcagcccacgtggttggtgcctttgccttcctgggtgccccttgcggaggctaggaagcagagcgctggcattccacttctggccctgctgcgggtttggaaaagtcatttgtgaatgtctcagtgccttcgactcctctgagtgctaatccagtgtcctggtcttgtggaggcccttggtgggtggagggggacagggcggaggcagaagctggcctggcctagcctggcctggctggtgcacgccagggctggagcctgttgccttatatgacagtggctgggatggccccatggcttctgcctcctcctctgaacctggttggagttccggggaggccttgccaggtggggtcaggcctcttctatgggagggagagcccacagccagcctcagccagcccctctgcttgtgccctgcacagtctgggtggtggtggggtgaggcttttctttttcttctccatggaataagttctcagtctgtaaaataaaaaaatggtctcgccccgccccctgccccctccttgctgtgtcccagtgggaactaagaatgcaggacggggtttaaaaggcggggagggccatcaggatgaaaggcagtgggcaggcggggacagcaagggggctcgccactcacatgtgggtttcttttcatccatgcaccctcttggtgcttcttgtggtgcttttcttcatttctggataacagccccatcctgacccaccctgcccgcctcttcccttctggaaccacccctggcactgctttgccggcctgcctgctcccctcacccccgggccgggcaggccctcctcgcccgctgtgagtaaacgagtaaacgagctcccgcgcaggcctcaagttttggattaatgaagcccagatgcagacttctgactggctttgagttcactgtggagcagctcagaggggccattgacctcccactgtgttcccggcccagctgctgctggggctcccaaacagctggaaagctggccctgtctgacagggaggcgaaggcctgtgcgtgggggagaacctgaagcttggggctctgggtgtggggccacggggtggcctgcacccacgggggtctgttgtaggggccgtagagaggggataaggggcttctgttagttatcccatggttcagtccgggtgggcgctgcctttcctcagtgctcagtgtgggggaagtgggaagtgttgagtgagtacacagtggtgctgcacaggagggggttgaggctgaaggggcccagggtcagggcacccccacgatggttcacatcaggccttcacagtcaggcatggaggggaatggttggtccctctcagggttgctagacacgatgcacatatcacatgggataaacttatgccagaaaaattattttcggtcgggcttggtggtacatgcctgtgatcccagctacttgggaggctgaggcaggagaatcgcttgaacccaggaggcggagcttgcagtgagctgagatgccgccactgcactccagcctgggaaacagagcaagactcctgctcaaaaaaaaaaaaaaagaaagaaaaagaaaaagtattggctgggcgcggtggctcacaccagtaatcccagcactttgggaggctgaggtgggcagaacactcaggcggatcacctgaggtagggagttcaagaccagcctgaccaacatggagaaaccccgtctctactaaaaataaaaaaattagctgggcgtggtagcacatgcctgaatcccagctactccggaggctgaggcaggagaatcgcttgaaccgaggaggcagaggttgcggtgagccgatatcgcaccattgcatgccagtctgggcaacaagagagaaactccatctcaaaaaaaaaaaaaaaaaaaaaaaaaaaannnnnnnnnnnnnnnnnnnnnnnnnnnnnnnnnnnnnnnnnnnnnnnnnnnnnnnnnnnnnnnnnnnnnnnnnnnnnnnnnnnnnnnnnnnnnnnnnnnnnnnnnnnnnnnnnnnnnnnnnnnnnnnnnnnnnnnnnnnnnnnnnnnnnnnnnnnnnnnnnnnnnnnnnnnnnnnnnnnnnnnnnnnnnnnnnnnnnnnnnnnnnnnnnnnnnnnnnnnnnnnnnnnnnnnnnnnnnnnnnnnnnnnnnnnnnnnnnnnnnnnnnnnnnnnnnnnnnnnnnnnnnnnnnnnnnnnnnnnnnnnnnnnnnnnnnnnnnnnnnnnnnnnnnnnnnnnnnnnnnnnnnnnnnnnnnnnnnnnnnnnnnnnnnnnnnnnnnnnnnnnnnnnnnnnnnnnnnnnnnnnnnnnnnnnnnnnnnnnnnnnnnnnnnnnnnnnnnnnnnnnnnnnnnnnnnnnnnnnnnnnnnnnnnnnnnnnnnnnnnnnnnnnnnnnnnnnnnnnnnnnnnnnnnnnnnnnnnnnnnnnnnnnnnnnnnnnnnnnnnnnnnnnnnnnnnnnnnnnnnnnnnnnnnnnnnnnnnnnnnnnnnnnnnnnnnnnnnnnnnnnnnnnnnnnnnnnnnnnnnnnnnnnnnnnnnnnnnnnnnnnnnnnnnnnnnnnnnnnnnnnnnnnnnnnnnnnnnnnnnnnnnnnnnnnnnnnnnnnnnnnnnnnnnnnnnnnnnnnnnnnnnnnnnnnnnnnnnnnnnnnnnnnnnnnnnnnnnnnnnnnnnnnnnnnnnnnnnnnnnnnnnnnnnnnnnnnnnnnnnnnnnnnnnnnnnnnnnnnnnnnnnnnnnnnnnnnnnnnnnnnnnnnnnnnnnnnnnnnnnnnnnnnnnnnnnnnnnnnnnnnnnnnnnnnnnnnnnnnnnnnnnnnnnnnnnnnnnnnnnnnnnnnnnnnnnnnnnnnnnnnnnnnnnnnnnnnnnnnnnnnnnnnnnnnnnnnnnnnnnnnnnnnnnnnnnnnnnnnnnnnnnnnnnnnnnnnnnnnnnnnnnnnnnnnnnnnnnnnnnnnnnnnnnnnnnnnnnnnnnnnnnnnnnnnnnnnnnnnnnnnnnnnnnnnnnnnnnnnnnnnnnnnnnnnnnnnnnnnnnnnnnnnnnnnnnnnnnnnnnnnnnnnnnnnnnnnnnnnnnnnnnnnnnnnnnnnnnnnnnnnnnnnnnnnnnnnnnnnnnnnnnnnnnnnnnnnnnnnnnnnnnnnnnnnnnnnnnnnnnnnnnnnnnnnnnnnnnnnnnnnnnnnnnnnnnnnnnnnnnnnnnnnnnnnnnnnnnnnnnnnnnnnnnnnnnnnnnnnnnnnnnnnnnnnnnnnnnnnnnnnnnnnnnnnnnnnnnnnnnnnnnnnnnnnnnnnnnnnnnnnnnnnnnnnnnnnnnnnnnnnnnnnnnnnnnnnnnnnnnnnnnnnnnnnnnnnnnnnnnnnnnnnnnnnnnnnnnnnnnnnnnnnnnnnnnnnnnnnnnnnnnnnnnnnnnnnnnnnnnnnnnnnnnnnnnnnnnnnnnnnnnnnnnnnnnnnnnnnnnnnnnnnnnnnnnnnnnnnnnnnnnnnnnnnnnnnnnnnnnnnnnnnnnnnnnnnnnnnnnnnnnnnnnnnnnnnnnnnnnnnnnnnnnnnnnnnnnnnnnnnnnnnnnnnnnnnnnnnnnnnnnnnnnnnnnnnnnnnnnnnnnnnnnnnnnnnnnnnnnnnnnnnnnnnnnnnnnnnnnnnnnnnnnnnnnnnnnnnnnnnnnnnnnnnnnnnnctgctgctgctgctgctgtgcaaaccttctatgcctctcctttttttgcaactttgtacctaggagtaggattgctgggcatggggtgggcatctacacatctttagtagatcttgccagttttgggcagtggcgcacccatcaatatcctgccagctgtgtgtgagtgcccataaccctgcgcccccaccagcacctggcatggccccagctcgtgttggctcttctggggtgcggtgctgctgctgcttgttctgctttttgaaaaatccaagagtccgctgctttgtcgagtcctctgactttcttgactctttcctaagaaaatctaaaagtgccccaggattttagaccctagattaatgcctctgtgatcccagcctcaccggagctttgaggaagccattcctgcctcagttcccgttcacccagggagcctctctgcatgcaaggctggggtgagaggtccaggggccaggggttccaggcacagctgtctctgggcattctcagggctctgtttcagcctctttgcctccctgtggcttcctcttcctgattctccctccaggaggcaggatggccaccagtggctgtagtggcggccctgctggaaaggcctgcatgcctgcactttgctgatagttcagccacagcccgaggccacctctcagtgactgggtcaggtgcctgtcctgggagcctggcaggagatggatttcccaaaggaaagcccagtggatactgggtgaaaagaaaaccatgaagtttggcctgctgaggccaagtcagtcccccagcctcccccaccctgcagaggtggagccacaaaggaaagaagaggcagaggcgtattgaaaagcagttcagccgggcgcggtggctcacgcctgtaatcccagcactttgggaggctgaagcgagcggatcacgaggtcaggagatcgagactatcctggctaacatggtgaaaccctgtctctactaaaaatacaaaaaatcagccgtgcatggtggcgggcgcctgtagtcccagctactcaggaggctgaggcaggagaatggtgtgaacccgggaggcggagcttgcagtgagccgagattgtgccactgcactccagcctgggcgacagagcgagactccgtctcaaaaaaaataaaataaaataaaataagcagttcagtgctgctgcctctatggatccatggatatgtatcggcagaggggataaaaaactaagaaaagcccagctctgtgggcctctgaaattaccagggacttgagtttttgtgtggatttattatttaattttctgatcatgagagtttcattcctcctagaatacataatgctgtaagccaatggagaaagccctttgctggggtaccccagatggagggtggctcccccaaagtcccctctccatgggtatcctgccccctgctcgggctccccgacttccagcacaccctctctcaggctgtcgcttttcccccaggcggcttcgaagccagctcagccttgtggtcattgctcgaatgctgggccagcaggagatgctccctctctggcaagagaagacccaggtgagtgtttgcttcaggcctgggcaggaaggccatggcctgcgggctctggaggctttccccaaaggccaggaacatcaggccccagagctaagctggctctgaactctctactcatgttctttcatcaagaattaccgcttgcatgccagccatgtgctaggcgctgaggacagagcagtgagctgagagcctgtctttttaaaaaattgtagttgctgggcacggtggctcacgcctgtaatcccagcactttgggaggctgaggcgggcagatcatgaggtcaggagatcaagaccatcctggctaacacggtgaaacccgtctccactaaaaatacaaaaaattagccaggtgtggtggcgggtgcctgtagtcccagctactcgggaggctgaggcaggagaatggcgtgaacctgggaggtggagcttgcagtgagccaagatcgcgccactgcactccagcctgggcgacagagcgagactccatctcaaaaaaaaaaaaaattgtagtaaaagctgggtgtggtagctcacacctataatcccagcactttgggaggctgaggtgggcgggatcgcctgagatcaggagtttgagaccagcctggccaatgtggtgaaacccttgtctctactaaaaatacaaaaactagctgggcatggtggcgggcacctgtaatctcagctacttgggaggttgaggcagagaatttcttgaacccaggaggcagaggttgcagtgagcatttaattcaaataaatgaattaaattcatttatttaatttttttgtaatcatcttaaccattcttaagcatagtgtttcagccatttctaagtgtacaattcagggaccttaagttcattcacagtgttgtgcagccatcaccaccatccatctccataactctttcaacttcccaaactgaaactccacactcattaaacacaaccccccaacagtgcccacagcccatttttttgttgttgtttattttttatagtaaagcataaaaacaaatactgtttgtaaagatgaaaacaaatactattaaattaaaactactccctctggtgtcccctcagtccccagggttaggtattgttggggcagcaagggcattaagaggtcggccttctgagccgggcgtggtggctcacgcctgtaatcccagcactttgggaggccgaggtgggcggatcacttgaggtcaggagttcgagaccagcccgaccaacatggtgaaaccccgtctctactaaaaaaacaaaaaattagccgggcatgctggcaggcgcctgtaatcccagctactcgggagactgagacaggagaattgcttgaacctgggaggcggaggttgcagtgagccgagatcgcgccactgcactccagcctgggcgacagggcaagactctaaaaaaaaaaaaaaaaaaagaaaaaagaattcagccttcctgtcctgttcctcttctctccaaaaagctctgactgcaggctcctggcagctcagaggacgtcacttcacggggtgatgaaggggtcactggcagcccaaggatggatggaagggaggttgagcgcgcccgcacctccgcagtaatcttcctggaatcctgggagaagagctgctgggtacaactgacccttccagctcagctacactaggggtgctctggctagaggctgtgcatctctagccactgaggcagcataaccccttgcccagagggctgagacaatgttccagcacatccctgggtgaggtggaccatatgtctgagtcccaggtgctgtgactgcaaggagggagttcagagaggtgaccggtggggttgggttgtctgagcggcttcggcctggcttttgcctcagatgcctcctttgccttgaatgcttcccccaggccttagtagaactggagcttcttgtcattcccactccagccaaaatgtcacctctgcaaggggccttcctgaccacccaatccagagtgccccagcactggctgtcatcttgtcctaagtcactcctggtggccaccccctgatcttttcctatttgtttgctcagcatctgtgttttccatcccctacccccaagcagaaaataagcccctgaagaacagggaacacgtagtttctggcccctgctgcccctcggcacctggcggtgcctggcacaccccgggaaggcagtgcacgcttgtggaagggacaggcacccaggtgggtcgtcggggtgcatggggagaacgtgccccagctgagaccttgggaggggcagtgaggaggtgaccggtgctgaggttacttcatagatggtctctgtgaggaaggaagaacagagggacccagcggtgttgctgggaacagccagcagttagaggcaggggggagcacaagatggggtgcctgggagggctctgggatgcaggctgacggacaggcccagcgcagagtggaggccagagggggcgcgacacaggtggccagagagagagttagagccagttcaaggcttggcattttgcttcattttgttttttcttggccagcagctgtgcatagagtgaggagagcttggtggggctgccttcctggtggaggtcagagtggcagaggggaagtgtcatggaggaagggctgggtcgttgggcccaggagttggaggctacagcgagctataatcacaccaccgcactgcagcctgggcaacagagccagacaccttctcttaaaaaaaaaaaaaaaaaaaaaaaagagtggggaatgggggcgcgggaggcagtgtctctggcctgtaatctcagcactttgagaggctgaggtgggaaaatcatttgagccctggagttctttacaaaaagtaaaataattagctggacatggtggcatgtgcctctagttccagctacttggggtggggatgctgatgtgggaagatggcttaagctctggaggtcaaggctgcagtgagccatgacggctccactgcactccagcctgggcgacagagcaagacccgcttttttttttcttttttttttaaagtacatggagtggcgctgcctccccttgagagatcctggccaggcaggtctcccaggctccccaggggccagggtcttgcagcctgtcagggccaagccaggtccagcccacttgctgcatgcccaccatgcacccatgtgtttattagacactagctgagcaacctgagtgccaggctctgtgccaggtactggcactggggagacagcaccagatgacctcagaagagaggggtgagcaagtcggccacggccatagtgactaactctgtccaggcacagtgcggcagctgctagagaagatgccctgagccaggtcttggaggctgagtcagtgcttgtactgcaaaaaggagaaagggagtgagagattcatggcgactggagggataggaaggactggcaggggcctgcccatggccttcctggagctccttccccatctccactgcaagcccagggctgctcacagcctcctcccaggtcttcaggctgccaggcactcccctttccagtctggcctgtcagaccttcctgaaacactccttcaaagggccacctcgtccccacagccacccactcagcccacatgcccctttcccaatgtctcctccacggggcttgccagtgctgcatgttctcatcgggcctcctcacaggccctgcctgccctctgcacacagcttttgctgtgtctgggcctcttcttcctttccacctgtcacccccgacccgcagtagtggcagctcccatgtacaacagcacagctgtgtcctggctgctgtcctcagtgctcgcccctcctagcagcccaaggccctcagacttactgtcatccatattttacagataggggaactttccagggtcacccaacagggaagtggtacagccgggattattttatttttgaggcagggtctcactttcccaggctggagtgcagtggtgtgatcacgactcactgcagccccaacctccctggctcaggtgatcctcccacctcagcctcctgagtagctgggactatgggcgtgcaccaccacacctggctaatttttgtatttttttagcggcagggtttcgccatgttgacaagggtggtcacaaactcctgggctcaagtgatcctcttgccttagcctcccaaagtgctgagattacaggcataagccactgtaccccgcctagagctgagattaaagtcctgcccttgaccactgcagggcaccgccttagcctgtccagctctctccttgcctctggacatcctggaccacacccgccacttcatggtgaagtgccctgctgggtccttgggctttagtcccggttcacagacaggaggacaagggccgtccctccctttcctcatcagtgcacaagtgctggagaaatcctatcaatcgattcactgtaaaagggggcacaggggtttagaattgactggtgtaggagcagaggacctggggctggatctgggcacagcaatttgcagggcactgctgggcaggagtccctgatggccaagctgctgggctctgtatctcccacaagctgcagcggaggccccatggagcaggagcagaagcacacgttggagaactgaacttgaaggacaggacttacagcattgaggtcacacaggcaagtggaggctcagttagccagagcctcaaggctacggtgagggttttgacttctgcgcagaagtggggagcccctgcaaggatttgggcagagaagaaacaaaatctgatttatacaacgtttaaaaattactctgcctgctgtgttgagaagagattactgggagtggagaggaaggaggtgattgcagtaatcctggcaagagatgacagtggtttggcctggagaaacagcagcgtgggcggtgagaagtggtcaggttgtaggtgcatttcccaagtacagacagtgggatgtgcgatgcaagagaacagagacaaggactctaggtcagtgcaacaggcgggatggagacgccctttgcctaccctaggcaagacgcagctggagcaggtttggggaggaaatcaggagtttgcttcttatcctggggcacttcttgcaacacagtaaacctcttgtcaaagtgtgtcttccagtttgggatttggaaaacgtgggcttcgggtggctcaaatcggggataaaggtttgcatctactcagaaaatgttagctgcagtcttgactgttcatttattcattcaatcatttgttcatttgacagatacttactagacatgtaccatgtgccaggcacggtgctaggttctggggactctgcagtgaaaaaactgccctcagagagtttacattccagggagtgggggggaataggtgataaaaagcaagtaaattgcaaaggggccaagcgctgtggctcactcctctaatcccagcgctttgggaggccaaggtgggtggatcacttgaggtcaggagttcgagaccagcctggccaacatggtgaaaccctgtctctactaaaaatacaaaaattagctggacgtggtggtggccgcctgtaatcccagctactcgggagactgaggcaggagaattgcttgagcccaggaggtggaggttgcagagagcagagattgtgccactgcactccagcctgggggacggagcaagattctgtttagatagatagataggcagacagatgggaacttgggcaggtgggcctcactgagaaggtgggtgtggagcaacggctggaaggaagagagaggcaggtgctgtctggtcagaaggcccaggcagggcaccagctccaggaagcagcaggcaggtcgttgggtctttgcagacacttaagatcttggcttcctgtcctaggtgaggaggaagccaggatttgcacccaggagcaacatgctgtgtggccagttgcttctctggaaatcagcctccaccacctcttccctgcctctgagaaggctggtggaggcctgtcttcctgagggatcattgcttctcgccctaggtgtctgccctaagcggccgagtgtttgtagagccagctgccagcagtgatgtcggtgtagggagagttctggtctggcccatccccgctggttcctgcaaggcccaaacaaccccttatcctggagaggggtttgtgtgtgggggagaggctggctggagcatccagagatggaaacaaaagggaataaacaatcggaaggcacaacggcacaggcagatcgcaggggcagcagcttgctgcactgagcacagccaagctgttttcatgagtgagaggaaaaacacaagagcaagcatcgcaagagtgctgtcctgtgcgcccctgcccagccccacccaggcctcccgtagcagggagggtcccggctgggcgaggcctgcccaaaggccacgctgggggtgtgggctgcagagcctgaccctatgcttgcacagctgtgagccctgagtgggcagaactgttctggaaactatcttgacttgtgaagcctgaggaaggtggcacagccatggtttgggtgaagccccagatggtgcctcccttcgcccagaaccttcctcccccctcccaaaaggatcagaaactaggctgagaagccctggccgcctcccagaagctgaggccctgggcctgactcctagcccccagcccagctgctcttgtgggctgtctcagcccataaccggctgatgtgctgagcaggtggtaggtgagtcaccggaggaagccaggtgtgccagccaggctaagctcaagaggggggctgggctgcagggctcaagcccctagcccatggccaccctgcttctgtgccatctaaagagatggtgcttttgtgaactaccctggatctgctcccacttactccccgccctgcccccagggctgctgtggcctcacagaggccaagggctgggagcctgcctgcctctgccccagccaagagttagcttcagggcagctgggcagtccttgctggggctgggcccaggctacccgaatcaagtgcatgcactgggccagaaggagcggctaactgtagacacctggacttacgcaggtcacattccctccagaggggttcagagaggttgggcagtttattcaaaaactaaatgggggctggggcggctaatagcttaggtgccatagtcagccaaaagcagtgtgtgggccttgtgttgaatctcccttcaaacagaccaactgttggaggacattttagagacagagaaaactgaacacaggtgttggatgatgataaggaagtctcgttgattctgttaggaaagaaatggtattatgattagattggggggaaatccttatcttttctgtagaagctctttatgggtaaaacgatacgatgtatttgctttaaaatcccctggaaggaaaagagcgggaaggggagtggaaggcaggggctgaagacacaggccaggcggaatgaagatgatggtggtcttgctcatggtgatggactgttggggacttagtccatggtctctcttcatggtgttccaaacctccacagagaagagttaaaccaaaagagagggatgcaagggagggtgggcccacagatgcagannnnnnnnnnnnnnnnnnnnnnnnnnnnnnnnnnnnnnnnnnnnnnnnnnnnnnnnnnnnnnnnnnnnnnnnnnnnnnnnnnnnnnnnnnnnnnnnnnnnnnnnnnnnnnnnnnnnnnnnnnnnnnnnnnnnnnnnnnnnnnnnnnnnnnnnnnnnnnnnnnnnnnnnnnnnnnnnnnnnnnnnnnnnnnnnnnnnnnnnnnnnnnnnnnnnnnnnnnnnnnnnnnnnnnnnnnnnnnnnnnnnnnnnnnnnnnnnnnnnnnnnnnnnnnnnnnnnnnnnnnnnnnnnnnnnnnnnnnnnnnnnnnnnnnnnnnnnnnnnnnnnnnnnnnnnnnnnnnnnnnnnnnnnnnnnnnnnnnnnnnnnnnnnnnnnnnnnnnnnnnnnnnnnnnnnnnnnnnnnnnnnnnnnnnnnnnnnnnnnnnnnnnnnnnnnnnnnnnnnnnnnnnnnnnnnnnnnnnnnnnnnnnnnnnnnnnnnnnnnnnnnnnnnnnnnnnnnnnnnnnnnnnnnnnnnnnnnnnnnnnnnnnnnnnnnnnnnnnnnnnnnnnnnnnnnnnnnnnnnnnnnnnnnnnnnnnnnnnnnnnnnnnnnnnnnnnnnnnnnnnnnnnnnnnnnnnnnnnnnnnnnnnnnnnnnnnnnnnnnnnnnnnnnnnnnnnnnnnnnnnnnnnnnnnnnnnnnnnnnnnnnnnnnnnnnnnnnnnnnnnnnnnnnnnnnnnnnnnnnnnnnnnnnnnnnnnnnnnnnnnnnnnnnnnnnnnnnnnnnnnnnnnnnnnnnnnnnnnnnnnnnnnnnnnnnnnnnnnnnnnnnnnnnnnnnnnnnnnnnnnnnnnnnnnnnnnnnnnnnnnnnnnnnnnnnnnnnnnnnnnnnnnnnnnnnnnnnnnnnnnnnnnnnnnnnnnnnnnnnnnnnnnnnnnnnnnnnnnnnnnnnnnnnnnnnnnnnnnnnnnnnnnnnnnnnnnnnnnnnnnnnnnnnnnnnnnnnnnnnnnnnnnnnnnnnnnnnnnnnnnnnnnnnnnnnnnnnnnnnnnnnnnnnnnnnnnnnnnnnnnnnnnnnnnnnnnnnnnnnnnnnnnnnnnnnnnnnnnnnnnnnnnnnnnnnnnnnnnnnnnnnnnnnnnnnnnnnnnnnnnnnnnnnnnnnnnnnnnnnnnnnnnnnnnnnnnnnnnnnnnnnnnnnnnnnnnnnnnnnnnnnnnnnnnnnnnnnnnnnnnnnnnnnnnnnnnnnnnnnnnnnnnnnnnnnnnnnnnnnnnnnnnnnnnnnnnnnnnnnnnnnnnnnnnnnnnnnnnnnnnnnnnnnnnnnnnnnnnnnnnnnnnnnnnnnnnnnnnnnnnnnnnnnnnnnnnnnnnnnnnnnnnnnnnnnnnnnnnnnnnnnnnnnnnnnnnnnnnnnnnnnnnnnnnnnnnnnnnnnnnnnnnnnnnnnnnnnnnnnnnnnnnnnnnnnnnnnnnnnnnnnnnnnnnnnnnnnnnnnnnntcttggccccaccctctgtgagtgacagcctcccttctcctccccagctgtcctcgctcagccggctcctgggcctcatgaggccatcatctctcaggcaatacctggactctgtgcccttgccaccctgccaggagcaacagccaaaggctagtgccgagctagaccacaaggtgagtgagcacccagcacccgcctgcctccaccacggtgccaccaccacaggtagcagggaaaggcagggctgtccacattgcatggcctgcgggtccttccagaaccccagggccatgccagggcagagaccaacaggctgcctccctgtgttgagcagaggtgctcagcatctcacctgtaattagtgctgttacccgtgccgcaggcgctggggacgccctgtgcgcaggtgtaggggccaaatgtctgcctgtccctgcttgtgtgccttttgttgatctggggttgtcagccttacagcatggtttagggaggatgcaggagctggatgccagggaggggatgggagcacatcaggataagcgcagggttgtctcgacgtgcagggcatcccttcttctgtaggcagagctgggcccagcctccctgttcattttcactgtggttgtcactgagtctgagtccttggcctgtccccagttcttcctaattgactttccagacattgcccagctttcctgaaagccaagttctggtgggagtcaggagcaacaaggtgccccagggcctgcaggttgtggagtttggaacagtgaggcctatgagtccctgggtgaatgtcagagcagggatgtggtgggtgtgagggctgcagagtgggcatcccgggctcagcttcctggggagcagggcttaaacctcgatgtactctgctgcccctggggactcgggaatgaagaatggagatagggatcgttataattggggaagatggtaattccagaaactcactcggaggctggatgttgatacagaagtccaacctttgggcatcactctgcaaatcagataaatgaattaattacttaatgaacacaaatgaaccattaaagagatatgctaatccccaggtgcacgctcctcttctggaacatgtggggaaggttgtctttcagttgtgcctaatattagtgcgtttatgaggctgctgcctcccaggagagcgtgagctgtctgcatgccccttctcttgtgccaagtatttccccagaaactggagctggttatgggctggttatggggcctctagagaggaggtgggggtcagtcctggggtggtctgtctaaacagaactcagggaggcctgggcagggagcaaggaacaagaaggcgagtggtgagagagaggaaagagtgtcacgtctggtctggctaagcggagagtgtggcctgcaggcaccttgggggccagtcctgggcctcacctagcagaggtgtgattcctgccaggctcactctggtacagaggctatccaggtggcagaagacattctttcaacagctggggaagagggacagtgagcaggctgaggatgccttttctttagaggactattctcacacacctaaaggaggtttgaaagcctccccctggttggccgccatattggaaatgacctgtttggcctgaaaacatggaggcaccgtgcagctcggcagagccccaaaggggtagggtgcactggtccagggcagtggagaggcaggcgagtcccaggcagctctcagaagccttcactgcagcccgagaccaccttagaccccctctgctgcgctcccctacacctctgcctctgagtgagggagccccaggccaaggagggtacatgggcacagaagtgtgaaacaggcccctgggctgggttctgtcccctgggctgggcactgttctgactgggaggggccaggtggggcaggtgactgggctccactcccaccccggccggatgactcctcattaggcctcagcatgtttcatcttcaaagaggttagatgggccactcaccagccaaaaacaacagcggcggcatccaccctgttttataaggagtggtggtctgagccgtggctgagcctttcatccccagagctcaaagtctttgccttttcgtttcccttcagtgccatggggaaactgaggccagagtagggttgacctgaggcggcccagcctggaggaaatgcctactttcccagcgttggggctgctgagctgagcctctgccttttgacgcctacccatcccccaggccctctcactcctgtctgggagatttcctgccctgtgcggctgggtcacagccctcctccagccctgcaaataaacacttctgcccagctccttccccacctcctctggctgcctcaggccttggcccagcctctccctctgggaagaggctgagagagctgctgttggtgtccagggcacaactttctctcctcactgatcccttggcaagtaaagttgtccctttgcttgccccctgtccagctagactgtgggcacatgcagtgtctctagcactgcgtcccacatttggcactaggtgaacgaatgaatccagttttaattcctttgtccttctctgaactcccttcttccattctgttctggcattcgctgttcgctctcctgcccccattctggaaacctgctgcctcctgtgtgccatctgaccagcctctgcatcgtggtccccttgtctcttaaggtctttgtatcattaaggccacaagagcttatagcctggccttctcctgcaggaggctctggactaaagaagtattacctgcatgtggcagaaccaatcccagcacatcgtttgtaattataagctagtgaggtcctgcctgggaaagcaccaagtacttcagcaaaggaagccatgagctcctgctgcagctgtgcatgggggtcaggaactggagtgaatcaggggcaacatagatgcctgcactggccgtgtgtcctggctttgaccacagtcctagctgagcaggcagagcttatatggactataagagcttctgtggactatcccgcttagtgagctgataacgtttttagcattttgaagagcttctggataaagaaaacaaagctgagccgcttttggttatctatggccctgtgcatgcctggtttgatctgggctttattctcagagaagagtaaacatctggtttggagtgatgcttgggggtctggtacagccatgtgagaggcagagggcttatttggctgacagtggtagagggtgttttcctgtgggagagttaacacaggagagtttaatacttagagttggcctctaagtactccctttggcccatggataccaattcgccccagttgccttcccaggcaatcaagggagactgttcttttggccgcaggcagaaaaacattgcataacttgactcaatttgccactgtctctccaagctaccacctgagcccaccaacccagaaccagggtcttcttggggcagtttatttcctcgtagctgacttgtataaaccatatctggccagatgttttctggtgtgttctatccagcctcagggctcagggtcatggaggtcatggcctattcactcttttttttaaacagggcctgtctcactctattgctcaggctggaatgcagtggcgccatcaaggctcactgcagcctcgccttctcaggctcaatagatcctcctacctcagcgtcccaagtagctgggacaggcacatgctaccacaccgggctaattatttatttatttatattgcttgattgattgattgattgagacggagtcttgctctgtcgcctaggctggagtgcagtgactgactggatctcggctcactgcaacctccacctcccaggttcaagcgattctcgtgcctgagactcccaagtagctgggattacaggcgcgtgccaccatgcctggctaatttttgtatttttagtagagacgggttttgccatgttggccaggctggtctcgaactcatgacctcaggtgatctgcccacctcggcctcccaaagtgctaggattacaggtgtgagccaccacgcccagccaattttttttttttttttaataaagatggggttttgtcacgttgcccaggctggtcacaaactcctgagctcaagcagtcctcccacctcagcctcccaaagtgctgggattacaggcatgagccatctcaacgggccccaattcaattccatcgagattattgatattttggctgtcaaaacctgctattgcatattatactcctcgttaccacacttccttatcatttcttgcttttctttttgctctactgatgctctatttttttttgtatttatttatttatttatttatttatttatttatttatttatttgagacagagtcttgctctgtcacccaggctggagtgcaatggcacaatcttggttcactgcaacttctgcctcccaggttcaagcgattctcctgcctcagccttccaagtagctgagattacaggtgcccaccatcatgcccggctaatttttgtatttttgtagagatggggtttcaccatgttggccgggctggtctcaaactcctgacctcaggtgatccacctgcctcggcctcccacagtgctggaattacaggtatgagccaccgcaccgggcctactgatgttctattgatgaggttttttaattctgtttttccccttagggatttgggaggcatatagtacaaggatctttatggtgggatggaagtttttctcccggttggttaaatttggggactgtgaagttgttaattatttcccattgtatggaaagaaactaaggaccacaaagggggatggtcccagagctggggcagagtcaggcaccaggagcctggtccccatctccccagctgccctctgggcatgtcctcctcccagccagatgatgtccccagtggataacagctaaggggcagtctgtgggttctgcacctgttatggtccctgcgggggcaccacccagatcaaggcccccgactgagcgcgagtggctctagtcagctttctcgaggtgcacaccacttaaggtccccagctcatgctcctgaggcctggggatgtgtggcttgtttattggagaagtgcatttgtacagaatggagttgttggcggggagggggggtgtgctccagggattgggtgatgctctgggataaactcagcccagctgtgccaactccactgcgttcatgctcattctgagtagctctgctcatgttctgcagagggtgtggcctctgctgtgtgtttgtgcataagtgcgtgctgtgcacatctcctgtatatccttgtggtgtgccgcgtgtgttgatagagttggcaaacaagttttactgcttcgctcccgctgctgtaactgcagttgtctgtccctgtgctgggtgaccctgccaagggccgccttaatgggaggttgtggagaaaggcctggctctcactgcagggctaggcagggagggggccgctgccctctggcagctgtgtgcttgcctctgccctctcttgctggcatgctcaactccagcaatgggacatgtgttcccctgggcacaggccacttaccctctgtccccctgaaaggcaggtggagcctctttctccattctcgccatgctctctgccttcccacctggaagtgtctgtctcttccttactgccccactgggctggggaccttggtcaggccaaggtcaggagggctgggaggaaaccgactggttttgaggaacagaaaatggatattcagaacttgtgagttcctctcctgtctaatctgtggttggttctgtcttacttcctccaaagtacagaacatcagacatctttaaaaataaacctcaaagagatggcctctgggaagctgaccctccaggagagggggacctctacagatctggggacaggccagtacttctgggcatcccaaagccaggcagggcccaggctcaggccagctttgtttgggtcccagaaattctggtttctttgcaagtgtacgagcaggcttgaagtgagagagttaagctgcggaggcaggcttgaagtgagagagttaagctgcggaggcaggcttgcattcttcagccagcttttgctcagggccttggcagcacccgggcctgctccctgccccaccccacccaggcccagtcctcccggagacccttcggggcctctctccctaggcaagtgactcatcagcttccaacctaacactctacctgggtctcctcatcctttaactcttcctggacaacgctgtggattatcttcttctcgttctgagttaggaaaatagactctagtgcctgtcacatcgtatgaaactgcaatccagagcctccgccagctggcccaatgcatggcttcactgctgcacatcacactgcgacatttgaatccaagcagtgatgctctcccagaaacgctctgttctcaacgccgcgtctttgctcctgctgtccctccttcctgcggagcccagactgtctctcccgtccttggattgctacgggcatggctcaacccgtggcttgtttacatcttgcttcacatacttgaacagctaccttttagggtcaatccagagtctcacctcaggcacaacccccatggctccccctgaaatgcctcaccctgtctagatacagtggctcaagcctgtaatttcagcactttcagaggttgaggcaggaggatcatctgaagctaggtgttcatagaccaccctgcacaacatagcgagaccttatttctgcaaacggtttgttgttgttgttgttgttgttgtttgagatagagtctcgctgtgttgcccaggctggagtgcagtggcatgatcttggctcactacaagctccgcctcctggattcacgccattctcctgcctcaacctcccgagtagctggaactacaggcgcccaccaccacgcctggctaatttttttgtatttttagtagagatggggtttcaccatgttaaccaggatggtctcgatctcctgacctcgtgatccgcccgcctctgcctcccaaagtgctgggattacaggcgtgagccaccgcgcccggccaaaaggtttttttttaaaaatgagccaggtttggtgttaacaggacacggtggcacacgcctatggtcctagctactcgggaggatggcttgagcccagaagttcaaggctgcagtgtttgaggctcccagctgtgcaccgaagacggccaagcacagtggggaaggtcccttacacgccatcctcagtctgcaggaacagctcccaggccgaccatggccttctcaagtgctctctgcgcatcacgttttctgtcccttcttccctgtctttgccaggagtttttagtgacggaaacacaaacacaaatcctggaaagccctgggacagttcatcagacttagagggacccaagggctaaacagtgtcaaaaaacctcagtgtcacaccctcctcctccgggctctggcccttggcgccttcccaggcaggctctcccctcctccaggctcaacagccttccctcagcagccctaggcaagtgactcagcttctaacctaacactctacctgggtctcctcatcctttaactcttcctggacaagaaagagcttcggccctcgaatcgtaaccagaatggcgtctcattggcttggtttgggtcaggtgcccgtctctaagccagtcacattggcaagctagcatacagtgaatggccagcctgggatacacgttcacccctcgagtcagggctggagtcaccaccatggaacagtttggtctgagtgtaggggacaggaggctgggacactcttacaaaggaagggaaaggacaggatccctggacgtgtgcagcatccctgtggttcagtcacgggcagtggccttgtgctctggtgttggtgggaaggatgaggagggcagtcccaggctctggccagacgtgccaacaccgcggagacaattcagtaagtgaaaaagcgagacaagaaggggaagccatggggaaaccattgctctgtcaggtggttatgcaacgccctggctggtgtcagtgaccccctccactctacacgctcacacgcacactgacacatatgcactgatgtatacgtgtactggcgtgaactcttacacataggcaccgagaatcttgtccctctctgggtagcttgcagagctaggttttctggtccacatctccctggtgtcaaggtctctggtcccagctggagcagcaggaagaccccgccaatccctgcctgtcatctccctgacccccaccagcaggaagccagagaggaaggtggactgggtgggagccctccgccctccagcaaggatttgcctccagtgccttggctcctgccaccagccggcggatggaggaatggggagacgctctgagataacctccccacggcaggtctgcaggaatctggagctctcagccttccatctctttccctccccagccccatgcgccatggcctccacattccctccctgtcctcagtaccacgagcaggagccagggctgctcagggcccaggccccaggccccagctagagatagaacttaagagatccccgctgtgaagggtctcggatctctgaactcactctccaggaagccagaggtgcaggtgagagctcctgttctgagggcgtggagggtgtgggcacgtgctgggccccgagtcctctgcagcctggaaagagacacccacctctctacccagcagggcccaaaagcaaacttccattcaatggccattcactgcagcagagccggaagtcctgcctgtccagctgctgccagcctgtctcccattaaccctaaatgggcctcatccctgctccgtgtttagggaccgtgtttgggtcacccccaccccttgccctagcaggcactttgacagaattgggtgtcttgcctggcaggccccaccagtgacgtctgctctctggctaagacgtctgctctctggcctcttggccctgtgtcttctgggaccctaggttaggaagaggtcttaggtcacccgcctcatttcctagtggtcggttatatgtcttcatttcttcctcactagggcttatgaccggcgacctgtcctggtcagagtcacttcccaagtcagcttgcctttgggaacagagctttcgataccgccctctgcttccttctttagtgtctgccaaagccaaggctcagaggtgcaaccttggagcagaagctgcctggccaaggggaagaggttgtgcggtttgctcatggggcagggaagacatggcagcctcgtcctggtggccagtgccacactgctggggctcagaaggcacgtagctaggaaaatgcatcccctttcgcctggtgtcctgtggacacaccagtcacctaagctctgtctccctccccagactgaggctcttggcctggggcctgagtagccctacctcagattactcatgattcatcgctgttgtgcccaacctgtgtggatacctagaccgtgccccgggggcccagcctgcaaagggctttcctcctccaccctgggggagcagcctcagcctcgccctatccttccaataggaggcccgtggacccttgctgtttcccaagggggatgtccacagtgtgaatcctctttagagaccccaccaccatccacgcacacccggggagcttgtcctgctgaaggctgagagcccagacatctgctcttgggccagacctgcccttcctggacacagggtcgtgcacatcaggaaccctccccatgccgcagcttccatgtctgctgaaggcggggtcccaggccctctctgtgtgcgctactggatcaggatgccgtgaagtggtactatataggtttaaattgcacaaaaaagggaaaaaaaggattgtggcccagccccagcctcgggtctgaaagggcccagggtagaccagcacagcttcagcctttcccagactccgttagctctagagtcgatcttcagtccgtgtgcttacacctctgtcctgagaggactcgtgtgtggcaatgatgataccaaggcagaatgcttctcctgggctgggctggacctctaggctctcgagattgggctgagagcagcccagccaggctagggctgtgagcatggaaaggagaaagcaagaggaccccccctggctcctggtaccccaggccagaatcccagcaccagcagacatcagggccagcttcctgagtgagaggcagggacggctgggggtgagcccctgggcctcagcagcctggctgggagagccgtgccctttgggtccatcttcgtccttcccagcaggtgttcctgggtcagccttggttctccccccaacacacacacagtagctgccccagagcctagctggacctgctcccgcagggtcctcctgccagaaacaggtctgccttccccacccggtctggcagcctccaggagagagctggatttgggaagacttgcccggggttaagactggattcttggtcatgacctgatgggggagaaaggttatatgttctggccagagcgagtggcttcctgggagagcctctccgtcctcctttcctgccccccttcagcgtaaatagcccaggccacagcccgctcccttggcattggctagaggggaattttctaaaggatgaagttcctgggaaatgtccaccctttttccctttcgtctatgacaaaagcgctgctaatggctcctagttgacttgggagtcttggctgggggagcctggggtcagaactagctggaccagaacatggagatgctgacctcccttcctctggtgacagtcccagtctgctgtctgctgtcactcagccttgtcattccttccccagggggagggcacggcccccttgaaggctgtagagccaggagtgaggcattcctgcatggaacttctcagaagagccagcccaccagactctggggaaagacccagaaaacgggagctcggcccttgctggcagcggccgcagggatgggctgggcttttcttgtcagtattgggtccgggcatgccctcagactctgcctttccccatgatgttgactgaggtttccggggtcccatttcccattagggcttcccagcctgactaacgtgccatggggcaggagctgggtcccgtcttcagacaaggttctgaggcctggacaagtgtagccccccagcacccaaggagggctaaccctgaggccacaatgacatccccaccgcaccaagcagttctaagagacctggaagggcctccctctggcgtatagaagggccaccttgtgctcccaaagggagaggaagcaggtaaggcagggagtgcagcctgggctcagcctctctctcctgcctcgtggaagggaagatgaaccgtgcctctgtagtgccagccaggacaggagcaggcttgctaagttcaggaattggtcacactgcgaaggaagcaggaagcgcagctctcacacctggcccttcttgtcttgctgggaagggccccctcactcgcccacccctgcctgccctgcaccactcccgtgcctgcccctgccacgttggagggaagggagctcagggagccgccagcagtgcatcaccagcaagccagctgagctgggcgaatcgggtgtccacagccgctggcggtttagatggggagactcagggtctgcctgctcctggctacagagttcccagtttccactgaggttttgttcctctgaccttcacacagagagaggggtctggtgggagggtggggacaccttgcttgttgtctggacaggatcagactctctcttacctctttgcagctctgagaccaagagtcctggggaaatgcagggaggagatggaagtgtgggtgtttcctatgccaataatgaaggcttcttttcaaaatccctactgggaacccagcttcagccaagctcccagagatgtcccaagggagggcatctgcacagccaccaatctccttaaattgggtcaacgtcttccttataggaagcacctcaaatgcaaggaagacatgcacccagccacccagcctccaggcagtggcaggtttaggtttttccctttgggaaaaacaacttataaaatgtggttaacagggtttttctctaggactgccatttcctactcactatccacccaaacactcggaatagtttttctgggattcccctcccccctccctgccccctgcagattcaattatgggaattagcataagaaacaagttgtgaaaccagtaactctccactgcctggggtaagtccactgacagatttttcctccctgatgttcctccagggcattcctcagatctcagaccctccccacgactccttctaggaggggaagttctgcagccgggcctcctccagacaaagagactcccccgagagcccatgggtggagcaggccagtgagctgcgccatcagcagtggggagtgaaaggtctgagagggacaggccccctttcgcccctcccagtcccacacattctccctcgcagacagcccagggtgccttccccagctgtcctcagtgacggccctgataacccttggatgttttcttcggcatcccctgccacctctcatcattagattgccctctcaaagaggggcctcagcttcttcctttttttttttttttttttttgagaccagcttttgctctgttgcccacggctggagtgcagtggcacagttacagctcactacagcctcaacctcccaggctcaagtgatatgcctgcctcagcctcccaagtagctgggaatccaggtgaccatgctggataaccttttggttttgttttctgtggagtcggggtctcactatgttgcccaggctggtctcaaactacctgagccacagcctccccagaatgctgggattacaggcgtgaaccaccttgcccagcnnnnnnnnnnnnnnnnnnnnnnnnnnnnnnnnnnnnnnnnnnnnnnnnnnnnnnnnnnnnnnnnnnnnnnnnnnnnnnnnnnnnnnnnnnnnnnnnnnnnnnnnnnnnnnnnnnnnnnnnnnnnnnnnnnnnnnnnnnnnnnnnnnnnnnnnnnnnnnnnnnnnnnnnnnnnnnnnnnnnnnnnnnnnnnnnnnnnnnnnnnnnnnnnnnnnnnnnnnnnnnnnnnnnnnnnnnnnnnnnnnnnnnnnnnnnnnnnnnnnnnnnnnnnnnnnnnnnnnnnnnnnnnnnnnnnnnnnnnnnnnnnnnnnnnnnnnnnnnnnnnnnnnnnnnnnnnnnnnnnnnnnnnnnnnnnnnnnnnnnnnnnnnnnnnnnnnnnnnnnnnnnnnnnnnnnnnnnnnnnnnnnnnnnnnnnnnnnnnnnnnnnnnnnnnnnnnnnnnnnnnnnnnnnnnnnnnnnnnnnnnnnnnnnnnnnnnnnnnnnnnnnnnnnnnnnnnnnnnnnnnnnnnnnnnnnnnnnnnnnnnnnnnnnnnnnnnnnnnnnnnnnnnnnnnnnnnnnnnnnnnnnnnnnnnnnnnnnnnnnnnnnnnnnnnnnnnnnnnnnnnnnnnnnnnnnnnnnnnnnnnnnnnnnnnnnntgggtctcggctgcttttatggccaagtcccgctccctgcctcacacccaccccaaacccagttaggttcagccaattaccgttggcagtatcttgttaaaaaaaagttttagccgggcgcggtggctcacgcctgtaatcccagcactttgggaggccgaggcgggcggatcacaaggtcaggagatcgaggccatcctggctaacacggtgaaaccccgtctccactgaaaatacaaaaaattctccgggcacggtggcgggcgcctgtagtcccagctattccagaggctgaggcaggacaacggcgtgagcccgggaggcagagcttgcagtgagcggagattgcgccactgcactacagcctgggcaacagagcgagactccgtctcaaaaaaaaaaaatgttttaaaccaactctcattgtattctccttgtatgagtacacacattgtagagaaataatcttaaaaaaggaaaaaggaaaggtagggataccctgtaatcctttctcccagagagagctcattttcctgctacctagtacattccagcacaccagtgtggccacattctatcacctgcctcccccaggcacccccagcctgttcccacaactctgccccccaggttgtccccactcccttgcacctgtactggcctctgtttctggaaccgccctcagggtctgtggcttctgtttctggaaccgccctcagggtctgtcatcagccctcctctgcctgcacagggccatctttgcctcgaatcctactgttcctttgaggcccacttcagcttagtcaattcctgaagcctctaagttgtactcgccatcccccaaaaaaccctggaagggccctttctccttttggtctgtgcagaagcagaggtatgttatttcctgaccgaatggttgccctcctgaagtatctttctccctctcatgtctgagtttgtttcatgtcaccatgtctcagtcaaggtatagtgtccggcacgcaggcccagacttgctttatgacaagggggcagtgagctgttgcaagactgcaaaggctggacagagtcgcaaaggcaaggccaggttggagggaaggggagctcagggagccagcagtgcatcgccagcaggccagctgggccgggcaactcgggcgtccacaggccgctgcagggacccggcaggcagagggagctgggcttcagagaggttgggtcttccccaccccagggcagctctcctggaggcacgcctcggtttcccccactgtgtcttctctgcctgccgtgtgcaaggccacctggtcagcctgtggagtcagaccacccgtgggccttagccgttgtgtgggagaacaggctgcgtcccaggcagggtgggcgctgctggtgggagccccaggtggccttcgacctcaggattttgcactgcggtatttgggtttaagaagtcagttgatggtaccaaatctgatgtcctcagaagtggtctggcttctgtcctgaggagactcctgggcctgtgcaaagaagctgcagccattgctggggcactgcctggcgccctgggagggccgggtgatgagggcaggggaagctggggcacaggggccgtgggctggttctgagctccagcctattgtcacctgccggcatttctagagcccgcctctcccacccctactcgtcctcggggctggtcatctgccacctcctgatcctagacatgaagagagagccgagaggacaaggcagcagggccctctgagtggaggggcgcacctgcgggcagcagttgggaatccagggcaggctgcatcccttctggagcctcacgccctgggatgctccccatggctcggtttctctaaacagcaagcacgtatcccataagtgaatgggtaccaagagtccaggggtgcctcaagatcaaattgttctcgggccagatggagcaggcctgcgtcctgttttcactgctgagagtgtgcagttggcaggaatgaggatggaggcgagatgtgcagacgctcagccaaaaccttcggctcccatctctccatctgcctcctcgggtcagcaaggcgactgtccaggcaggctgcacccgttttggtgtcccagggaacagagactgcagagatcagagtggataggcccctctccccagaaggtgcgttctgctgccccagcacaaggctgggggacagtgtgtgtttctggatggctgactcctttttctagaggaagggaggttggcccttcatcagagggcaggctgggagtgcctgctagggagtcacagctccaagtgagtgccagcccagagcctggctcacccaggtccccttgaagatgcctccctggaaactgttgctgaaagcctaggggtgactgagcccctgcctggcctgccaagcctgagagtggggagtgtgcaggtggagggcacgccatgctgccctgggtggagttagagaagcagctctccctgtgctctccctccaggcctgctacctgtgccacagcttgctgatgctggccggggtagttgttagctgccaggacatcactccagaccagtgggtgagtctcccaaggggcagggctgtggtgggggtgcccagctgtgtcttctcccccaagcggcgggggttggctgggatggcgcccagcccactgttaggaactgcagagagtgggaggctgagagggaagccagcgtgggagagccagggcctcttcctccccacagtgtcccaccagctgagccattcccaagggacactgacccgagccccaacagttgtgctggccccatcctccttttcctcctcaacttctgaacagtcactcaaatgtgccccttcctttctctgaatttgttctcctcctgcccggctttggatgtgcctggcttgtgctacacccgcttcttggcctccctccgcctccacagggcgagctgcagctgctgtgcatgcagttggaccgccacatcagcacgcagatccgggagagcccccaggccatgcaccgcaccatgctcaaggacctggctacccagacctacatccgttggcaggagctgctgacccactgccagccccaggtggtgccccctctagcccccagacctgggaggggcgggaagtggtcaggcagggctggccagagccaccagcacatccacccccgctgcagctgctgagctcctggcagggatatgggtggagtgggcatgtgggggaagggtggggacgccttgaggggccttcatcattcttatcaagaatccagtgccaaaggctgggcgtggtagctcacgcctgtaatcccagcactttgggagactgaggcgggcggatcacaaggtcaggagaccagcctggccaacatggtgaaacccgtctctaccaaagattaaaaaaattagccgggcgcggtggtgtgcgcctgtaatcccagctactctggaggctgaggcaggagaatcccttgaacccaggaggcggaggttgcagtaagcccagatcgtgccattgcacgccagcctgggcgacagggcaagactccatctcaaaaaaaaaaaaaaaaaatccagtgcccagggtgggtgcggagggaaggggacacagagaagcgcagtcctcaggaaatgcaaagaaaagtcaccctggagagggaaaagtctggacccagagtgccagtctttcatgagcagtgccaggaaggggccccagctgttcacttgtgctgtgggcctgaagctggtctcctgctgtgttaggaggaaggctcccaggctgccctggtcctctccactacaccccctacccccgccgagttttctcagagcctgtaggtgtgatagtcacagctagtgtttcttgaatgaagatccgtttctcaagaacccacacaacccccatgaggcaggtgttgtcaggagcccattttacagatgagcagactaaccagaggccctgagaggctcggtggcttgccccccatcacgcaggcagcttgtgtgaatgtcagaatcagggcatgagccagcctgactcccaagcctctgacctaaccaacttcagcccctgtgctggtgccctcccttccggccccatctctccaacaaacagcaccctgctgggctggctcggggtctcctcccttcctgagcccccagtcctctatggaggggcacaggacctggtgaggaccaccccccaccccaccaccagtgcccctcctctcctagcctgcctcttcttgactcctcttttgtccttcccctataacctctgacttaggtctgacacactggccacaggctgtggtttgggtctcagatttcgccaagtctctgagaaggctggagaacaaacctcaccctcactccccaaggaactagatctcaccagcctctggtgggagcagtgtgcttgtcacgagaagaaggaaaagtgattcagggcctggtagaggggccctgggagaccacttatacggtcacgtagcctgatgaccgctgtgtcctcgccagtagtgtgaacccaggcatcctgctcactcggcccctggcatgagcctgcgatgggtgctgaatggacaccgccagcccggggagctgcagggcagtgggcagcacctgggcccaggccctcacagcctgcttttctcctcgccgcaggcccagtatttcagcccctggaaagacatctaaagggacagggtcagggcagcccagggctcctggcttcagcaggaagtgaacaggctcagggaactggaggaagcgaagcatcaaggccagaggaggccacatgctgaccagcctgatgaggcaagagcctgcccctgccaccgccccgacccctctcctctctgcaagagcctgcctctgccaccgccccgaccccctctcctctcagcaagggatgggcctctctgcctcgcccacccctcagccctcctcccagccatctcctcttccctaaggcctctgtctccatagctctggtttccctgggcctcagtcctccccaccctccttcctctgtctccctgtcactaatgtgaggtttctttgtgcacattaaagtcttctttcagc

SEQ ID NO: 100 - DNA, 654 bp, Homo Sapiens
gcctgctacctgtgccacagcttgctgatgctggccggggtagttgttagctgccaggacatcactccagaccagtggggcgagctgcagctgctgtgcatgcagttggaccgccacatcagcacgcagatccgggagagcccccaggccatgcaccgcaccatgctcaaggacctggctacccagacctacatccgttggcaggagctgctgacccactgccagccccaggcccagtatttcagcccctggaaagacatctaaagggacagggtcagggcagcccagggctcctggcttcagcaggaagtgaacaggctcagggaactggaggaagcgaagcatcaaggccagaggaggccacatgctgaccagcctgatgaggcaagagcctgcccctgccaccgccccgacccctctcctctctgcaagagcctgcctctgccaccgccccgaccccctctcctctcagcaagggatgggcctctctgcctcgcccacccctcagccctcctcccagccatctcctcttccctaaggcctctgtctccatagctctggtttccctgggcctcagtcctccccaccctccttcctctgtctccctgtcactaatgtgaggtttctttgtgcacattaaagtcttctttcagc

SEQ ID NO: 101 - protein, 106 aa, Homo Sapiens
LPGHHSRPVGRAAAAVHAVGPPHQHADPGEPPGHAPHHAQGPGYPDLHPLAGAADPLPAPGPVFQPLERHLKGQGQGSPGLLASAGSEQAQGTGGSEASRPEEATC

SEQ ID NO: 102 - DNA, 813 bp, Homo Sapiens
agctccccgccagcccaacagctctccttcctgcgcagtggcctcctgaacatcctctacctgcacatgcctgactgcccggtgtccctgctccagtggctgttccagcaccctgggctccttgctcaacctagaagacagccgtgctccctggcctcagatgaagacaagcacctgtggtgcccctcactgcaagaagtcagggaggcattccacagcctgggtgcccacagtcctgccctgtaccctctggggcccttttggcacggtggcagggtgcttccaggcgaggctggcctgaatgagaatgaggagcaggacgctccccaagagattgccttggacatcagcctgggccacatctacaagtttctggcgctgtgtgcccaggcccagccgggggcctacactgatgagaacctcatgggactgattgagctgctgtgccgcaccagcctggacgtggggctccgcctgctgcccaaagttgacctccagcagcttctcctcttgctcctggagaacatccgggagtggccagggaagctccaggaactgtgctgcaccctgagctgggtgtctgaccaccaccacaacctgctggccctcgtgcagttcttcccagacatgacctcccggagcagatggcaaagattcattgacaaggatgtttggcatagcaatgtcatgatagtgaagaactggaaattgcctcagtgccccaccatcgattcagttctgcccgtgctacggagtattatatggtacctaaaaatgatgtcacaggaaaatgggaaagttaatgaaatacgc

SEQ ID NO: 103 - protein, 249 aa, Homo Sapiens
MPDCPVSLLQWLFQHPGLLAQPRRQPCSLASDEDKHLWCPSLQEVREAFHSLGAHSPALYPLGPFWHGGRVLPGEAGLNENEEQDAPQEIALDISLGHIYKFLALCAQAQPGAYTDENLMGLIELLCRTSLDVGLRLLPKVDLQQLLLLLLENIREWPGKLQELCCTLSWVSDHHHNLLALVQFFPDMTSRSRWQRFIDKDVWHSNVMIVKNWKLPQCPTIDSVLPVLRSIIWYLKMMSQENGKVNEIR

SEQ ID NO: 104 - DNA, 864 bp, Homo Sapiens
aggaaaagagcgggaaggggagtggaaggcaggggctgaagacacaggccaggcggaatgaagatgatggtggtcttgctcatgctgtcctcgctcagccggctcctgggcctcatgaggccatcatctctcaggcaatacctggactctgtgcccttgccaccctgccaggagcaacagccaaaggctagtgccgagctagaccacaaggcctgctacctgtgccacagcttgctgatgctggccggggtagttgttagctgccaggacatcactccagaccagtggggcgagctgcagctgctgtgcatgcagttggaccgccacatcagcacgcagatccgggagagcccccaggccatgcaccgcaccatgctcaaggacctggctacccagacctacatccgttggcaggagctgctgacccactgccagccccaggcccagtatttcagcccctggaaagacatctaaagggacagggtcagggcagcccagggctcctggcttcagcaggaagtgaacaggctcagggaactggaggaagcgaagcatcaaggccagaggaggccacatgctgaccagcctgatgaggcaagagcctgcccctgccaccgccccgacccctctcctctctgcaagagcctgcctctgccaccgccccgaccccctctcctctcagcaagggatgggcctctctgcctcgcccacccctcagccctcctcccagccatctcctcttccctaaggcctctgtctccatagctctggtttccctgggcctcagtcctccccaccctccttcctctgtctccctgtcactaatgtgaggtttctttgtgcacattaaagtcttctttcagc

SEQ ID NO: 105 - protein, 138 aa, Homo Sapiens
MKMMVVLLMLSSLSRLLGLMRPSSLRQYLDSVPLPPCQEQQPKASAELDHKACYLCHSLLMLAGVVVSCQDITPDQWGELQLLCMQLDRHISTQIRESPQAMHRTMLKDLATQTYIRWQELLTHCQPQAQYFSPWKDI

SEQ ID NO: 106 - DNA, 662 bp, Homo Sapiens
ctccccagctggcggcggcggcggctgtgagctggccgcttggtttggagtcggaactcaatccccagaactggatctttaggttccacgttggcggccctggatctagggacgcaactcttggggtcctcccactgcgccgcctggggagcctgctcctgcttcctttcccggctagctggccccgtcctctgaggccgtgcgaattcccgccaccctccctcaccccggagccctgcccttcccgccctatgtggccaaggcttccaggtgcgggcctcgctccacaactcaggaggcaggatcagcggctccattttacaggacagatgtcccacggcttgcagatggctgggccccaggagacggtgctagcccttcctctgagagaaggggtgcaggctgccgccaccgcgcccatcctcctgtacaacctggaggatggcttgtcagaccatcccctggaccaggggccccgctgccctgcccggcggccctgcagccctgcctcggctccagctcccacatcgccaaagaagcccaagatgcaggcacctggggaaacgtttcccactgactggagccccccgcccgtggaattcctcaacccgagggtgctgcaggccagtcgggaggccccggcccagaggtgggtgggtgtg

SEQ ID NO: 107 - protein, 137 aa, Homo Sapiens
MWPRLPGAGLAPQLRRQDQRLHFTGQMSHGLQMAGPQETVLALPLREGVQAAATAPILLYNLEDGLSDHPLDQGPRCPARRPCSPASAPAPTSPKKPKMQAPGETFPTDWSPPPVEFLNPRVLQASREAPAQRWVGV

SEQ ID NO: 108 - DNA, 2736 bp, Homo Sapiens
ctccccagctggcggcggcggcggctgtgagctggccgcttggtttggagtcggaactcaatccccagaactggatctttaggttccacgttggcggccctggatctagggacgcaactcttggggtcctcccactgcgccgcctggggagcctgctcctgcttcctttcccggctagctggccccgtcctctgaggccgtgcgaattcccgccaccctccctcaccccggagccctgcccttcccgccctatgtggccaaggcttccaggtgcgggcctcgctccacaactcaggaggcaggatcagcggctccattttacaggacagatgtcccacggcttgcagatggctgggccccaggagacggtgctagcccttcctctgagagaaggggtgcaggctgccgccaccgcgcccatcctcctgtacaacctggaggatggcttgtcagaccatcccctggaccaggggccccgctgccctgcccggcggccctgcagccctgcctcggctccagctcccacatcgccaaagaagcccaagatgcaggcacctggggaaacgtttcccactgactggagccccccgcccgtggaattcctcaacccgagggtgctgcaggccagtcgggaggccccggcccagaggtgggtgggtgtggtgggcccccagggcctgaggagactggctggtgagctgcccgaggagttggagcaggaacacctggacttggacccgaagaggggcctggccttgccagagaagctgttctggaacacgtcaggcctgagccagcaggctgcggccccagagttttcctgggggggctcaggaagctacttcaacaacctggactacttactgcaggagaagagggaacaggccctggagcaggagcgagagaggctgcttctgcaggagtgtctcaatctcaactccttggatcttgatgaagaggaagtgccactcacacccgagcacaggatgctggtggaaaagtactcagtgtccctgcagaccatcccgccggtccatccaggtgagactgtgtttctgcccaggtgtcaccccctgccatgcatcctggactcctcactcctgaagccacgcagccacctggaagggctgttcctcagatatgcttcccaacagccagtgaagctgggtagtgacagcctcccgcggtgtcaccgagacaagtgtgctggcacagaggcctcccctaacctcagccctctgccccccagctccccgccagcccaacagctctccttcctgcgcagtggcctcctgaacatcctctacctgcacatgcctgactgcccggtgtccctgctccagtggctgttccaggtgaggaccgcaggcctgccactaggtggcgggagcgctgcactgctgacatggcctccagaaacgtctttgggagcctttggtcttctgtgggatctcattgtggatggaatcttccttcagcctgatgaagacaagcacctgtggtgcccctcactgcaagaagtcagggaggcattccacagcctgggtgcccacagtcctgccctgtaccctctggggcccttttggcacggtggcagggtgcttccaggcgaggctggcctgaatgagaatgaggagcaggacgctccccaagagattgccttggacatcagcctgggccacatctacaagtttctggcgctgtgtgcccaggcccagccgggggcctacactgatgagaacctcatgggactgattgagctgctgtgccgcaccagcctggacgtggggctccgcctgctgcccaaagttgacctccagcagcttctcctcttgctcctggagaacatccgggagtggccagggaaggcggcttcgaagccagctcagccttgtggtcattgctcgaatgctgggccagcaggagatgctccctctctggcaagagaagacccagctgtcctcgctcagccggctcctgggcctcatgaggccatcatctctcaggcaatacctggactctgtgcccttgccaccctgccaggagcaacagccaaaggctagtgccgagctagaccacaaggcctgctacctgtgccacagcttgctgatgctggccggggtagttgttagctgccaggacatcactccagaccagtggggcgagctgcagctgctgtgcatgcagttggaccgccacatcagcacgcagatccgggagagcccccaggccatgcaccgcaccatgctcaaggacctggctacccagacctacatccgttggcaggagctgctgacccactgccagccccaggcccagtatttcagcccctggaaagacatctaaagggacagggtcagggcagcccagggctcctggcttcagcaggaagtgaacaggctcagggaactggaggaagcgaagcatcaaggccagaggaggccacatgctgaccagcctgatgaggcaagagcctgcccctgccaccgccccgacccctctcctctctgcaagagcctgcctctgccaccgccccgaccccctctcctctcagcaagggatgggcctctctgcctcgcccacccctcagccctcctcccagccatctcctcttccctaaggcctctgtctccatagctctggtttccctgggcctcagtcctccccaccctccttcctctgtctccctgtcactaatgtgaggtttctttgtgcacattaaagtcttctttcagc

SEQ ID NO: 109 - protein, 603 aa, Homo Sapiens
MWPRLPGAGLAPQLRRQDQRLHFTGQMSHGLQMAGPQETVLALPLREGVQAAATAPILLYNLEDGLSDHPLDQGPRCPARRPCSPASAPAPTSPKKPKMQAPGETFPTDWSPPPVEFLNPRVLQASREAPAQRWVGVVGPQGLRRLAGELPEELEQEHLDLDPKRGLALPEKLFWNTSGLSQQAAAPEFSWGGSGSYFNNLDYLLQEKREQALEQERERLLLQECLNLNSLDLDEEEVPLTPEHRMLVEKYSVSLQTIPPVHPGETVFLPRCHPLPCILDSSLLKPRSHLEGLFLRYASQQPVKLGSDSLPRCHRDKCAGTEASPNLSPLPPSSPPAQQLSFLRSGLLNILYLHMPDCPVSLLQWLFQVRTAGLPLGGGSAALLTWPPETSLGAFGLLWDLIVDGIFLQPDEDKHLWCPSLQEVREAFHSLGAHSPALYPLGPFWHGGRVLPGEAGLNENEEQDAPQEIALDISLGHIYKFLALCAQAQPGAYTDENLMGLIELLCRTSLDVGLRLLPKVDLQQLLLLLLENIREWPGKAASKPAQPCGHCSNAGPAGDAPSLAREDPAVLAQPAPGPHEAIISQAIPGLCALATLPGATAKG

SEQ ID NO: 110 - DNA, 265703 bp, Mus Musculus
  misc_feature (1)...(265703): n = A,T,C or G
tcacagaggtattactactacattcgccaaggacttgatactgatcacgttgccccaatggaagactcttggctggagcacgtattacaattggttccagagcatctgaaagtcctgactaatagcatcaaggtcttgtcagatgagataagagaagattatcttcttagtgtaaagaaatccataggtaagttgctgtgttttctacattgagtatgtgttgccttaaaggcaagttttgagttgaaagttaacacctaattttgacacattcccttggctgattttgctctttcccacctcattgctgcattaagacctcaccaactttctttaatttacttaagaccttagccaactttctttaattaggtataaattatattttacatcaactttgctgtttttaaagatattgtccctcactaaaggataacaccaaggaaagtaataacacattatctttagctccttgaaacttctattgtgttttagtcaagagaaagcattaggcacttaggaagtcatctcttcctgcaagattgtcctttatttaaaacttccttggtataggtgagagagacaagacgagcccatgtgtgtgtgtttttatctgtgtgcttgtgcattgtatatgtgtatggtgcatgcatgtgtgtgagcatgtgcacactgtgtgtgtgtgtaggtgaataattaccaaacattttaaccattaccaactatcattaacattactcatatgaaattcaaatatagttgatgacatttttgctacagaccaaaacgtggccacctatggctcagaagccattcctgaccactacctattttatagttgagatttcaatagcacacagacaatctaatatttttttaacacattgtgtatggctgcttttgaattataacatcagagctgagcagctgaacagagatcttgtggctcccaaagcagaattattaaccatatggccttttgtgtaagagatttgttgaaccatggtgttgacttaacaggttgatttctaagtacgagtaggtaataagaatatttatttatttatttacatcccaaacactgctctcccccacctgttccttccttctcagatccccccttccatcctctcttctcctctgagagggtgcccccctgtccccccctgtactccctccaccctggcacatctctgtctctgccagattaggcacattctcttccactgagaccatacaaggcagctgtggagactgagcctgagctgcatgtctgctacatatgtgctgggggcctcattccaagcctgtgtgtgatctttggtggctggctcagtctctgagagctcctagaggtgcaggttagttgactctgttggtcttcctgttgggctccctccccctttagggtctccactccttccccaactcttccacaagtgtccctgacttctgttcagtgtttcactgtgagtatctgcatgtgtttcagtcttcttctgttgggtcctctcagaggacagttatgctaagttcctgtctgcaagcataacagagtatcatcaatatcagggattagtgcttgcctatgggataagttttgatctgggctggtttttggttggcttttccttcagtctctgctccatccctgcattgtttttagacaggaagaatttttgggttggaagttttgtaggtgggttagtgtccttatccctccagtggggtcctcccaagctacaagaggtggcctcttcaggttgcatgtctaccactgctaggcatcttggctaaggtcacctgcattgactcctgggagtctaccctatcctaggtctctgggacttccttcagattcttgacccctccagccagctgcagatttccattcattatcctggcactctgggactctttcttatccctccccacaccttattctgcctccccatttccctccccacccctgatctgttccctcctcccctctgcctatgacgattttatttccccttctaagtgcgattcaagcatcctcacttgtgcattcctccttgtttaacttttttggatctatgggttgtatcatgggtatttgtactttatgactaatttccacttatcaggacacacaatggatgtccttttaggtctgtgttgccttactcagaatgatattttctaggtccatccatttgcctgcaaaattcatgatatccttgcttttaatagctgaatagtattccattgagtaaatgagccacattttctgtattcattcttcaggtgaaggatatgtgggttgttttcagttactggctattatgaataaagctgctatgaacatagtggagcacatgtccttggggcatggtgtggcatctttcagatttatgtccaggagtgataaatttgtgtcttcaggtagaactatttccaattttctgagaaaccaccagattgatttccagagtggctgtacaagtttgaaatcccaccaacaatggagtagtgttcctccttctccacagcatgggctgtcccttgagttttttatcttagccattttgattggtgtaaggtggaatctcagggttgttttgattttccatttccctgatgactatggatgtttagcatttctttgagtgcttcttgggcatttgagattcctctgctgagaagtctttgtttagctctgtacctcattttttaattgggttatttgttttgctggagtttaacttcttgagttctttatacatttggttattacccctcaatcagatttagggatagtgaagatcttttccctatctgtaggttgctgttttgttctattaatagtgtcctttgccttaaaggagcttttcagtttcatgaggtcccatttatcaattattgatcttagagcctgagccattattgttttgttcaggaaactgtctcctgtagcaaagtgttcaagacaatttcccactttttcttctattagattcagtctatcctgttttatgttgatgtccttgatccgcttggactagagttttgtgcagtgtgataaatatggatatatttgcattcttctacatgcagacatctaggtctttgattctattctatttttttttattacgtattttcttcaattacatttccaatgctatcccaaaagtccccccccccactcccctacccacccattcccattttttggccctggcattcccctgtactggggcatataacatttgcctcaccaatgggcctctctttccagtgatggccgactaggtcatcttttgatacatatgcagctagagtcaagagctcttgggtactggttagttcataatgttgttcctctgatagggttgcagaactctttagctccttggatactttctctagctcctccattgggggccctgtgatccatccaatagctgactgtgagcatccacttctgtgtttgctaggccccggcctagtctcacaagggacagttatatcaccgtccttgcaacaaaggcttgttagtgtatgcaatggtgtcatcgcttggaggctaattatgggatggatccctggatatggcagtctctagatggtccatctttttgtctcagctccaaactttgtctctgtaactccttccatgggtgattgtttcaaattctaagaatgagcaaagtgtccacactttggtcttcgttcttcttcagtttcatgtgttttgcaaattgtatcttatatctcactatactaagtttctgggttaatattcacttatcagtgagtacatatcatttgagttcttttgtaattgcgttacctcactcaggataatgccctccaggtccatccatttcctaggaatttggtgaattcattctttttaatagctgagtagtactccattgtgtaaatgtaccacattttttgtatccattcctgttgagggacatctgggttctttccagctcctggctattataaataagactgctatgaacatagtggagcatgtgtctttcttaccggttgggacatcttctggatatatgtccaggagaggtatggcgggatcctctggtagtactatgtccaattttctgaggaaccgccagactgatttccagagtggttgtacaagcttgcaatcccaccaacaatggaggagtgttcctctttctccacatcctcgccagcatctgctgtcacctgaatttttgatcttagccattctgactggtgtgagatggaatctcagggttgttttgatttgcatttctctgatgattaaggatgctgagcattttttcaggtgtttatcagccatttggtattcctcaggtgagaattctttgtttagctctaagccccattttttaatggggttatttgattttcaggagtccaccttcttttacctgtgatgagtatgaagtgtccctccttgtcttttttgataactttgggttggaagttgattttattcgatattagaatggctactccagcttgttccttcagaccattttcttggaaaattgtttcccagccttttactctgaggtagtgtctgtctttttccctgagatgggtttcctgaaagcagcagaatgttgggtcctgtttatgtagccagtctgttagtctgtgtctttttattggggaattgagtccattgatattaagagatattaaggaaaagtaattgttgcttccttttatttttgttgttagagttggcattctgttcttgtgactgtcttctttttggtttgttgagggatcactttcttgctttttctagggcatgatttctgtcattgaattggtttttttctgttattatcctttgaagggctggatttgtggacagataatgtgtgaatttggttttgtcctagaatactttggtttctccatctatggtaattagagtttgcctgggtattgtagcctgggctggcatttgtgttctcttagtgtctgtataacatctgtccaggctcttctggctttcatagtctctggtgaaaaatctggtgtaattctgataggcctgcctttatatgttacttgacctttctcccttactgcttttaatattctctctttatttagtgcatttgtttttctgattattaagtgtcgggaggaatttcttttctggtccagtctatttggagttctgtaggcttcttgtatgatcatggccatgtctttctttaggtttgggaagttttcttctattattttgttgaatatatttgctggccctttaagttgaaaatcttcattctcatcaactcctattatccgtaggtttggtcttctcattgtgtcctggatttcctggatgttttgagttaggatctttttgcgttttgtattatctttgattgttgtgctgatgttctctatggaatcttctgcacctgagattctctcttccatctcttgtattctgttgctgatgctcgcgtctgtggttccagatttctttcctagggtttctatctccagcgttgcctcactttgggttttctttattgtgtctacttccctttttaggtctagtatggttttgttcatttccatcacctgtttgtttgtgttttcttgtttttctataaggacttctacctgtttggttgtgttttcctgcttttctttaaggacttgtaactctttagcagtgttctcctgtgtttctttaagtgagttattaaagttcttcttgatgtcctctaccatcatcatgagatatgcttttaaatccgggtctagcttttcggttgtgttggggtgcccaggactaggtggggtgggagtgctgtgttctgatgatggtgagtggtcttgatttctgttagtaggattctttcatttgcctttcgccatctggtattctctggagctagttgttatagttgtctttggttagggcttattcctcaggtgattatattagcctctatcagcagacctgggagactagctctatccttagtttcagtggtcagagtactctctgcaggcaaactctcctctttcagggtaggtgcccagatatctggtgttcgaacctgcctcctgtcagaagttgtgtttcgctcaccagaggtcttaagttcccgtggagggtcttgtgaggatcttgggggtgtccagaaactctgtgcacaagaaagtccactgctggagtgagctggaagggacttgtacccctgatcaggccaggttatctgcttccttagttaatgcagtctcaggtcccacgcgattggattggagcagatgctgtgttccactcaccagaggtcttaggattccgtggggaatcctgtgtggttccttgcgggtgtctggagactccgcgggcaaggcaccctggtgctggagtgggccagaagcgacttgtctccaatttctttctctgcccatttatcatttgtataaagaagggcaccttgctcaagttgtttttcagctgtaggagttctcaggtagaattttggagattgcttttatatacatactaccatgtaatccaagaattgtgataccttcccttcttccttttcagtttgtatcctcttgatctccttttgttgtcttattgctttagttagaacttcaagtgtatattaaatagatagggagagaagcggcagccttgtcttttttttttttcaaaaacaattttttattagatattttcttcatttacatttcaaatactatcccaaaagtcccaacccacccattcccgcttcctggacctggcattccactgtactggggcatataatctttgaaagaccaagggcctctcctcccattgatggcctactaggccatcctctgtaacatagggcagcattgtctttgttttttatacatttttattaggtattttcctcatttacatttccaatgctatcccaaaaagtcccccataccctcccccaacccccacactaccctacacatctactcctactttttagccctggcattcccctgtactggggcatataaagtttgcatgtacaatgggcctctctttccagtgatggccgactaggccatcttttgatacatatgcagctagagtcaagagctccggggtactggttagttcataatgttgttccatctatagggttgcagaagcctttagctccttgggtactttcactagcttctccattgggggccctgtgatccatccaatagctgactgtgagcatccacttatgtttttgctaggccccgacatagtctcacaagagacagctatatctgggtcctttcagcaaaatcttgctagtgtatgcaatggtgtcagcatttggaggctgattatgggatggatccctggatatggcagtctctagatggtccatccttttgtctcagctccaaactttgtctctgtaactccttccatgggtgttatgttcccatttctaagaaggggcaaaatgtccacactttgatctttgctcttcttgagttggatgtgttttgcaaattgtaacttatatcttgagtattctaagtttctgggctaatatgcacttatcagtgagtacatatcatttgagttcttttgtgattgtgttacctcactcaggataatgccctccaggtccatccatttgcctaggaatttcataaattcattctttttaatagctgagtagtactccattgtgtaaatataccacattttttttatatccatccttaactttgaggattttaactttgatgagtatgaagtgtccctccttgtctttttttgataactttgggttggaagtcaattttattcgatattagaacggctactccagcttgtttcttcagaccatttgcttggaaaattgttttccagtcttttactctgaggtagtgtctgtctttttccatgagatgggtttcctgaaagcagcagaatgttgggtcctgtttgtgtagccagtctgatagtctatgtctttttattggggaattgagtccattgatattaagagatattaaggaaaagtaattgttgcttccttttatttttgttgtgagagttggcattctgttcttgtggctatcttcttttaggtttgttgaaggattactttcttgctttttctagggcgtggtttccatccttgtaatgttttttttttctgttattatcctttgaagggctgggttcgtggaaagataatgtgtgaatttggttttgtcctggaatactttggtttcttcatctgtattagtcagggttctctagagtcacagaacttatggatagtctctagatagtaaaggaatttattgatgacttatagtaggcagcccaattcccaacaatggttcagttgtggctgtgaatggaagtccaagaatctagagttactcagtctcacacagcaagcaggcaaaggagcaagaagtagactcctttcttccaatgtccttatattgtctccagcagaaggggtagcccagattaaaggtgtgttccaccacacctttaatcccagatgaaaggtgtagcctagattaaaggtgtgttccttaaactgggagatttaatcttctggaatccatagccactatggctcaagatctccctaccaagatccagataaggatctccaagcctccagataagggtcactggtgagccttccaattctgtattgtagttcattccaaatatagtcaagttgacaaccaggaatagccactacaccatctaaggtaattgagagtttggctgggtatagtagcctgggctggaatttgtgttctcttattgtctttataacatctgtccaggatcttttggctttcatagtctctggtgaaaagtctggtataattctgataggcctgcctttatatgttacttgacctttttcccttagtgcttttaatattctatctttatttagtgcatttgttgttctgattattatgtgtcgggaggaatttcttttctggtccagtctatttggagttctgtaggttttttgtatattcatgggcatctctttctttatgtttgggaagttttcttctataattttgttgaagatatttgctggccctttaagttgaaaatcttcattctcatctactcctattatctgtaggtttggtcttctcattgtgtcctggatttcctggatgttttgagttaggatctttttgcattttgtattttctttgattgttgtgctgatgttctccagggaatcttctgctcctgagagtctctcttccatctcttttattctgtagctgatcctctcatcaatggtttcagatttctttcctaggtttctatctccagagttgcctcactttggattttctttattgtgtctacttccctttttaggtattggatggttttattcaatttcatcacctgtttggtcgtgttttcctgcaattctttaagggatttttgtgcttcctctttaaggtcttctacgtatttagcagtgttctcctgtatttctttaagtgagttgtcgaagtccttcacgatatcctctaccatcatcatgagatatgcttttaaatcagggtctatcttttcgggtgtgttggggtgtcctggactgggtgttgtgggagtgctttgttctgatgatggtgagtggtcttggtttctttagtaagattctttcgtttgcctttgccatctggtaatctctggagttagttgttgtagttgtctctggttagagcttgttcctccggtgattatgttagcctttataagcagacctgggagactagttctctcctgattttcagtgttcagagtactctctgcaggcaagctctcctcttgcagggaaggtgcccagatatctggtgttagaaccagcctcctggcagaagttgtgatccactcaccagaagtcttgagatcccgtggagggttcctgtgggtaccttgtgggtgtcctcagactccgggcccaaggtaccttggtgctggcgtggatcggaaggaacttgtgcccctgatcaggctgggttttctgcttccctaattaatgcagtctcaggtcctgtgagattggattggagcagaagctgtgctccactcaccagaggtcttaagatcccgtggagtgtcctgggggtaccttgtgggtgtccacagactccgcgcccaaggttttccagtgctggcgtggaccggaagggaccagccttgtcttgttcctggttttagtgggattgcttcaagtttctcaccatttaatttaacgttgactattggcttgctatatatatttaggtatgtaccttgaattcctgatctctccaagacttttaacataaagagatgttaaattttgtcaaaaactgtttcaatatctaagaaaatgttcatgtgatctttcttctttcagtttgtttatgtagtagattacattgatgaattttcatatattgaaccatcccttcatccctgaagtaaagtctacttgattgtagtgaaaatttttttcaatgtttttgtgagagttttattgagtattgagtagttttgcatcaatgttcatagatgaaattggtttaaagttctctttctttgttgagtctttgtgtgctttaggtatcaggataattttggcttcatagaatgaattaggtagttttccttctgtttcctttttgtggaatagtttgaggagcattgttggtattagctcttctttgaaagcctggtagaattctgtactaaaaccatctgacttggggatctttgtttgaaagttcttaatgattgcttccatttccttaggagttatgggactgtttaaatggtttacctgatcttgatttaactttggtatgtgttatctgtctagaaaaccattcatttctttaagattttccatttttgttttgtataggtttgtgaagtaagatctaatgattttgtgaatttcctcaatttctgttgttatctatcttttctgattttgttaatttggatactgtctctgtgccttttagttagtttagctaagggtttgtctatcctgttgattttctcaaagaaccagctcttagttttgttgattctttgtattgttctctttgcttctaattggattgatttcagccctgagtttgactatttccttccctctactcttgagttcctttgcttctttttgtcctagagctttctggtgtgatgttaagttgctagtatgagatctctccaattttctaatgaagtcacttagtgatatgacttttcctctcagtactactttcatcgtttccttgaagtctgggtatgttgtgccttcattttcattgaattatagaaagactttaattttcttctttatttcttccctgtccaggtgatcattgagtaaagaattgttcagttttcctgagtatttggggtttctgtggtttctgttgtttaagttcatcattaatctgtgattgtctgatagaatacagtgggttatttcaatcatcttgtaccttttgaggcttgctttgtgcctgattatgtggtcagttttggataaggttctgtgaggtgctgagaaggtatactattttgtttagtgtgtgaaaggttctgtatataatctattaaattcatttggtttacaacatgttagtttcatgttctattgttcaatttctgttttaatggcctgtccattagtcaaagtagggagttgaagtctctcaccattattgtatgaggttcaatgtgtaatttgcactttaataatgtttcttttacaaatatgggtgcctttgtatttggggcataggttttcataatggagttgtcatcttggtggatttttttcctttgatgagtttgaaatgaccttccccttctcttgtgataacttttggttgaaagtctatttcattaggtattagaatggctactctaacttgtttgcttggaaaatattttccagccctttactctgaggtagtggctatctttgttgctggagtgtgttttttgtatgcaacaaaatgatggatcctgcttatgtatccagtctgttagcctgtgtcatttttggcaaattgagtccattgctactgagagatattaatgaccaatgattgttagtttcttttattttgttgttagaggtattactgtatctgtggttctcttcttttggttttgcctgagatgattcatttcttgtgttttcttgggtgtacttcttgccttgttttagagtgtttcttctagtattctctgtagtgctgaattagtagaaaggtattgcttaaatatggttttgtcatggaatattttagtttctccatttatggtaatcaagagatttgctaattagagtaatctaggttgacatctgtggtctcttggggtatgtaagacatccgtccaggatcttctggcttttagagtctctgttgagaagtcaggtgtaattctgataggtctgcctttacatgttacgtggctttttcccttgtagcttttaatattctttctttgttctgtgcacttagtactttgagcattgtatggtggtaagattttcctttttagtccaatctatatggtgttctgtaagtttcttgtatgtttatagctatctttctttaggtttgggaagttttagtctatgatttttgttgaggatgttctctagccctttgaactgggaatcttcacccttttctattccttttattcttaggtttggtattttcatagtgacccaaatatcgtggatgtttttgagttaggcactttttacatttggcattttctttgattgatgtgtgcattccttctatggtatcttctacacctggaattttctcttctatctctctgtactctgttagtgatgtttgtatgtctatagttctctatagttctttcctaggttttccatctccaggtttgcctccatttgtgttttctttattgcttctatttcaatttttagttcttggaccactttattcatttcctgttcgtttgattgtttcccccccataccccctgtatttctttaagggacttatttgttcactctttaaggacttctacctgtttgattgtgttttgctgtattaccttaagggaattatctatattcttcttaaaggcctctgacatcttcatgagatgggatttaaggtcacagccctgctcttcaggtgtgctaagatatccagggcttgctgtagtagaagagctgggatttctgatggtgccatgatgtattggcttctgttgattatatttttgtgttttccttcaccatctggttgtctctggtgttggctggcctgggtgtgccaggttaaagcagatatcctaggaggttggcagagctgtgggttgaggcaaggtgtgctgattcacaactgttgtcagtgtatgtgcagaccagaagcaagaataatttttataacagccatttttggcccaatctagactaaagtccctgaagccagaaccttagaatatgtactacttcttcttctttttcttttcttttcttttttcttttttttccagttagggtttctctgtatagctctggctgtcctagaactcactctgtagacaaggctggcctcgaactcagaaatctgcctgcctctgtctcccagatgctgggattaaaggcatgtgccaccactgcctggcttagaatatgtacttctaagaaagggtttccagttgtttatgatagttgtgatagagcattcatgatgagtgccccactaaagtctggtgaaatcagaatgcattgagtgatttagccttccagagaataggcagttaaagtatgaaagagaacaccaaatgcagtgaggaggagaccaaaggaagagaaggtcatcttgacttagggtacactctagaatcttcttaactaactctgctgttgtagcatgggagttgggggtgaaacagggtctccccaagtagccaagactgaccttaacttgctatctagcttagggtggtttgaacttgtgatcttctggcctctgtctacctagtccttgggatccaagtgtatagcattcctagctcctgaatggagtcttgaaacttgagaaatgtctgctagctaatatgtttagtccaggcaatgacacaagcaacggcagacaaaggctgttctagacttgtgagccactatgatggccaaagcctaaggtgcatttggggaaaagggaaagtatctgaaaagggcttgagtgcctctttttaaagcatttgaatgtaacaggacagtctgaagaattttaagcagggggcagctgcacattgttgcattgcagaaagcgcatcttgaaagacaggcaggaaaatgaactgcttgtgattgaaggcacagcagacaggagcagagggagcttgctgtgctgattttataatgcctgtgtgacactcttatgtagtttcaaatgcaaaaaggcaatgtgtgtttttccaagggatgaaattcctctctttttgctgacctacaattcaacaagagtgcttttgatggaataactataaaggaaaatataaaattaaagtcaattatcacttccaaatgaagcaataggaacacattgttaagaaaaagaacacagacacagacttttttcctcacaaaattgtctcataaatgtacaaatttctctttattacagaactaacaggtttttaaaaatatttttttattatgtattttcctcaattacatttccaatgctatcccaaaagtcccccataccctcccccccttccattcccattttttttttttttggccctggcgtttccctgtactggggcatataaaatttgcgtgtccaatggtcctctctttccagtgatggctgactaggccatcttttgatacatatgcagctagagtccagagctccggggtactggctagttcataatgttgttccacctatagggttgcagatccctttagctccttgggtactttctctagctcctccattgggagccctgtgaactaacagtttaagtgatcaattttaatagaattatttttctcagaaatatgctgtaattaatctaaggttattcatcccaacttttcaatttttttcttagttgactttgttttaaaagatcccagagaaaaagatgatgatggcaagataactgaactcccacctcaccgtgctgagtaagtgagcatgtgtcctaatggcattaactctgtatgacaaacgatatataactactgccagatttaaaaaagatattctcatgtttgtatttcctcatatatgcatacatttctcatatatgtgctttatatatttttatattacatatttataaatatattatctatatttttatttattttatttaaatatatattttcttcagggactttgctaaggtgaaactatgggaaggaaaatatactatctcattatgttagggttgccattgctgtgaagagacatcatgaccaaggcatatcttataaagccaacatttaattggggctggcttatgggttcagaggttcagagtccattatcatcatggtaggaagcatggcagtgcccagacaggcatggtgatggacaacctgagagttctacatattcatccaaagaaaactaggagcagactgttttctaggcagctaggaaaaaggtctcaacgtccgtgtccacaatgacacacttactccaaaagggctacacttagtccaacaaggccatacttcctaatagtgccactccctgggccaagcattttcaaaccaccatacacatcaaagggnnnnnnnnnnnnnnnnnnnnnnnnnnnnnnnnnnnnnnnnnnnnnnnnnnnnnnnnnnnnnnnnnnnnnnnnnnnnnnnnnnnnnnnnnnnnnnnnnnnnnnnntacgttttaaggtgagcctgccttcctagagggaaattccactctcttgtggagtagctctttggtggagtgatcgactgttcaaacaacttggctcagtctgagcaccttggtaaaatcaatcacccatagtatgttgatgtcagattaaggaaataaacaaacacatttctccttagtctcatttaatcaagaggaagcccagatttgtattctctaccctactctttctttgtattttttttctgttgttgttctgtctttctgctataggagtgtgaacctgtgcctgtctgaatattgtctcatgattctgagtgtccctgtctctttgtctctgtgtgtatccctgtgagcttgtccctaataaagggcttcctgaatgttgtcttgcgactccccccccccacctcattgctgtgtgtgtcccaaataaagggctttaccccttctcttttattaaacaatacagaagccatctcatgggggaatcaatgagagatatttacaggaatctttgtaatgctactttttcctcctatttttattaaattattatcccagtaagtgtatgtaatttaaggttacagttatgtattaatttagattgtaaaagttaattacataagaaatctaaggtttgtttttacattgttcacttaaaagcagattaaacaaatagattgagcacacagtaggatagcagtcttaaatttaagtgaccttaaggtgcattattatttctgactgtgaggtccagcaaacaattcccttttctttgaatgtaagagtttttgttttgttttgttttgttgttgtttcttaatcaaaatgtgttgtcatacaactgaattaacccatttatgcttttgtagcttgggttgtcagcttggcatactcaaccagagaagtgatctcacctaacagctactagagagccctgtcaaggccactatagtattctcccatttgactaggtggtcataaactcattgaggaaccagatgaaagatcacacactgcctcatgtttctagcatttctcgcctctaaccatgaactaacttactttctttctctttctttctttctttctttctttctttctttctttctttctttctttctttctttctttctttctttctttctttctttccttccttccttccttccttccttccttccttccttccttccttccttcctttctttctttctttctttctttctttcttttctctctctctctctctctctctctctctctctctctctctctctctctttctttcggcttatggccaaagacaataataaaatccaggcattaaattgcctgtctcatttctgtttcctatcctcattttcttcctactacagaggtaacacactaactgccagttagggagcgggacaatggaatctgatttctctttgttacatggggtcatcatgtgtggcacttgggccaccagtaggcctatgtaggagacttgggaattatattagtggttatatttatgcaacaaccagatgtagggaaaagaggaagtcttgactgcctaaatcaagtgttaaacaaaattgatgataaaattatggacataaagtggacatattcaagtatacagatgattgaaaatactttaagtcaaacatgcatttgatatacctgaccatggagtaccacagtttagtgatacagtgtgctacagatccattcatgagtaccttgccagctgcacagtgggctaccccacagtgcactgcctagcatcttcaaagccagctcaggataaaatcaaaatccaaatgtgttgcttttctagcatcatagagccagaaatctcagaagtccaaatatggtaaggatatcccacagaggatatcttacatatttgaaaacatgtaaatatatttgaaaatatgttttcaaataagaatggttgtgtgtgtgtgtgtgtgtgtgtgtgtgtgtgtgtgcatgtgtgcatgtgtgcgcaagtacatgtgtgtgatttgtaaatgatttggctttaactgtcaatttgacaatttagaatcaccaggatgagagttctaataaagaactatttatatcaggttctattataagcatatcagtggaggattgtcttggttgttcatgtatagaagaaaacttagcccattgttggtgacatcattctctacattgggttctgaactattcagcatgcatatattagttctttgctcttgactgtgtatgatgcaatagctgttctgagatttttcctttgtgactttccttctacaatgggttacaacttggaattgtaaactgaaaacttctctttcccttacattgccttttgtcagagtattatatcaaagcaactgaagtgaagctgtagcctccatttagaaaagctagcttgccattgtttgcagtttatcattgtacattatttacaagtgggagagaatgcacctatcactgcagagatgtgcctcaggggaggagatgaagggtggggctgtgatcaggatgaatgaaaaaaaaagtagtagaaattgcaaaatatgtaattatattctacaatatatactctgtggttagcacaacttaatcttgacaataatcatgaagtttgttttaaatatttaaatacaaggtatttttgtctctaaatacctctgaatgtgaggccagacaaagcaaaccagttaggggaatgggatccataggcaggcgacagattcagagacagcccctgctacagttgttgggggacctacatgaagaccaagctgcatatctgctacatatgtgtaggtacatattttgtaatttctaagagatgatagtagaacaaaaatgattattattcaaaatatatctttattataaaaaatactttttgtagggcttaggactagacacaggaccttgggtgatctaggcaagtgctctactactgagccaaatgcccaaaccaatgctgcttttgatttttagggagggtactcagtttttctttgtatttcagaatggaagtcttgccaaagccatggaggaggtctttcctatctgcatgcagttacattagggatcacttgaatgcaatgaacccaatgatgctggccgtgctagatctgtggcatagcacttttaagtgagtatttctgggctttttgaaactaagaaaagcttaggtttatttatttaatgcctgtgagtgatttgcctacaggtatgtgtgtatactgtatgctgggtacctggggagggcattggattttccctaggtctggagttagggttgactgtaagcctgcagtgttggttctaggagatgacctgggtttgtgcaataataggtgcttttaaccaaaaagccatcatctatgccctcttactaattttttaaaaaattatgcattttagtcatatctggtttatttcttttattattttaattgtaaattaaaatataatgcaaatatgaaaacatggttttaataaataatatgtaacatttagaataataagtgaacactgtcttttacatctaactcatcgtacatgtcttctgtgtctaatcaccgtgggtggtttaaggatactcctagctaagggacttagtgtccattccttgttttgagtgacccataacattagctgctgcagtgctcggaacacttcacaaacgtgataaacattgctcaaattaatagcctgcaactgaagtcccctgacagctgatggagagtgtagcctgcctcccaggagtatctagtggggcccgagcagctgtggacaggaaaggcttagcagaggtggatatgaaggtttcttggtgcacctggaacaacaagctttgccccttcagcagaagaggacctgccatgtggtccggggatgatagcttaacatgctctctctcagaggcctgttacaaactcacagaagtactcctctccagcaatatgccgacatggagacatggcttaaactttaccgaagtaacgcaaatttaaatttcttaaagacaaccttcctttagacgccctaaaacctggggcatccctgcacctatgagaactgtgacgtcgtgtttcctcctcacaagccaaagaagtgacacactgaacagttgcagtgctgaggacattttctacattgttctgtggatgtcccctgtggtggtttgaatatgcttggcccagggagtggcactatcaggaagtgtggctttgttgaaggaagtgcatcaccatggaggtgggctttgcagctcttctcagtgcagaaaagccagtcttctagcagccttcagatcaagatgtagaactttcagctccccccacgccatgcctgagtacatgcttcattgctcctgccttgatgatgatggagtaaatctctgaaccactgaacctatacgccagccccaattaaatgttgtcctttataagagttcttggtcatggcatttcttcacaaaacccaaactaagacaccctcatatgtacatgcatcccacagacacattctacaatgggtgatttgttgcaacgtcttaaagcgtaagtgtttaacaaattttttacatataaatgaagatatgttctattatttcccccccaaagtatcttaccaagcatccctgtgactgatctgggattcagcaagtcctatgtctttatatattcacaaaggtgtaggatttgggggatctggggcttccttggcagagagcttcccctccccaggctccctgctcctcagggcttccttttgaagaagtgttattacttggtattagaagccagcatatgccagcaagattttgctgacaggatcctgatatagctctctcttgtgaggctacgccagtgcctggcaaatacagaagtggatgctcacagtcatctattggatggaacacagggcccccaatggaagagctagagaaagtacccaaggagctaaaggggtctgcaaccctaaaggaagaacaataatatgaactaaccagtacccccagagcttgtgtctctagttgcatatgtagcagaagatggcctagtcagccatcaatgagaagagaggcccttggtcttgggaagattatatgccccagtacaggggaatgccaggaagcaggagtgggtggtctgggcagcaggatggagggagggtataggggagtttcaggatagcatttgaaatgtaaatgaagaaaatatttaataataataaaaaagaagccagctctgaatgcatcaagctttatcaccctttctgttctaacccttctggtttctgtgaaagttcagtttaaattctcaccaaattccagttactatactcttccacttagcagtgatgctccccaatgtcgtatttctgttgaatatatatatatatatatggctttaaaatttgagtcactgttatggtttttggtctgaaaggtcccctatgaagctcatatgtttcaacttcaggcttgttctcagttcctcagtattcagagaaggctgcggggagagagtggatggagagggctctggcctcagtagattaatcagtttgtgagctcaccatccgtaggcctgttgggaaaggaaggaaactcaggaactaaggaggtgggtcttagctgaagagtggatcctggaggcctgccctcagagactgtatcttgtcctcaggtccttcactttcaaaagctctttgcctttctccctttttcccagctgccttggcctccctcctcacagctgccttggcctccctcctcccagttgccatgagatgaacatttctgtgtcaccgttgtcactccaccatgaagctctgcttcaccacagaccctgaaacaagagagccaagcaacagatcatgaactgaaactttggaaatcaggagccaaaacaaccattctgtccttgtctttctctcgcattgtgccacagcaacagaaaactgaccaccacagaaaatctcatgttcttgacagttgagttttatagagtacagattttgatgataaatctaggaatatggtatttttcagaacagacaaattagcaaaatcataaataccacaaaatctttatcttaaattgctgtttatttttatctcttgcaggaaattacgtttagttgacatagaagagtttcacagctgccaggatgcattagagctgtcagaatttcagaacattgtcattaaacacatggaatctgccaaggagacgctacttaaaacgtaacgttttggactctcagtaggaatgtttaagcttaaagatgtgattggtgaagtgtttcatttcaacaacttttagaaaatccacttcaacagggtttgtttgtttttttaaaaaacacatttctgtctcagagttaaatttgtccttagttatcttggtctgtaacgtgtccagatgttgcagacagcaacaagtagaaagaagtttaaatgcttgtcactaacagaggccttcttgtaaatttgttgctatggcctctgcactgtgagctggtggacaccaggcagaaacgatcatgctctagtcaccaccaggctttgtgtgacatctacatgccaggcacaagctgtgctctctcatggctttgggtggggaacataaaaacatttagaggatgacccagaagggaatgcatatgactttaaaaagtttgtgacttcaatgatattagatctattaaaaaacaattaaatatctccttggattggtccttcagaatggaatagacacatatgataattaattacataggtgccagacaattacatggggccacataggacaattgtctttagcttgatcattaatttattaaatataggacattaaaattaggtcaaattaaaattaacaaaagacacaaaagttttgaccacctcataatttctaaaagttaagtagaaatgtatgttgatcatttaagatttttaattttttttctccaataaattaaaataataatactttttaaaagttaaccttttaatttgattatatattaagttatataccgttgacagaaaaataaaagtagagagcagataaagaatggagctgtataacagtgcagagcagatgatgacatcttcaggacaggccatggatggattacctcagcctgtagctctgaggacaaaccccacctcaaacttgaatgagatggtgtcacagaatagagtagagctcaaaacttcattgacttttctgataagaatgtagattggttatcattgtgtgttcccactcctggtgcattcacactgactcgaaacacagtttggtgagccaggatgtgttcatcattactgaaaggcagaaaccagctcacagcagacaaactagtgaagtgaactagtgccctgcaggtccccctggccctcagcagctgctatgctctgtccactttctagacctgcatctctatttttctagctcttcattcacacccctgtagtttttctgactttcttcacctcattgtctcctaaaagggggactccctgagtctttttcatctttacatctacatcaattccatcatcccgttgggctgacccactgcagcatcacatctgtcctctgagctctaggcccttgccaagcacacagagcatatccacctatgttcaagtcacatcatgtccataacaattacgtactctcttctaagtctgaggttcttggtctggaccattgccagagcaccctaaactctgtggcttttaaaaatccttattgttcatctacaatttctcattccctccacactgatcatagcagagtactattttttgagatattatttacttaccatgacattcacttttgtataggtgtagagctgtggcttatatagcattcatacaactgggcagtcatcaccactaagttccagaaggttttctttgccccaaagcaacactttttcccttggcaggcattccccttgttctccatcccacaagcctctgctgatcactgatcctagttttgtgtctgttaacttttctatttgggaaattacatttcagctgtatgtggccatttcttttgggtttcttatgggaagcatgtttttaagcttgtctatggtgtagcactgtgctggttagtttttgtcaacttgatacaaactaaagacacctgtgaagagggaacctcaaatgaggacttgcttctatcatacgaccatggtcccttcttgtcttgagtttagtttgctctttttcttttgaaatatctagtggaaattgcttgtattttaatatagatgcttagagctaaaaattcccactgttcattgatgtttgtttattcctcagtttagtatataataatgtcatactcactcaaattatttttgtaattggtcttgtgatttttgtctctttatgtctgtgtatagcttatctccacatacttgtgactctccagtcatcatgttttgatttctagttttgcagctcaatctttttatatctattaagacctattttctgactaccattcattgagatgccatctgtgtcccttttatcttaattcccattgcttctgccatgggcaggcccatttttactgtgtgtgtttgcacacacatgcacatatgtacattcaagcaatcatgtgtgctgagatgcccacacatgtgcatgtgatgttgtccttagatgtctccaccttgtttttagagacaggttttctgattggctgaggtttgtgggtttgactttactggctctctggaaaccccagagttcctccagtctctgtccaaccaacactggagtctggagtgcactgctttactggtgttttaatgtgtgttctagggactgaactcaggtcctcatgcttactcagaaaggactttaccagctgagctatcttcctagctggcggttacccaatatttagatagcgcagtggttctcaacttcctcatgctgtgacccttcaatacagttcttcaggctgtggtgaccccctaccataaaattattttgtttgtacttcataactgtaattttgctactgttatgaataataataacatatatatgcatatgtgatttgcaggatatctgacatatgacctctgtgaaagagtcatgtgactctcaaagaggtcacaacccacaggttgagaatcattgagatagacccttgcaaattataaatgacttctccattcctgtgtttctgtaaatgttccccttcattttagtatctctcatttgttgacaaaataataagtacagcttcttaacttgttttgaaaacttgcattgtgactcttatctctcttgtcctcccctctgagcatcctttgaccttgggcttatggaaacatagcatgagttcttttagcttttaccctatttctacctcaaatgcttctgctagggctttggtaattactattttcattgtaaagcctttctccaagatttaaacgtaaagtgtctctctgtcctttgacttctagctatttcccatgatgcacctactgctttcattattatgagctgaaaaaatgatgtaatatctttttataccttctgaaatactgtgcataggacataagtggacttgcagtacatgtaaagcaaaagtttatatttagaacttagatttcttctgttaggacactctgatcatttctatcaactattgtttaaaagttcattatccctcatggcagaaagtatcagcgttctttaatcttgcagtaccaacaaggattttataagctgaaaacttcagtgattttcaacatgaggtacctacatatgaaattgcaccattattcttttattacaaggacacatacacctttgaaacttcattttaaaacagtcattctttcagtatttcacattaagggaaattgggaaaataaaatccatgatgtttttgatttgtgccttgtttttaagctaaatgggaaatgggaacatggcataccatgtgagtttaacttggtataagctagctctttgatcagttactcactctatggctttaaactaacagatattccatggggatcatttaagagcctggagagaagtgtccagtaaggttattgcctatatttcttcaaaacctgcaggaactgtaattgcaaaggtagatttatgtcttacagcacaccattattgagtcattttctattggatatgacttaaaatttcttttccttggagaagtgaaatactctaacacttagggctcagagaggggataatgtcacttagcaatatacccctttatgaagacctttggatgtctagaatttactgttaatgcttaatgtaagtggaaatatacactgagagtattgacttctaaatgtcttttgttctttcaaggtggtttccagaagtgcagaatatttttaaccaaggcaataaaaaaaagcaattgccaactggcaagagcactgccaaattggactcttttttcaactgcgctgctacactcatgaccttacagctgcaggacctcattcttgtctccatgcaagacttcacagacctcatcgcccaacctctggtaagtccagctcagctagcaggtgtgcctttgaaaggtgtgccctttcagaaaggaaactggcaaggtagcttttctgatgagatagcaggatggaatagaatcttcagatctattacacttgcatgctaaaaggttaggtcaatttgaacagtttggataagattatcatcacaatggtgaggatttgggtaaatacttgggggatggttgagttttgaaggcttgggtatagcttgctttgaggagttccttttatctcaggaaggagactgtttcctacagcatgaacagtgccttaggatcaatgtgcttgacccactagttaacctctaggtccggtaagacagtaccaagcagtaccaaggatgtcaatcactcctgcagttttttttcagtaggatttgcacttgtttaggtgtctcaggtacaagagaaagtgcgttctgagtatttaattggggctggcataattttcattcacagcaattaatctccacatctctatatctctatgtatacctatggttatttttatttaattttacaggaatcaattagagtttttgaacatccaggtttcatcatgaggctggttcttgataaagaggccattaagtttgaacccgagtttaatgaatacatagatagtcttataaatatctatgaaatcatgattaaggctgtcagctttgtgccaagagttgagacaaaattgtattcccaatgggtaagtaacaaggatattctgattgctgccctggaagttcacccccatcacacctcacagcctatcttagcctctagtagacgcatcacttagctggggtttggagtggttattcttaatttttatattaaaaaaaaagagacaatagggtttttgtatattcctaaatgatttttttttatatgcagtatgtgcttatcttatatgtaattcacgacttggttttgtgttagccaattttatgtcaacttgacacaagctagagtcctctgagaggagggagccccaactgagaaactacctccctaatgtcagtctggaaggcattttcctaattagtgattgatgggcacatttgcctggcggtcctggaacctaaaagaaagcagaatgagcaagccatggggagcaagtcagtaaacagcacccctctatcacttctgtcttagctcctgcctctaatttcctgttctcttcagttcttgcccttgatatccttcgatgatggaccatgatgtggaagtataaacaaaataaaccctttggtccccaacttgcttctggtcatggtgttacatcatagcatagaagccccaactggacaggtttagattacttaacattttgactataaaattatacatggctattcttttctaatgaaagacagaaaggaagtgaatctggatgggagaagagttggagggactgggaagagttgagaaatgggaaactgtgtccaaattatactgtatgagaaaataatttgtgtttaataaaagaggaaaaagaataaaaaataaattatacattgggaagacaatgtccccttcagcggaagcaactattttatttattttctagaaattttattattcttcgtacaaacagacttggacattttttgatggcccttactacttactaattaaatttttttggtttttacatatactaattcttttccattctgagtttagaattcactaattctaaatttccattcagaataccactgtctgtggtcttggcctgtgtgattctgctgttggtagaactctgcccatggtggctaatacctctgggttctttccctttttactatgtgacagacataagacctcaggacatctctgtggctgctgcccaagttggcttctctgggatttggtaatcatttgaaagctctggaaggctcagctttgactgaacaatttttgacttaatgatactttagacacactggttctgtgcttatccaagttagagactagaattctgatagtggactgctacggctactatttctttctctatcataggcaaattcctcatcccctgccccctcccacctccaattaaaaggttctgtgtcctttaagttttgtcaagatatgtctcctgagagtgctactttgctctactctgacactttgtcttctgacagccatactctgcccccatgccctccttgctggggaatcaacaaatctttgaccataaagatggttgaagtcttcaggctcatgcaagcacacaatgacctgctcccattttggctccatagctcccccctccccttttacttttattccttgtgatatattagaagaaccaaatttagtaattttcttaaatactcatgtattctgaaatagttgttttctgtttattggttcttcatattaccacattttgaagtctgtcaaaatttactgcttgctttgcctttgcataactccaactcatttattgcatttattcctaatattttacccttttttgagaacagaaattgtcaaggtagcttatgaagcacactgatatagcaagttaataagataagaattacaaatgagtgtacacaatgagtttaaattagtatgaaaatatgtaatttagacttttgagaagagaatatttgttttgtgtcagatttataaagctaggacttgcatggggcattgtatgtggggtaatggttttgtcaactttacttggtcacatttttaaaaataaaaattacagagttgtctatgatcactacccctagatgtctctaggtgatttgagtttcagccagattttgaaataaattataagactagtttgaataaaataattacatggtgtctcaatgacctttggcagtagatgcaggagcagatatatatttctgttcattaatatatttgataggaatggaaaatagattaaaatacacttttatttcccatggaaggcaaactggtaagggatgaggcaccatgagtctaagctcataactgtcttatgatctaatatgatattctttgaacacctgaggtatcacatgaaatatcatttttcttacctctcaatgggcactaattaaatttaatattagaaatttcaggtgattctcagtctgaaaatctaattatgtctagaaaaatagctctattttagaaattagacaagctgctaaaaacgtaagcaacagtctacgatgagtattaatgaccttcacaggagaacccataaatccaccttgcacacagcccattgtgtgggatgaagtactctaaactgttttgtagaagagacaataccaagtgcatcctgagcccaagactgagggactgatcaaggtgctaacattcagtagtgttcctataaacaatgtagctttcagccactgatcttctgaagtgcccagtaggaggcatagcaggcaggcacccactggatacctaaggtggtgagatcaatttcggtgtcatagaaagcccgccatagactgatttctactcattacagatttaaaaatgcctttttctggatggcacaacacagatgtttctaggagttaccatgcagattataaactatgccaacacatgtattgatcctcttatttacaaggggaaggagttgaatgttgatattcatgtgctaattaaattgtcctcttgtgcattcttgctcaccattattccaaccatggttgcagaataggaatttggcaactaaggatcagcttcaaaggccacctagtgagtctcaatctttctttggtttgacctcacttgtctgcttcctgaacaaaagttcagtgtttgaggagggtggtgatggggctctgcatgagcatcttctttttaagagttcaggccaaagccagccttggaaagctagcacagcaatgtttgggcttttctgttttgcatcctaggttttatttttgcatatattttcaaatgaccacttgcccaattgtactgaaaaacaaaaacaaaacaaacaaaaataaaacatcaggtagcccttatggaaaacaaaaattacacaaaacctacagtttacaaaactcctcaggttggattgaaacatatttctatagattagagattagtaaattacaacagccttttcttgtgtatagaaaaggcaatatagtaagattaacactttccgggagataatatagtagggttaatttatctaaaggtacatgaaataacatcatttcccttctctgctcaggaaagcaaatctaagccaacaaccttgaagcccataattctgaatgaaatcatagacactcataaggaaaagattagagaggtgattttacgagagagcgtggcgccaaccgagcacctcaaaatgtatgacaagtatcagttcttgattactggaaaagctgagcgtgatattgatgagttgctgtttcaaaatcagaactatgagagactaatagaggaaattcgcaaataccaaaagctaggagaagaaatacagtacacatctcaaaaggtaattgcctgtttttctatgactcttgatggaagagaatggtctgtctcaggtgtagtaacatctagtgttagagcccacagtgataaaacgaggagtgctgtcaataggagcatgtgcccagaactggtgacacttgccagcatggcgtgggtctcagtgtcgagcagctaggacacataccgtccttgtgctcacatgcatgagatgccagtgcaaggtgaaagggatttaagaaacatgaatagaaagaagcataagtatggaatcccccacccccaccccccagttccaagaacctgacttttaaattttacattgacaaatgttttggaaacaacagcaatgacaccacaatgtacatccttcaattactaaagatactaaagattactaaacatcctctcttggcccctttatcaaaaccattcttcagattccctactatgcccatgtattactttttaaatatgaaacaaataaaatatgtgaaactcactgctggatggggtggtacacacctgtagtgccagcattcaggaagcaggcagactacaagttcatgacctacagtctggactataaagcaagacaatgtctaaaagcaaacaaaactaatcgaaataaaaaaaataaaggaagttaattttcattcagttatcaataacctaatttcctaaactttaaaaagccattatgatgatgatggtgatggtgatgatgatgaaatttactcatgatggatgtaaaataccaagtatttgttgctggaagtgggggagaggtgggtcagatattagaaactcccgcagcccaacatatgaatttgttattatcttcagtttgtttttgatacaggatcttggcctttagcccaggttgccctggaactcactatgtagtcaaggctggcctcaaacttatccattcttcctggttttgttgtccaagttcaggagttatacacctgaaccattatgcctggttcaacaatttaaaaccaaaaatcaagaaccaaaaatctcaaaacctgaccttattacattgcacacacaaatcagcagccaggagaatagaaacgaagagagcctcttacttatgcttattccaattcatgcttcataaatctttttcactctgcagactgtttgtttgggaatgtttgaaatgcactgtgaggaactgatcagatctttggtgaagcgagcagatgtcatctgtgggaaactgatagccaagatgttccgagatcaccaggaagtaaacacaatgtacgggagtactggggtggctatgtttgcattctaggagtggtctttgtgtcacttggcaatggaagtgggtcgagcagtgtctcagggatttcaaagaaagggttatgctaaacgtgttctgcatggagtgacattttgtgatgcagttgtcaggatgtttttttgtttttaaacatatgccttcctaatcatttaaattaattattgtgcttccattcttttgcacaagtcaggtggacattcacttcatactttaaaacttgtgtaatccatacataaattagttttcagagtcgatctgtataggagctgtgggtggactctaaggagttgtgctgtcaaattcaaactttgtcatactatcattattctttagtgacaggagcttaacccaggggctgggtcctcaatgaagcagcttagagggaagatcatccttggggcaagacttggtcttatgagagagtagggttgctctctataataacatatgcctatcttgactttaagttactgaggccagaaactgcagatctgttaacacttattgctaacagcatggttgattaggtaaaggatttatgcctgcattcccttctctatccaggaggccagagcccttcactggcctgactggttaactctttgttagccagagggaaaggaaaggaaaagaataaaaatgctttatacaggcaaatatgcacagacattcatacatccatactttagtcaggcccaaccatctgtctaaatcaacaccataagtattcatgtatgcttatatacgtacacatttatctatatgcacacatagatacagacaaaatatacatttggatggatggatagatagatggatgggtgggtgggtgggtgtcaagagaccaccctccccaagccaaactattcaaccaacaactttatttcttttctttggccttcttagacaaaagattctttagaaatttcctcatagataaaatgggagttatagaaggatgttgatagtaagttcaaagtgggatttcattctaacatgctcggtacaagttcaaagtaacagcttttacatggccttgccttatcatagtgcacacctgtggttatccttagacctaaatgtttttccttgaacacaaatttgtcccaagcctatttcacttttttgtgtaattatgaaagctcattgtgtttcttactatgaagcctttacttactatatgaggagtgggcacattctagtcttgattctaactttattacatctgtctagcaaagcaactaaaaccattacttaaaaccttcttcctgaaattatttgaaccaaatcaggaattctatagagtcattaattcatctaaacagcattaattcttgaaagtttatctttatggtgatctgcaggaaatctgatcaatagggtgggctaatgctcaggtatcgttatattaatttaataaggacaggaaaggcttattagctgcaaaaggcaatcctgagctgaagtctctttgggtccttgccattgagctcactcatcacagaccatgcaaaagtggtgggtcacccccaggaaggtcacctgttagccttagcctgtcctagatggctcctgatactttaaggccttggcaagttgttatttttataaagattttaaacttattttaaaagatgtacttatttatgtatatgagtgcactatttgcatgtatgcctccaaatcagaagagggcatcagattcccttatagatgattctgagcctctaggtggttgttggcatttgagctcagggcctctggaagagcggccaagtgcccttaaccactgagttacatctctagccaccaagttgttctcttaactggagaactgttgactaaacagggtgtgggggtaggacagctggttattctaaacttagagaataccaatcacagtgcagctgaatgtctacttatctaagtcaagaagcacaattagtataactggtccttcaacctcttttctaatgttaaaaggtagaaacacagaaataactagaatattccttgtatagtttttgagggcagggtctcactaagtccctgggctatcttggaaaacatgatactccaagtagtcacctctcaatatcctagtacgattacagatgcgaatcactacgcctgctcacagaatgtttctattccaggcctttgtactgggtgaaacatttgctataattttatcacagccccacctcttctcaccacgctctgagctcctggcagctgggctttcttcctccattgtttttaattatgtcagactcgctggcctacagaaggtgcagcaaaactgttgtaggagccctggacagggatggcccagttgctttttccatgtctctacctcaccaggaagcctataaagcagtgttacctattctcacttttatctgcatgacagctccactccatggcctcttatctgcatcctttatggtacacctacccttctctgttgattctgccactgagatttgcaaacatgttcaaaatgcatatccatcttccagccccaccttcagctcagcatggtccacatgctctttgccagacaatttttgtaaagatttcccccccttgaagtcccttacctctgaactttctttcttccaaccctaagtttgttcattatttttattgcttacaagacagaccagtaggaagtattggcatgtaccagacatttctgagctacagacctgtttttaatctctccctgtaaataaagttagttacttcccatctttgtatcatctcctgggattggcacaggaacttccccttgaaagaactgtctctggtgtctgactgtgagctgctcaggggtcatttaatgctgatgcatggactaggacagaatatcattaagtttatgtggggcaaataagtaaattaatatgaatttgtattcattagacatcacgtagatgaatcataatcatgcaatggaacattaaataataaatactgttggggttaaaattaaatcacagacttgtaagattggtttttctgctgtttcaggctatgtgatgagtttgagaagatagctgaaaaggctctgagtacgcctctaaacacagctgagctcatggagatgaaggtactgttgaagagcctgcatcactgtagggactgaactgtcccaagagtgcaaagaaacagaccactctgaaggttaaatcagaggcttccagtcatcagtgcttcaaatgtttcattcacaagcctgcagtctggtgcttcaggctggcctctccccggtgctccttctggcctctgtgtggtcacttgaccacctgttataatacactctgttcgttgagtttgtgctcagtggcattgacaggtgcaaatattctttggcaattgactctgctccattagtctccaagctccagcaggctccttgtgtaggtttccctagcagagtagatgcttaagtgtcctattgtatatgtgcttttctgctggtgtcacattagctaatatctcactgaccaaatcaggtcagagtgagagggcacaacaggccatggacactggaaagcatcagaacaacaaatgtagtcatctaaccagatgttcttgagaacggtgctcacaatagtgaccggcgagctagcatatgttggccagaacaggtcagggtacctgagatgtacatttattccccattttaatcaacagatattcaatccttgagcagtgctttcttctgtgtctgaaaagactgtgttttgctctaacaccttctatgacagttggctgaagtgtttccctcatcaaacccttccatttttacattggttatttttctagttacttctattattttttcactctatctaaaagcagacaaagtaatataaaataactaatagcagttccattttatgctcctataacattatcttttatgggatatgtaaatatgcctcttgaagtctgtatgagtttgtaaaagtgaccatacactcagaactccagcccaaacacagaaagactttaacgaaagcaagactctctgagtaaaattagcaataaatgtaaaatttttttaaaaaataaaaatttttaaaaataaaattcctcaaatctaaattagaaccctttacatttagtttaagataattaagacatttaagatatttaactgaacctgtaaacgtaaaatcattcaaaattctgtatgtatgaaaattataaaaatgaattcaaatggttacatgtacatatttttcaaattattgcttaaacaaaatttattaaaattactgaaactaaattttacatttattgctaattttactcagagagtcttgcttttgttaaagtctttctgtgtttgggctggagttctaagtgtatggtcacttttacatactcatacagacttcaagaggcatatttacattttgttaactgttattggccatcaagtagttctgtggctggtaataggtataatcactgtgccttcctctttgttagaaaagaactcatgtggaaagaggagttgcgcacattaccatctacttatcttcctagatgttactgtcttaaaaattttggggttattcaatctgagtttctattgcataaaataatctttaacaaaattagcaaataagattcattgttgcttaaaatatctctgtgttttaaagtgtattccaaaggtcaatgtagtcactacaaaaatcactcatttattataggtagggagaaacataaacccagtctctgggctctataggaaactaattagctaaattcaaaagtacatagtttgactagacatttattacttgtgaaaattagtttctaaatcaatccattgcttatgcattgggacatggtaggtcttgaatttttgtcttatagccacacattgtagacttattctgaattctctgctatacttaatcagtgttttctcccatgcaagtgaggtagtttggtgacaaagtttgaccaggtacagtctttcttccttcagttgatttggccagttgactagagcccagaaggtcccagtgggatccaggttcaatttaaaactattcttctgggattagggagatggctcagtttttaaaaggacccaaggtgttgaaggagtttgcagccccgtaggaggaaccacaatatgaactaaccagtaaccccagagatcccagggactaaaccaccaaccaaagagaacatgtggcaggactcatggctccagctgcatatgtagcggaggatggcctagtcggtcatcaatggggggggggaggcccttggtcctgtgaaggctctatgcaccagtgtaagggaattccaggaccagaaagtgggagtgggtgggttggtgagcaggggaagaggggagcagatagggggttttcagtggggaaaccaggaatgaggacaacatttgcaatgtaaaaaaaaagtaaataataaatgattaaaaaaagaatgcatactgctcctggagaggacctgagtttggttcccagcactcactttgggttgctggcaacccctggtgactccaactccagaacatctgagtcccctttctggcctctatgggcagttgaactcatgtgactttaatcttcctccaacaccatgcacatacttagaaataagaataactccttaaaaatgagcatcctccattagcgctctgctgcagccctggcatctgttcagaccctcacctgtgttccctctgcctgcccctttccacatgccatacctcatgtatttgtgggaagcttctgttcatgtctggctgccttggaagtctgtgacatgctgcaagcagcagcagcagcaggcctcttggtacagtgctgtccatgtcaaaagttttcatttgcagttatttgactaatgaccatctctctcattagatggaaaatgtcatgatggtaaaagctgtgtctgccccatggtcacttggcaaatgtgccaggtacatttggtggcccaaagcataatacttaaaaaagtgaagtcactcaggtggtatctgattttatcatccagggatacacagcatcctcctggtcttccattgctgtgtgtgtttaaaagatagagagtatgagtgggtgtgtgtgtgagtgtgtacatgtgtgtgcatgtgtgaatatgtgtatgtgcatatgcatgtgcgtatgcgtgagtgaatgtgtgagctcacaatcatgtgtgcatgtttgtgcatgtgtgcatgtgtgcgcatatatgtgtgtgtgcatggatatatgtgtgtgtatgtatgtgcatgtgtatatgtgtgtgcatggatatatgtgtgtgtatatatgtatgtgcatgtgtatatgtgtgtgcatgtgtgtattgttaagtatcttctcacttttttctttctcttattttagtgaagtgggtggagtaattgagaataaattgtgtggagatccccagttctgagccatacttttctgatgcatctgtatgtatttattcagtgtattaccacagggcatgttgggtaagagttctcccttacaatgctgtctgtaacctttgctttccttcaggctcatgttcaaaaattggagacaactgacatgttggagctgggacagagactagtggattctaaaatctgcctggccttccttatcgagtgcgtcaacttttctcctgcagacatcagactaaataagagtgttttccagtggtatggcagaatgggggagatttttgacgagcacaggaaaatcattaaagagaaaacagaactatatcaagaattccttaaggttggcattatagatttttcaaattgctcccattttttttttttgcgaatgtttggatttttaactcatgtataatattacagacttctttgttacacgggccctgcattgtagctttctccccctgtaatctcagaaggtgtacacatgctgggtctctcctaatggaggactaaggagtgattcaagtgccctgattgatgtgggatcgtttcatgattttttcaaaggtagaatagagaaaatgctggaaagcattgcacacatgtggccattaataagacagtttgtggtactaagttcagggttttttgccttgtttgctttgattttggtttattttatatttattgctccaacatcaagatctcctgctgacatgctttttatgtctcacggtcactctggctttcttgaacacaatgcatacctaccatttttttttcttggaagttttgcagcttacctctacctaccttctaggccagtttcccacttttagcacactcctgacgtgtgaactccaagcatcctctagttctctgctctgtgcatctctcacatccaccttgcatgttatctctgcactctgcagcgctctgccctgacacatgccagtcacactcagttgctttttccaagatgccctctatacttcaggtagcttctcctttgctcagattagaccctttaacacatctctactatattaatgacccaatcgctgttattactgttgcgtctatctgccactagatggccagctcctgggagctttgtttctatttactctctagttctatcccactggctagtgcagtcaatggctcacagtatctcagcccattttgtgctgttataacacaagacttgtggctgggtaattgataaagagcaaaaatttgctacttacatttctgcaagatgagaagtccaaattcaagagaccgacatggccgaaggcctcattatatcatcccttggctgaaaatggaaggcaagggattaagagggcacatttacaagaaagagaataacagaggggaaaggagggagagaaagtggtcaaatccaccctttccctatgagcccactcctgttaatctgcttccatggcaacagaattactgcatacatgagaccagcacctttagaccctgtccactcttggtgttccattttttactatgtttatttctgatgcatgaccatggaacacattcaaacatgtctttcagagggccatcagcactctacagaacataaaacactttagatgtgaataaatcaactaaaaatttcagctttatacttttcaggattattttatagagatacctaaaattcttaagattgactcaggtcagccagttaagatattctttgaccacaagccaactgtttttctactacaccaaagaagattccgtttataaattacattatttggagactagttcatagctttgaaattgttttatttttaaactatggctaatatttctactttaccacctggctatttccaacattttaaatgggaaatcgtgaataatgaagataagatacttaaaccacacaataattgactcttagaaaattcctatctggtccagaactatctgtacttcattgtacagtatcctacttcaaaagtctacacacaatattggcacagttttccttttatttcccttcactcatcaagtgggtgcaatgaatttcctgggaaacaagagaaaagaggacagaaccaacctaggattcatgacatagaaaaaagatcctatttttgaataacctagatttgactttttaatatttcattaatagatatttctagactcatttaatttggaatagtttacctaagacagttttataataagtgtttttgcaccaggcacacacatctgttttatgttagaatattaaaattttaatatttcatacctgggtttattagctatgtacatctcatgtcatgagtgctcatgggagaatgacaataactttcacacatcttagttctgtgttgctgatccaagacctgtttgggcaacagataaataaagacattcaactttttacaaatgctaggaaaataatgcagctagttatctagcccttaaataaatcgatcttccttctaaccctatcttggtattacgagtttttcaaatgctcagtcatttattgcaacagtttttcaacatgctaaagaatataattttaacacattttttaatcaactgcaccagaattccttacattgtatagagccaacttattaactagggaactagaggaatttttaagtgtgttaattttaaattttagggtttttttttgttttgttttgttttttggtttttgggtttctttttggattttagatcccagtcattttttaagttatcttcttttatattttgtcataaaaaaaacccatactaataattttggtaagcctttcaaatacttaaaatttttcttggtagccaggagtttttattttataagaataataagcacatgtgttgttttgattagtttcggtgtgagcggtttgtggaggaattggagagttatgctaaacaagtagaagaatttcatgcatttggagacctgttggatgtgcagaggtacttgcaaaaggcccaggtgctgaatggcaagttggatgcagcagcggacaaggtacaattaaaatctgtaaagaatgaagtgatccaataaaaaaagacagtgtgtttgtattgagtattcacgtttaagaaatagattcatccagtcatgctggtacatgcttgctcccatcacttgagtagctgaggccgcaggattttaagcctgaagccagtctaggtaacaaagtgagactttttttttaaatggataaaacagttgagttgcattaagcaagagaataatagaagcaattcacatttctagtcatgcttcaaggagaagcagcagggtggctctctgtgggtggcatgtttctgtggtcctcagcttttattttaaagatggagatgttatctctgccagtttgtcacccattgcaccattcatctgcatagtagctctcctgtaatcactgagagaagcacacacgtaatagcatttcattgttgtttagtttagtttttgtgtattcatacatgtgcagctgttttaaaattggatccactattgtctctcactgggccactgtgttcccacactgctgtgtcagagtcagcttgcttattagaaaatctggaagagtaaagctatatcctttaccacatgtaatgcaattttcattatagtttacggtgtaaacaaaccgtatttttcttacattaagagtcctgaatgtccacttagataattaaatagtttataattatctcaaataggtcaaacatataaaaatggtagaaataaactttcatgttggttagttatgagagggaccactgaattcaaagtcacttgattaattgatatatctagctgcaactttttagttgtatagattgtacatactctttactgagtttacaacttagagaaaatgtttcccctgtttcttcccatttatcctgtgctgtggtctgcttgcttcttctctgtgacagacctgtgactgttttgcttcagtacacttctgaggcacagcacatatgtatgcatacatgacattacacgtgttagtagctactgctatgcagtgtttttcctgtttaatttccatctatttaagtcttctttcctgaactgtatcaataactcttaggaattggaccctgtactggctagttttgtgtcaacttgacacagctggagttatcacagagaaaggagcttcggttgaggaaatgcctccatgagatccaactgtaaggcattttctcaattagtgatcaagggggaaaggccccttgtgggtgggaccatctctgggctggtagtcttggttctataagaaagcaggctgagcaagccaggtgaggcaagccagtaaagaacatccctccatggcctctgcatcggctcctgctttctgacctgcttgagttccagtcctgacttccttggtgatgaacagcagtatggaagtgtaagccgaataaaccctttcctccccaacttgcttcttggtcatgatgtttgtgcaggaatagaaaccctgactaagacagaccctttttatttcagtttaccatagtatgtatctatgcttcttattcaaagcacttaagttctttcaatgaacgaagccaaattttgatatgtcttaatgggtaaaacttttttatttgcaaatttatttgactaatgttaagctaatgcaacaaaacattgcccaaaaagtatgcacacaaaaaatagggaaatgttatttagtctttaaaaatataaatcatttgtgacaacctagctgagtccagagggaattatgttcagttaataaaccagatacagcaaggctcacactgcatgatgggatagggagagttaggtctgtaagagtatgcatcaaatagtggttactggtgtatagggactgggagatgttgattaaaacatatgaaatgcttcaacttcagttaaataggagaaataagttgagtagatttattacatagtattctggtcatatttaactatgatcacaattgaaaattgtcaggagagtagcttttcagggtgaggtaatacaatacttattagctgctcttaatcatttcagaatgtacacatatgaacaccataaatacccaaatcctattaatttgaaagagaaaataaagaggaaatagattaatgctcagtctgtactcttattgaatttactgttaaggctcagggagagctggcgtttaacattttaaacatcagtcaccttcagaatcacttattcaacacccatcttttcagattgatcagttcaatgcagaagaggaggcgtttggctgggtcccatcagcatatcctcaacgtaaaaagatccaggacgctttgaacccttatctccatctctatgaaactgctgtggagtttagtaccaaacacagagggtggactgaaggaccataccacaaggtgaacccagatcaagtagaagcagatgttgggaattactggagagggctgtataagctagagaaggtcttccatgattctccaaatgcgctggcaatgaccaagaaagtgcactcaatggttgaggagttcaagcagtacatccctctcatccaagtattctgtaatcctggtctgcgccccaggcactgggaggccatgtctaccatcgttggctaccctctgcagccctcggatgactctacagtcttctctttcatagacatgaacctggagccatttttagacagatttggaagcatcagtgaagcagctagcaaagaatattctcttgaaaaggccatggataagatgatgactgaatgggactccatggagtttgtcattcttccctacagagaaagtgggacatacattttgtcctcagttgatgacattcagatgttgttggatgaccacattatcaaaacacaaactatgcgaggatctcctttcatcaagccttatgaaaagcagatgaggtaaaataatatgtaatgtttatacttttacccaagccctttgcattcaactcaaagttcttctggggattgattgtgcattttacctttactattttcaagtttattatttcattccttaatgtgttatgtgtgtgtgcctgtgtatgtgtgtgtttgtgtgtgcatgcgtgtgtttgtgtgtgtgtgcgtgtgtatgtgtgtgtgtgcatgtgtatgtgtgtgtgtgcatgtgtatgtgtgtgtgcatatgtctaggtacttatagagaccagaagagggtgtagcatcctgtcgaattcattataaggaatgggtagtctttattagttttgcaaaggtatggatccctttgctctgtttatgacaaaggcatcagataagattcagatgctcattttgcttgtcaacaaactgatcttactattttttaaaaaattattagatattttcttcatttacatttcaaatgctatcccaaaagtcctctataccctcccttactttttttttttaactttaagaagtttgtgactgaacatagtttaaggagagtaaagtataaaagtgcatgcagataccagtgctattccccaagtttggaaactagattgtcagagacaacccctggacatctattgtagttgcagctctatgcatgatagctggcaaatgggagcaaatgataaaaacacacaaactgattttaatcaaaatttcttaaaagaaggctgctaaatacatgcaactttcattctgttcttcactgttttagtttttctttattagtttgtctttgtaatgtgtattaaacagtttatatttcaccttaagaggcatacagctaaattcgactgccatcttcagtatgcatttgactagcaagggaaactgacttggaggtttctgtctctggtcatcctgcactgttggggccagcctgcggctctcatgtctgggttcaagtctgggatgcatcttgtaacagaaagaaatgagggaatctaggtgtgtaaagagagaaatggagtcaagactgtattctgatcaagactcaactttaatatccacaaacaagcttcataaagaagaggggaggcccattcccagtcacacaaagttcctttgaagttgtcagatcagccttttagtaggaacccacgataatcacagtttgcagctgaaagatcttggagaacaggttaggcctcaggcaggtagcaggtagtggcacatcaaaggagagtgatgagaagcagcacagcaggtggctctgcctcagaggcagatggtctgaggccagcctagctaggctggaaggaggtaacatttcctccctttaaataatattaaacaaaactggactgaggcataaaatttatttatgctctaaagtcctgcctgggaattatggtggctggtggctgtgcctgccttaggatctcagaccttctagaaacatccaattccatcataggaggctacatgcagctagtttgtgtaataattcacacaaacatggctctgttggtgtattatcaacagccacggccttttggcatgtacccctgtcttagattggtatgattccgggtctggttgcccatcattgactaaccggccctcatagcacaccttatgctcaaatcagaccaaagccacaatatgtacttagaattcttcttgatgaaaattaataactgccacctgccttgttggaggtgaggttttacatctgctgtagtcaggctgaagggagttgctggcctgcttgagaaacaaaggtgggacagtgaaaggcaacagtataacagctgctttgaagaaatccaggtactcaattcatttgcaaattaacaataaccaagctcaggctctgagctctgggtgtgggggagctggctttgagaattagcagaaaggccagagattctctggaagtggaggttgagctccaaattaactttgctaggtaattaggaattttagctatcttcaataggaatctctaatattggaattattactagaccagtctaagattgagttagaataactggtcacaatgaagaaaagagaaaaatcattatgactatattatatgactaatccttctaagtcagaatacacagtctctgatgttctttttgccataaagttaaaaagcttgaagaaaggcagcttcactaatccaaattggaaaaatggcaagcaagaatgggtcaaaaacatgtacccaatttagcatccttgttacttcagtcagggcactgagccaacttacctgccaatttgtcacatgaattagccatcatgcttctgcagcgttctgtggagagaacctatgcttttccctttcctaataaggtagctgttcaggatcaagccatatgccaataagtagatccttttaagatactataaggcacttattaagttctttaacatccaaatttcaaaattctaaaataaaagtatgatttaaataatgtgcatgggaatgcaataaataatatgcacggggatatattttccaccttctttgtcttttaagaagctagagttttaaagttccacaataccttgtccttgagaattaataatttgttgacaaaacatctcaaatacttgactgttatagtcagtgttaatataacatgggcagtgactaattgcactttcaattgtttctcttgaagagcagttgtaactagaaagcttgaaaagttattaatagtcacatgtgcataatttatttatttattaacttagaaataagagcatttatttgctgggcctggtggcacacacctttaatcccagcactcgggaggcagaggcaggcagatttctgagttcgaggccagcctggtctacagagtgagttccaggacagccagggctatacagagaaatcctgtctcaaaaaaaaaaaaaaaacaaaaaaacaaaaaacaaaacaaaacaaaaaaaagagcatttatttgtagcaatttattaagtataagttctcaagaattaacactattatgtggaaacaagtagtaactgaggacgctaatagcaaagaaattgtcatgcacaatttccaagaatattaacatattatcttaaatcataactgttttgaatatataaagaacgagattatatatccaatctatcttatatgtaggacctatagattgcctgagatataaatctagcatggcattgctttaagatgtccaggcaatccagaacaatttattaaatgtccaaaaacagccttcttaaaaggacagcattttttctgatgagttgtatatgcataagaaatcgcaaatttgagaattaatagcatctgagggacgaacaatcttaagcaattgtgagctctgagatataatattgactattaatataattataatgtatattaatgtatattaaggtttgattgttcagcattttaaaacaccatccgcagcacacaactaaattatctgtgctgaagcagggggaagctcaaaagaataagcgtgtaatctaattcacacgtacttatttcccatagaggggttgtttttaaacacaataattgggatgcatgcatgcatgaatttagagaagataaagaagcatgcataaaaacaattttttgacctatctttgggctattgattgtcaatcttatttaaaatgatattcaatagatcaattattaatattctgtaataaccaaattaaatgctttttgggataaggaacagatattttgtcaggttcctaagacacaatttttgttacaggttttccaaaatacacgaatatatcttacaattctttattagcaccacagtagttttaatagattttagaaactgtgctttgaggtgagtgctacctcagccccactcacctgccttgtcatggctccgcggtcttgggcccaactttggccgctcaccatgcggaggcactctgaaaaggactctggatttcgaccagctgctgagccccgcatctccaaagcggaggcagtgcacgccttttttggtgctgccttcggctgctggctgccactgccaccgcagcgaccaagaaaggtgtttgcatactaagcaggactggggccctgtctgcgcctgatgcgcctgatgcgcccgccactgctgccaatgacagtgcaccacctccatgtcaaggggtagctccgtggcctccaccttggtggcagagcacccctgaaccttagtgggaaaaatacggctaccctagcagagacaggcagaggctcatgggccagtggcaggcaaggccctcccctgagtttgctacaaagcctcccgctttttagcagcttcctgcatcactacggtcagggaaagctgtatgcgcaagggccccaccccttagccgccagctggcttgccgggagccaaagaatatagataataaaagggggtaggaagtcacagcaggcaaaatacttagaaattacctgatgcaaaacaaaggaatgacttcaaaaggattaacaggaaccagatacatgattacaataaggataaagctgttctgcctagggttagcttaatgacagctaaggttttaagtaaactttccttgagaggcattagataataaaatattttccacttaggaaataatatacaatgaaagattcaaactcttggcttcttgtattgaagcagaaatgataaaattttctcacataatgtagatctacatttagccatacctagaggcaaaattttctagttattacaaactcactagaagcaaaacctttacaattattaagatgcaaaggaaaaaaaaaccaaacttttggatctataataactatataaaaagtaggcaagccaaattgtaatgcctttataaattctacagccctgattgaccctttataaactatgaatttgaactttattaaaacagcatctgactagatttgcaaaggtgctcttttagctaaaagaaaatttccctggaggcaaagaggggcaaggagagcttcttcaggcaccgtttgtaagacaaaagaaagtcacacaaaactccctgaggctgctccaagcttagttcctcctgccatgaggacagattttagaacttttaagtttcttttgcgatatttgaccataactataaatgtgggaaagcaaaacccaatttcaaaacaatttatcacctttagaatcaatattagaagcattactatcatattacgaagtttggctgccaatttatatgtatgaatacatgacagtgcaagctttaatgcttcattaaagagacattgctttaaatcttatcttaatcctactttctttttttttccattttttattaggtatttagctcatttacatttccaatgctataccagaagtcccccatacccacccacccccaatcccctacccacccactccccctttttggccctggcgttcccctgtactggggcatataaagtttgcgtgtccagtgggcctctctttccagtgatggccgactaggccatcttttgatacatatgcagctagagtcaagagctctggggtactggttagctcataatgttgttccgcctatagggttgcagatccctttagctccttgggtactttctctagctcctccattgggagccctgtgatccatccattagctgactgtgagcatccacttctgtgtttgctaggccccggcatagtctcacaagagacagctacatctgggtcctttcgataaaatcttgctagtgtatgcaatggtgtcagcgtttggatgctgattatggggtggatccctggatatggaagtctctacatggaccatcctttcatctcagctccaaactttgtctctgtaactccttccaagggtgttttgttcccacatctaaggaggggcatagtgtccacacttcagtcttcatttttcttgagtttcatgtgtttaggaaattgtatcttatatcttgggtatcctaggttttgggctaatatccacttatcagtgagtacatattgtgtgagttcctttgtgaatgtgttacctcactcaggatgatgccctccaggtccatccatttggctaggaatttcataaattcattcttttaatcctactttctagtataagaatcacattaaatattatctcagctagaagtaacttaggaggcccagttttttggcctgcttatgccacatgtttgaaaaactcctgagttgccaatttaaggctaaccttctgttaccaatgtaacaattatttaatccaaaccaataacttatgagctgattgtgaagacacgcagagcacattgccagtaaaaaacccaatgaagcagttacacttagaccaatcagaatattaatgtttttagttataattttaaaacaaaaagcactttgtaattagctaaacgcaataatcacaaatgcagagaattttcttaggacaaaaccatctatcagcttttttgccccaataccatgaggctgcagtctctcttttttcttttaaagaacagtttttccagcaggggccctcctgctgtgtgcctgatgctgcggccactctctggctttgctataccagcagagaaagttttagtcatcttttatcttccaacatgaaaacacagaatattcattcattcagactagacataaacatacatgaattgaacacgtgaacagactggtgcaccagacattagacaagactttagacaaaaacacaaagacagcagagaactgctgtaggtcctagagagaacaaatcagggcgcccctaaaatttctctctgcttctgggacattttcctcccgcctgatgcagtttctgactgcggacaatccgcctaattattaaatccaaacccttctgtttctctcacctaagaagcagcttctggaagctgcggctaactgcctgttacgttcctagaccctgataccatcactgctgaacctaagtgaatccaccacgcaggttcagtgctgttccatcttagactgtaccatacctggcaacgtttttttttttttttaatttttttaatttaaatatttttttattacatattttcctcaattacacttccaatgatataccaaaagtcccccatagcctccccccgacccccttacctacacattcccactttttagccctgggtttgggtatgttgtggtttcattttcattaaactctaaaaaatctttaatttcttcctttattccttccttgaccaaagtattattgagaagactgttgttcagtttccacatgaatgttggctttccattatttatgttgttattgaagatcagcctttgtccatggtggtctgataggatgcatgggacaatttcaatatttttgtatctgttgaggattgttttatgaccaattatatggtcagttttggagaaggtcccgtgcgatgctgagaagaaggtatatccttttgttttaggataaaatattctgtagatatctgttaagtccatttgtttcataacttctgttagtttcactgtgtccctgtttagtttctttttccagaatctgtcctttgatataagtggtgtgttgaagtctcccactattattgtgtgaggtgcaatgtgtgctttgagctttactaaagtttctttaatgaatgaattcaatattagaatggctactccagcttgtttcttcagaccatttgcttggaaaattgttttccagcctttcactctgaggtagtgtctgtctttttccctgagatgggtttcctgtaagcagcagaatgttcagtcctgtttgtgtagccagtgtgttagtctatgtctttttattggggaattgagcccactgatattaagagatattaaggaaaagtaattgttgcttcctattatttttgtttttagagttggcattctgttcttgtggctgtcttctttttggtttgttgagggattactttcttgctttttctagggcgtgatttccgtccttgtattggttttttctgctattatcctttgaagggctggatttgtagaaagataatgtgtgagtttggttttgtcgtggaatactttgatttctccatctatggtaattgagagtttggccgggtctagtagcctgtgctggcatttgttttctcttagtgtcctaacatctgtccaggctcttcttgctttcatagtctctgataggcctgcctttatatgttaattgacctttctcccttactgcttttaatattctctctttatttagtgcatttgtttttctgactattatgtgtcgggaggaatttcttttctggtccagtctatttggagttctgtaggcttctttatgttcatgggcatgtcattgtttagttttgggaatttttcttctataattttgttgaagatatttgctggccctttaagttgaaattcttcattctcttctactcctattatctgtaggtttggtcttctcattatgtcctggatttcctggatgttttgggttagaatctttttgcattttgtattttctttgattgttgtgccgatgttttctatggaatcttctgtacctgtgattctctcttccatctcttgtattctgttgctgatgctcgcatctatggttccagatttctttcctaggtttcctatctccagtgttgcctcactttgggttttctttattgtgtctacttccctttttatgtcttggatggttttattcaattccatcacttgtttggtcatgttttctgcaattctttaagggatttttgtgtttcctcttcaaggtcttctacctgtttagctgtgttctcctgtatttctttaagtgagttattaaagtccttcttgatgtcctctaccattatcatgagatatgtttttaaatccgagtctagctttttgggtgtgttgaggtgcccaggactaggtggggtgggagtgctgcattctgatgatggtgagtggtcttgatttctgttagtaggattcttacgtttgcctttctccatctggtaatctctggagctagttgttatagttgtctttggtttgaggttgttcctcaggtgattatgttagcctctatcagcaggcctgagacactagctctctccttagtttcagtggttagagcactctctgcaggcaagctctcctcttgcagggaaggtgcccagatatctggtgttcgaacctgcctgctggcagaagttgtgttccactcaccagaggtcttacgatcccatggagggtcctgtgggggtccttgcaggtgtctggatactctgcgggcaaggaatcctggtgctggtgtggaccggaaggccctggcaacttttttgcctgttgcttctcatgttctggtacaaattttctttaattattttcttcttccatggagcaccaaaagagcagtgcttcttccagtgtcctctgtcttccccaggccctgagtgggatgccaatttgttggggccggcctgcagctctcatgtctgggttcaagcctgggatgcatcttgtaacagaaagaaatgagggaatctaggtgtgtaaagagagaaatggagtcaagactgtattctgatcaagactcaactttaatatccacaaacaagcttcataaagaagaggggaggcccattcccagtcacacaaagttcctttgaagttgtcagatcagccttttagtaggaacccacgataatcacagtttgcagctgaaagatcttggagaacaggttaggcctcaggcaggtagcaggtagtggcacatcaaaggagagtgatgagaagcagcacagcaggtggctctgcctcagaggtctgaggccagcctagctaggctgggaggaagtaacactgcacctaagatgatcagagactctcagatgggtgagattccttctctgagattggctgttctacttccagattccacagagaataaactcatctgaaattgggatagctagattcttgtgaagggctgggcacaaaataattagctagtgggaacagttctgcttcataatgggactagagaaaaggataaaaaaatgccagaagaaatgccagttggaggcattcctgactccatatgaaaaagagctacccaattcccagataaatgctgggggaaaaaatcattttgaaaagacatttgaaatcacctagcaattgtgagaattatttatacatctttgttttaacaattgaaaattacaaattatttcttgtaaatgagtaaggtattaatatataaaaaagttctctccagatttcattgattaataaagcattcttccttgtgttatggtgtctctgacagttttagctgtgggttcaagtctcagcttgtccttgttagctgggagaacttgcacctgctacttaactttggttgctctagcctcatttgttaagtaaatgttgtacacaggtgtactggctagttttgtgttaacttgacacaagctggagttatcacagagaaaggagcttcagttgaggaaatgcctccatgagatccaactgtaaggcattttctcaattagtgatcaagggggaaaggccctctgtggttgggaccatctttgggctggtagtcttgggttctataagagagcaggttgagcaatccaggggaagcaagccagtaagaaacatccctccatggcctctgcatcagctcctgcttcctgacctgcttgagttccagtcctgactttcttggtgatgaacagcagtatggaagtgtaagcggaattaaccctttcctcctcaactgttggggccagcctgtggctctcatgtccgggttcgagcctgggaggcaaccggagctgaaagagaagaggaaacctaggcgggtcgagtaataatggaaaccaagacaactagtctgttcaagactccaatgcttaattgtggatgcgcttataaaggaggggggaggcccgttcccgccaatttatccttggagtccagctgcaggtgaccacgtgcaggatagggtgtagtctccctccggaatagctaggcagcctcccaggaggtagcagctacagtggctgaacaatagagtgatctagggatgctacaccctagataatctccttagtggcagcaaagccgaggtatggctcagccagcttcaggctgggtggagattacacccgacttcttcttggtcatgatgtttgtgcaggaatagaaaccctgactaagacaacaggattattgtaaagatggatgaaaatgcagagagatttttaaactgcaattaaaaactgttaattttggagtaattatgatgtttacacataaaggaactttaatcattaggttttccatatttagagatgaaccgataacgtactggtaattcaaatattgcctcttctgcttgtgtatcacattgtatttaggggaatgtgaattttgtgaatacatgttctatcttagttattggttacaagtctaaatgttgacgtaattattcttaaaacaggttttatttaagacaattttttgatttacctttgagtgcaagcagagaagtgaaaataggagaggcaacatcacacaaggggttggcaggcagctgtaggttgggatgttgctgtctgagacattgcctgctttgctgtcctgagactggattctctgtgcttgtttctcagggaatgggagggcaagctgctgctgctacaggagatcctggatgagtggctcaaggtacaagccacctggctctatctggagcccattttcagctctcgggacattatgtctcaaatgccagaagaaggcagacgattcacagctgtggataaaacctggagggatgtgatgaaaacggttgtacaagtaggtaaaaatctctggttatgtataggagcgataacaactttggttcttaaacatccatgtaagtggttactgtttctagtaagccatcacttccctgcaacatgcattccccttttggctattattttagaattccaagagaaaaaatgtgaaaaaaaaaagtggacatttttgtcctgattcccccaaggcccacagtgcatcaagtttactcagtgtgaccttcggtgactggcatagtttttgccaagggccctgctaggaagccagcaccatctctggatactgtttctctcatggtgctgtctctgtgttgtggctgcacaactgctgaaattcactgtgacagggaacagccagcaagcatacacagtgaggaatgtctctcctagggaacttacaaaaataaaaattccaagagaaatctatccagttagttcaaaaattctatcaaaatgaaagaaaatcataagatacaaagatcctaaggaggagagctcaagctaaggaggaatttaataaagtctggtcacactaaagaacatcacacacaagttctgaaggtgctgatcatgttaggacatgaacataagcttctccattgatattttaatcaaataaactgtaagatagaggaattgcatctaaaatgtcttaacttggtaacaatatacacatattcattacctaaacaaagctatacctatagtcctaaatactgatcattgttcatcaatggcaactatatgatttgacagtatgataccagaaagatggatatgggtttgttcaatggtcttactttggttttgtaataatatcattaaatatgtacaaagcaagccataaaattaatcacaatatagtcaaatacacacttagcagaactattagtgagttgcagtgtaacactgaaccatttctttttttttaatatttttattaggtattttcctcatttacatttccaatnnnnnnnnnnnnnnnnnnnnacccactcccactttttggccctagcattcccctgtactggagcatataaagtttgcaagtccaatgggcctctctttccagtgatggccaactaggccattcttttgatacatatgcagctagagtcaagagctctggggtactggttagttcataatgttgttccacctatagggttgcagatccctttagctccttgggttagctcctccattgggggccctgtgatccatccaatagctaactgtgagcatccacttctgtgtttgctaggccccctatagtctcacaagagacagctctatctgggttctttcagcaaaatcttgctagtgtgtgcaatggtgtcagcatttggaagctgattatgggatggatccctggatatggcagtctctagatggtccatcctttcatcacagctcgaaacattctctctgtaactccttccatgggtgttttgttcccaagtctaagatgaggcaaagtgtccacactttggtcatcattcttcttgagattcgtgcctttagcaaattatatcttatatcttgggtatcctaagtttctgggttaatatccacctatcagtgagtacatattgtgtgcgttcacttgtgattgggttacctgactcaagatgatgccctccaggtccatccatttggctaagaatttcataaattcattctttttaatagctgagtagtactccattgtgtaaatgtaccacattttctgtatccattcctctatcgaggggcatctgggttatttacagcttttggctattataaataaggctgctatgaacatagtggaacatgtgtccttcttaccggttgggacctcttctggatatatgcccaggagaggtattgctggatcctccggtagtactatgtccaattttctgaggaaccgccagactgatttccagagtggttgtacaagcctgcactcccaccaacaatggaggagtgttcctctttctccacatccacgccagcatctgctgtcacctgaatttttgatcttagccattctgactggtgtgaggtggaatctcagggttgctttgatttgcatttccctgatgattaaggatgttgaacattttttcaggtgtttctctgacattcggtattcctcaggtgagatttctttgttcagctctgagccccattttttaatggggttatttgatttttctggagcccaccttcttgagttccttatatatattggatattagtcccctatctgatttaggataggtaaagatcctttcccaatctgttggtggtctttttgtgttattgacggtgtcttttgccttgcagaaactttgcaacattatgaggtcccatttatcgattctcgatcttcctgcacaagccattgctgttctattgagcaactttccccctgtacccatatctttgaggctttcccctactttctcctctataagtttcagtgtctctggttttatgtggagttccttattccacttagatttgaccttagtacaaggagataggaatggatcaattctcattcttctacatgataaccaccagttgtgccagcaccatttgttgaaaatgctgtcttttttccactgtatggttttaactcccttgtcaaagatcaagtgaccataggtgtgtgggttcatctctgggtcttcaattctattccattggtctgcttgtctgtcgctatactagtgccatgcagtttttatcacaattgctctgtagtacagctttaggtcaggcatggtgattccaccagaggttcttttcccttgagaagagtttttgctatcctaggttttttgttattccagatgaatttccagattgctctttctaattcgttgaagaattgagttggaattttgatggggattacattgaatctgtagattgcttttggcaagatagccatttttacaatgtcgatcctgccaatccatgagcatgggagatctttccatcttctgagatcttctttaatttctctcttcagagacttgaagttcttatcatacagatcttcacttccttagttagagtcatgccaaggtattttatattatttgtgactattgagaagggtgttgtttccctaatttctttctcagcctgtttatcctttgtgtacagaaaggccattgacttgtttgagttaattttatatccagctacttcattgaagctgttcatcaggcttaggagttctctggtggaatttttagggtcacttatatatactatcatatcatctgcaaaaagtgatattttgacttcttcctttccaatttgtatccccttgatgtccttgtgttgtcaaattgctctggctaggacttcaagtacaatgttgaataggtaaggagagagtggacagccttgtctagtccctgattttagtgggattgcttccagcttctcaccatttactttgatgttgtctactggtttgctgtagattgcttttatcatgtttaggcatgggccttgaattgctgatcttttcaagacttttatcatgaatgggtgttggattttgtcaaatgctttctccgcatctaaatgagatgatcatgtggtttttgtctttgagtttgtttatacactggattatgttgatggatttccaaatattgaaccatccctgcatccctgggatgaaacctacttggtcaggatggatgattgttttgatgtgttcttggattcagttagtgagaactttattgaggatttttgcatcgatattcataagggaaattggtctgaagttctttatctttgttgggtctttttgtggtttaggtaccagagtaattgtggcttcatagaatgagttgggtagaatacctctgtttctattttgtggaatagtttgtgaagaactgtgattagatcttctttgaaggtctgatagaattcttcactaaacccatctggtcctgggctttttttggtttggagactattaattactgcttctatttctttaggggatataggactgttgagatcattaacctgatcttgatttagctttggtacctggtatctgtctagaaacttgtccatttcatccaggttctccagttttgttgagtatagccttttgtagaaggatctgatggtgttttggatttcttcaggatctgttgttatgtctcccttttcatttctgattttgttaagtagaatgcttttcctgtgccctttagtgagtctggctagggcttatctatcttgttgatttttctcaaagaaccagttccttgtttggttgattctttgaatagttcttcttgtttccacttggttgattttgcccctgactttgattattttctgctgtctactcctttgggtgaatttgcttccttttcttctagagcttttaggtgtgttgtcaagctgctaatgtatgctctctctagtttctttttggaggcactaagagctatgagttttcctcttagaaatgctttcattgtgtcccatacatttgggtctgttgtggcttcattttcattaaactctaaaaagtccttaatttcttttttccttccttgacccaaatatcattgagaagagtgttgttcagtttccacgtgaatgttggctttctattttttattttgttattgaagatcagccttagttcatggtggtctaataggatgcctgggaaaatttcaatatttttgtatatgttgaagcttgttttgtgaccgattatgtggtcaattttggaaaaggtaccatgaggtgctgagaagaaggtatattcttttgttttaggataaaatattctgtagatatctgtcagatccatttgtttcataacttctgttagttttactctgtccctgtttagtttctgtttccatgatctgtccattggtgaaagtggtgtgttgaagtctcccactattattgtgtgaggtgcaatgtgtgctttgagatttactaaagtgtctttaatgaatgtgactgccctttatttggagcatagatattcaggattgagagttcctcttggaggattttacctttgatgagtatgaagtacctctccttgtctttttttatgactttgggttgaaagttcattttattagatattagaatggctactccagcttgtttcttcatgccatttgcttggaaaattgttttccagcctttcattctgaggtagtgttcatctttttctctgagatgaatttcctgtaagcagcaaaatgttgggtcttgtttgtgtagccagtttgttagtctatgtctttttattggggagttgagcccattgatattaagagatattaagggaagttaactgttgctttttgtcatttttgttgttaaagttggtgttttgttcttgtggctgtcttcttttaagtttgttgagggattacattcttgctttttctaggatgtggtttttgtccttgtattggtttttttctgttattatcctttgaagggctggattcaggaaagataatgtttaaatttggttttgttgtggaatactttggtttctccatctatggtaattgagagtttggctgggtatagtagcctgggctggaatttgtgttctcttagtgtctgtataacatctgtccagggtcttctggctttcatagtctctggtgaaaaatctggtgtaattctgataggcttgcctttatatgttacttgacctttttcccttactgcttttagtattctatctttatttagtgcatttgttgttctgattattatgtgtcgggaggaatttcttttctggtccagtctatttggagttctgtaggcttcttgtatgttcatgggcatctctttctttaggttttggaagttttccgctataattttgttgaagatatttgccggtcctttgagttgaaaatcttcattctcatctactcctattatctgtaggtttggtcttctcattgtgtcctggatttcctggatgttttgagttagaatctttttgcattttccattttctttgattgttgtgccaatgttctctatggaatcttctgcacctgagattctctcttccatctcttgtattctgttgctgatgctcgcatctatggttccagatttctttcctagggtttctatctccagcgttgcctcactctgtgttttctttattgtgtctacttccctttttatgtcttggatggttttattcaattccatcacctgtttggtcgtgttttcctgcaattctttaagggatttttgtgcttcttctttaaagtcttctacctgtttagcagtgttctcctgtatttctttaagtgaggtattaaagttcttcttgatgtcctctaccatcatcatgagatatgcttttagatccgggtctagcttttcaggtatgttgggttgccctggactgggctaagtgggaattctgcgttctgatgatgttgagtggtcctggtttctgttagtaagattcttacgtttacctttcgccatctggtaatctctagatttagttgttataattgtctctgtttagagattgttcctctggtgattctgttaccctctatcagcagacctgggagactagctctttcctctgagtttcagtggtcagagcactctctgcaggcaagctctcctcttacagggaaggtgcacagctatctggacctcacttctggcagaagatcaaggcccaaaacaggacctttcccagaagctgtgttgctttggcttgtcacagaagctgttagcttctgtgtgcacactctcacctgtgcagacacttttcagaggagtaccggaaccaagatggctcctactgatcctgaggcaaaggcctcctgggctgggcagacacctgtcctctggccgggaaggtggtcggatatctggagcccgaaaagggcgctgcctcagaacttctgttgctcccgcctgacccagaacctgtcagcttctatgtgcacattctcacctgtgcagactacttttcggcggagtccaggaaccaagatggctcccgccgatcctgaggccactgaaccatttctaatgtaattcacaaatacaggctgtcatatagttccttattacaatgcctttacaatcccttataatgtgtattaatgtcattaagaaggagatcaagagccaggcagtggttggcacatgcctttaattccagaactcaggaggcagaggggcagaggggcagaggggcagaggggcagaggggcagagaggggcagagagggaggcagagagggaggcagagagaggggcagagagaggggcagagagaggggcagagagaggggcagagagaggggcagagagggggcagagagaggggcagagaggcagagtggcagagaggcagaggtaggcggatctcagagtttgaggccaacttggtctacagaatgagtttcaggacagtcagagctacacagggaaaccctatctcaaaaatcccaaaataaataagaaaagatttaagcagaatttttgctgtttccctcaaaagtagacacaaaagtagatatattaatctcgttgatattctatatattctatgtgtgtgaatatattctgtgttctatgttctatattctataaatattacattatatataatatagcacacacgcatatgtataattgcagaatttcactttgtagccctggttgtcctggaacttgctgccaggctgacctcaaacttataaagttccatttgctcctgtcttcagagtgctgaagttaaaggcatataccatgtctcctgggaaaaacaaaaaacaaaaacaaaaacaaaatccttgctcctgatatttgatgaaaatattcttaaacaccctagatttctaaagagttttacacattgctcagtgtctagaaggagctgctgtgctggcccgagtgaaaagaaagggttggtgatagccgtacagaactatgagactcaagaagtaaaagctctcaagtgaattggtttgggttttgttgttattactcttcattttggtgacagttcattaatgattgctgcacagcaaaattgtgttccctaactgccttgtgtattctcacagtgtgtcttgtgtacactctccaatgctttgaagataagtgtattgccatattctctcaagaactccattgagatggtctgtgtggcagaagccagtggattaatttcctggtaaaagaggttttcctttcatctgagggttcctacaaaaggttctttctgaggtggactcttccacaacaaaattccagatgttgagagcctgctactctgataggcttgattgacagcttggttccttatccatataatggccagtgtgtagacatgaagtagttttatgtttttttttcactaaatacactgacccacccacctcactcaaagatctttcactgtagaaatttccagttggttttggttattcatacagttttgtctttgaaggcacatgttctgctcagacctcttctccacacagcatagatccccacactgcttttgtcattcaaaggcatatgatctagcatggggacaaggacaaggtgaagagacagagtgcagaggagaagagtagggattggtaggagtggggtatgaagagaaagagcacccctgaggtggctcactaccaaactgactgttccttttgcaggtgggtcataagacagacaacctcttatcaaggatgttcagggatttccatctccttaagtacccattaatcttttatggggaagctttctaagagatttcttctatttgaggtattacagtttattattatcatgttactgctgttcagtagcacactcctgcctttctgcaatgcactatctgtcaaactttccctacacctccctcctcctctggttactcagcttctggtagtcaccagtctaatctcgacttctatgaagccaacagttttaagattccttacatgaatgaggacattctgtgttcctgggcctggtgtgttgtcacaaacaaccaggtcttggttcagccatgtatgtgtctggttgtttgcctttcttggctatgtaatttgtgttggagtggagatgtctgttcaacaggctgatttcagtattggatgtgtacttagtgaggtggctgaattcttctattttaaacacttcccagggacctcctgactgttttccataatgggagtacaaatttacattctcagtgtgcaagagacctctgggtttttctctgtgattactcttgcctgttacttgtacactttcctgctttctcactgtgtgttactgtctcttcaagtttcctgtaggaaatagctagtgaagacctattctcacagcttctatttgcctggggatggctttatccctccttctttctgaagggagagtttctcttggcaggtttttgctttagtgtttgagactcttactccactgtctcttgactctgcctgactttgctgagaagccagcatctggtgaatcaggctcctgatttcctcccctcccctgccctgagaatgtgttttattattgctttttcagagcttgacctgaggtgtggggtacacttaagttcaacagacctggtgacttctttatgtgtgtctactcttaataaactttgtactccactgtaaatatcaagttttcctttaaaccctagtagcccaaacatttgctcttttcacacaggcccatggttcttataaattttcttaattcctcttcattctttttgctttcgctccagctgtagtttgaaataactttccttctcactatctaatgtttctctagtgaggactagctgctcttgataccttttaccacatttaaaatttggacagttctattttcaactagattttagtgtgagtttttttttgttgttgtttatttagtattttttgatattttcttcatttacatttcaaatgctatcctgaatgtcctctttaccctcctcctgccctgctccccaacccacccactcctgcttcctggccctggcgttctcctgtactggggcatataatcttttcaagactaaggggcctctccacccattgatggccaacgaggccagtctcttttatgtatgcaactagagacacaagctctggtgtgtgtgggggggtgctggttagttcatattgttgtccttctatagggttgcagactcctttagctccttgggtactttctctagctccttcattgagggccctatgttccatccaatagatgactgtgagcatccacttctgtatttgccaggcactggtatagcctcacaagagagaactatatcagggtcctgtcagcaaaatcttgctggcatatgcaatagtgtctgggtttggtggttgtttattggatggatctccgggtgggacagtctctggatgatccttctttctatctcagctctgtactttgtctctgtaactccttccatgggtattttgttccccattctaataaggaacaaagtagctatactttggtcttccttcttcttgagtttcatgtattttgcaaattttatcttgggtattctaagtttctgggctaatatccgcttatcagtgagtgcatatcatgtgtgttcttttgtgattgggttacctcactcaggatgatatcctccagatgcatccatatgcctaagaatttcataagtttgtcatttttaataactgtgtagtactccattgtgtaaatgtaccacatttttttgtatccgtttctctgttgagagacatctgagttctttccagcttttgtttggtttggtttggtttggtttggttttcctaaaatctactgtgtctgttcagaatagtctctgctctagactttcctagaatattcttgcttcacccaggcatttgcaaggtcacaagaagctttgggcttctccaaatctttttcatgcaaagacagcatacacacacacacacacacacacacacacacacacacacacagagagagagagagagagagagagagagagagaacacaaatagaaaacaggagggatcaggaggagttttattggcacagttttacaagccagacacaggggaagccagagaatgaggagccagaagattacaacagattatcagagttggtttgatgtcaagcagagcaattccatcagaaacagagaaaagccagtttgaatcagtcagcttggagaggattttgtgccagaacagctgagtcaaaccaggcagccagagctcagaaagagctagtaagggtgagcttattcagcagcgagcctctgagacaactacatctgatgaataaaagctacttttacagtaaataagtaccagtttcaacttagagtcagtctctgacagaggaagtcagcctgctctttgtcggttaatcttggcactagttttttctttatagttgtgaaagtcttagaggacaaaagactatttttcttatattcaaaattcagacatttcgtgtggccaccttcaccagttcctctactacagcttctgggtaactgtaacttcatagcagtgactgttccagtgtgtgcttctaggtcacagtgtctttccttaaacattgtagctcaacctctacagacttaatttttttctctgcagcttcatcagtgctcctgttttaaaagaagtctgtggtcatatatatctttctttccagaccattggaacattcttcatttgagctataaagctgttattttcctgttcatgtgtccatggtggtggtacttttaaccccctccccctgaactttgcattcacagcattattaactgtttgtcacagtgatcttggctctgagcctgtcctggctttcagcagaccttccttacatccctggtttttgattcaaagtaggagacatcaacttaatttctcttaaacagttggacaccatggtaagtttattgattggccttgtttcaacactgctgtgtgtgaggggcaggggagccagattgattaagtttcggttttatgtggtgtgagtcatgctgctcaccatgtcaggatagtaacaccagagatcattgatctcagatctccacagcatgggtaataataaaggcttgacacattgtgagaactaccaaaacatgacaccggttccataagcgagctcatgctactggaaaatggcagggatgagctgcttagcacaggtcacctcagaccattcattcccagcatcttccagtgtaagaaggatgtgagagaatgtgatgagtgtggagctcttcaatcatttcctctgttatctgttttgtgctcctcactgttcatggagtttgggatctttgttatgttcactgctgttaccaagccccaagaacgggctgacacagagctgggcctttgagagacagctgttgaataaacaggactgatcctggaattattactagttctaaagatttctgagtttattctgaaaaatctctgaaaattcaatttcaggtaaatggtgcctggaatctatattaatattctgggtcttaaaattttccagttcctgacagaaccggagtctcagagttggaagagccttatgggtttgtagtcaacctgccttactactctgagtgctagaggtttaatgaggtccttaccagttctcttttgtctgtggatgtaagatgaggaaggtaattcctccagaagcttactaagtgttggagctaaattccattacgcatatacatcttatctttcctgtaaatctcctggcagtggggatgagaaatctttctccattagccaaaatgaaaacttcaggctctgtaggtctggacatgtcagttaattttatcagtcctcatttgggcttttcagattggtgatggttatgaacaacacacacacacacacacacacacacacacacactataaaaccaaaaattacaatatatatataatatatgttgtcttagggttttactgctgtgaacagacaccatgaccaaggcaagtcttataaaaaacagcatttaattggggctggcttacaggttcagaggttcagtccattatcatcaaggtgggagcatggcagtatccaggcaggcatggcacaggaggagctgagagttctatgtcttcatctaaaggctgctagtgaaagactgacttccaggcaacacccacagtgacacacccattccaaccaggtcacacctattccaacaaggccaaccttcagatgatgccactccaaggatatacaagccatcacatatgtatacatatatcttacatataatatacataaccaaaaattataatatacataaaggattctaggaagcctcaataaaatttaaatttctagtagcatctattaaagcaccttgcaatcatatctaaactaatcattggcagccaggcagagtgtagagggtccaatgttctttcatttctgtctttatgccaactttgagaaagagctgtcttccccattttaaagaatagagattaaacacatgatacatgatagacaggtacaagggagtagagggcaggatagaagtcagcatgtctcaccaggggcctttgctttgtccaagcctgagtctgtctctgtgtgagttttcttccaggcatgtaaggataattttctgtggttttagtccatatgcaaatgcatacagaacatttggaagtttatatttggatcagagccattgcgataacctggctaagtagaattgacctcaaaaacttaaaacatctttagcatatttaattaaaaacatgtgttgcctcaaatactgaagttttattttggatttttgactttcaaatttaagatgttcaaccagtaaggtatatgcaaatatttcacaacccacacagctttgaaatacaaagcatatctgttctaggcatttcagattggagatggtcagcttattggctgtacataaatggttttgctttttcgtttttgtttatggaggggagcttatttgttgctgatcagagactatatttactgaataaaacctagttattctaaaagttgaacatcataactttcaaatatcagacctaaaataatcaaattatgttaagctaccagagttcaaaccaaacaattattgttaatttgtgaaaggaaaaatttacttttattagcagtatttttttttcaaacaagagagaaacattttcttccagatagtggtgctcaaagaacactattctggattttagatttagattcataacagtactagttcacacagtatgactggcttgcacatttaaaaataatgtgctgagtttgttagtatgtgaatgtgtggggagagtgaaaggaagagggagacagagatggagacagagacaaaggagggagagggggagtattggggagtcttaaatatctatttgaaacacaaaatcttctgaaaattgcaatgaaacgcctttaaaaattggagattctttaatctctcattgcacatgttccatacttttgttttattgatgaaacgggtattaatgatagttatttttctttgctaaattattgtgtttctgtaacatcatcaaattcaacacaaagcaaaccatgctgccttttcagcagcgttctaattactaaacaaaagccctgaatagtggcataagagaggttgtatgatggaacagaggaggcagaagtgcaaggcccatgaggaactcctggaaagctgcacagtaaatttgaggccagaaataaaaaaaagaagaaaagtcaaaatcacactaacaaaagacatgtgagactcttggaaagaaagagagggcacagaaacagctgaacagatggggacaggatccttctggtttccatctactccaggaattaaggctatcctacagccctctatacccaaattccacccaggtctctctaggagtgctgacacacctaagatcacaggctcacagggccacaggagggacaagcttcagtaagagacagcaagaccaactaacacccaaggtaaccagatggtgagaggcaagtttgagaatctaggcaacagaaaccaaggatacttggcattattagaactcagttcttctaccacagcaagtcctggataccacaacacatgggaaaagtaagatacgaattttatatcacatctcatgatgatgatagatgactttaagaaggacataaataactcccttaaagaaatacagaagaacacaagtaaacaggtagaaacccttaaagaggaaacataaaaatcccttaaagaattattggaaaacacaaccaaacaagtgatggaattgaacaaaaccatccaggttctaaaaatggaaatagaaacaataaagaaatcataaagggagacaactctggagatagaaaacccagaaaagagatcaggagtcatagatacaagcatcaccaacagaatacaagagatagaagaatttcaggtacagaagataccttagaaaacattgacagaacagtcaaagaaaatgcaaaatgcaaaaagctcctaatccaaaacatccaggaaatccaggacaccatgagaagaccaaacctaaggataacaggtagagaagcgagtgaagattcccaacttaaagggccagtaaatatcttcaacaaaattatagaagaaaacttccctaacctaaagaacaagatgcccataaacatataagaagcttaccaaactccaaatagcctggaccagaaaataaattcttctcatcacataataatcaaaacataaaattcacaaaacaaagagtattaaaagcactaaggggaaaaggtcaagtaacatataaaggcagacctatcagaattacaccagacttcttaacagagaatatgaaaactagaagatcctgattcagatgtcatacagaccctaaaggaacacaaatgccaacccagagtactatacccagcaaaactccaaattaccatagagaaaccaagatattccatgacaaaaccaaatttatacaatatcttttcaccaatcatgccctacaaaggataatagatggaaaactccaacacaaggagggtaactataccttagataaaacaagaaagtaatcttctatcaacaaatctacaagaagatagccatacacacattattccatctctaacaacaaaaataacaggaagcaacagtcacttgtccttaatatctctaaacgtcagtggactcaattcccaaataaaaagacatagactaacagactggatatttaaataggacccagcattttgctgcatacaggaaatgtacctcagtgacaaagacaaacaatacactcctccattgttggtaggattgcaagcttgtacaaccagtatggcagttcctcagaaaactggacgtaatactaaaaggaagatccagcaatacctctcctgggcatatacacagatgatgttccaactggtaataaggacacatgctctgctattttcatagaagccttatttataatagccagaagctggaaaaacccagatgtccctcaacagaggaatagatacagaaaatgtgatacatttacacaatggagtcctactcagcaattaaaaagaatgaattcatgaaattcttaggcaaatggatgcatctgagggatatcatcctgagtgaagtaacccaatcacaaaagaactcacatgatatgaactcactgataagtggatattaacccagaaacttagaataaccaagatacaatttgcaaaacaagaaaatcaagaagaaggaagatcaatgtgtggctacttcattcctcctagaatagggaacaaaatatccgtggtaggagttacagagacaaagtttggagctaagaggaaagactggaccatccagagactatctcacccagggatccatcccataatcagccaccaaacacagatactattgcacatgccagccagattttgttgaaaggaccctgatatagctttctcttgtgaggctatgacagtgccaagcaaatacagtagtgcatgcttacagtcatctattggatggaacacagggcccccaatggaggagctagagaaaatacccaaggagctgaaggggtctgcaaccctacaggtggaacaatatgaactaaccagtacccccagagctcgtgtctctagctgcatatgtagcagaagatggcctactctaccatcactgggaagagaggcccttggtcttgcaaactttatatgccctagtacaggggaacaccagggccaagaagtgggagtgtattattatgggagcatgttggaggggggagggtataggggacttttgggatagcatttgaaatgtaaatgaagaaaatatttaataaacaattgaaaaaaatttcaaggtcaatacttaaacatagtaaaaaacaagatacagcaaaccagtagcgaacatcaagctaaatggagaagaaattgaagcaatcccactaaaatcaggaactagacaaggttgcccacactctccctacctattcaatatagtgctcaaagtcctagccagagcaattagaaaacaaagggaggtctaagggatacaaattggaaaggaagaagtcaaaaatttcactgtttgcagatatgataatatatttaagtgaacccaaaaattctaccagagaactcttaaacctgataaacaacttcaacaaaatgactggatataaaattcactcaaaccaataggtagccttcctatactcaaaggataaacagactaagaaagaaattagggtaataacactcttcacaatagtcacaaataatataaaataccttggtgtgacactaaccaagcaagtaaaagttttttatgacaagaacttcaagtatctgaagaaaagaaattgaagatctcagaagatggaaagatctcccatgctcatggattggcaggattaatatagtaaaaatggccatcctgccaaaagcagtctacagatacaatgaatccccaccaaaattccaaatcaattcttcatagagttagaaagagcaatttgcaaattcatttggaataacaaaaacccatgagaatgaaaacttttcttaacactagaagaacttttggggcaatcaccatccctgatattaagcagtactgataaaaaccgcacggtattgatacagagacagacaggtagatcaaaggagtagaattgaagatccagaaatgaacccacacacctatggtcacttgatctttgacaaaggagctaaaaccatccagcgggaaaaaaaggcagcctttctaacaaatggtactggttcaactgaaggtcagcatgtagaagactgcagattgatccatttttatctcctggtacaaagctcaagtccaagtggatcacaaaaccagatacactgaaactaacagaagagaaagtggggaagagcctcaaacacatgagcaggggaaaatttcataaacagaacatgactggtttatgctctatgattaacaattgagaaatgggacttcataaaattgcaatgctttggtaagtcaaaggacactgtcagtaggacaaaatgttaaccaacaaattgggaaaaaattttttttgccaatcctatatccaatagagggctaatgtccaatatatacaaataactcaagaagttagactccagagaatcaaccctattaaaaatggggtacagagctaaacagagaattctaaactgaggagtaccaaatggctgagaagcacctaaataagtattcaacatccttagtcatcagagaaatgcaaatcaaaacaaccctgagatttcacctcacaccagtcagaatggctaagatcaaaaactcaggtgacagcagatgctggtgaggatgtggagaaagaggaacacttctccattgctgttgggattgcaagttggtacaatccctctgaaaatcagtcagaaaattggacatagttctacttgaaaacccagcaataccactcctgggcatatacccaaaagatgctccaacatgtaataaggacacatggtcctctatgttcatagcagcctaatttataatagacagaagcttgaaagaacccagatgtccttcaatataggaatgaatacataaaaatgtggcatattcacacaatggagtactataaaaaaatgatgacttcatgaaattcttaggcaaatgcatggaattagaaaataccatcctgagtgaggtaacccaatctcaaaagtacccacatggtatgcagtcagtgataagtagatattagctcaaaagctcagaatacccaagattcaattcagactacatgaagctcaagaagaagaatgaccaaagtgtgggtgctttagtccttcttagaagggggaacaaaatactcaagggaggaaatacagagacaaagtgtagagcagagactgacagaaaggccatccagagactgccacacctgagcacccatcctttatatagacaccaaatccagacaccattgcaaatgccaagaagttcatgctgaaaggagcctgatatagtcatctcctgagcagctctgcaaaattctgataaatacagaggtcgatactcagagtctaccattggactgagcatgggatccccaatggaagagttagaagtaggatggaaggagctgagggggtttgcaaccttataggaagaacaaaaatatcaaccaaccaaagactacacatggagggacctatggctccagctgcatatgtagcagaggatggccttgttggacatcaatgagaggagaggctcttggtgctgtgaatgcttgatgccccagtgtaggggaatgtcaggttggggaggcgagagtgagtgggtggatgggggagcaccctcatctatgaggagcagggagagggaggatggcatagggggttttcagagtggaaaccaggaaaagggataagattgaaatgtaaataagtaaaatatccaataaaaaagagagatttaactttctgagccccactagaaagagagaaaagcaaagaaagcgttttctttctgctggagctggcaatggaaaccagggccctgcatgtgctgaaggatgattcagccctatctctagtcctagaataaaattcacacgtgaaacaattttcaactgatattttggttgaaatataactttcagacatggttgagtacaattgaaaaaataagttattagttaatattaaaattcagtgtttactctttaaattggcatcctcttgtttacattccatgtaaccttcctagaatgtcctattacgttgctatttacagtgggaagttgggaacactggggcttgaggtgttcccaacatgactgttatgtgaaagatcatggcaggcatagaatattcaagactaccattttaaaagttcccataatctttgttctattaaatgaaaaatttcaactataatgtaaatagaaataaaaattaataactactattttgaattgcatgctgcactgggtattttttttctcaactttatacaaactaaaggctcctgagaagagggaacctccactgagcaattgcctttatcagactggcctgtgtgcatgattgtggggtattgaataatgattgatgtgggagggtccagcccactgtgggcaatgacacacacacacacacacacacacacacacacacacacacacacacgtacagtcacacacagtaacttggtcctgagttgtataaaatccagactctgcaagccttgaggaatagctctcttccgtggtctcaggttcagttcctgtgttcaggtttcagcttgggctccttccttggttccctcagtgatgggctgtgacctggagacgttagatgaacaacaccctttcctccatgaattgcttttgatcatagtgtttatcccagcgacagaaatcaaactgagacagtgctgtttgcttactgtttttaggataagcaagtcctggcagtcgtgactatcgagcggatgctggagaggctgaaaaagtccaacgaactcttggagctcattcttaaagggctgaacgagtacttggaaaagaagcgcctcttcttccccaggttcttcttcctgtccaacgatgagctcctcgagatcctgtctgagaccaaggatcccacccggtgagtgcgtccacacccagaggctcggctgcactcatctggtcacatttcatgtttggaataagatagaacgtaaatagtgatgaacagctagctacatttatatgaacaagaatattctaagattatttgcaattataggttatcagttattgaaaatatacattgtgtttctgaataattatttctgaagggcatggaccttggagtggaatttctattttactgcatatttttttaagattttgagggtccacctctcctcttcaccatatttatcttttcatccatattcaaagtacatcaataaaagccaggcattgtggtgctttatggcttctatggtctcagcggtgggccattctcaaatatgtcacaaatagggatgaggttgacagctagcctgtttaggtgggtgtagtttacttcttacttttataacaagcacatgctgacagttgtagcttttgagagaaagctggagagcctgaaggttggctttagtggccttttcactctgctttgccccacctgcttccttgcagctggcctgtaactggggctgccttccccttcatgttccatgggtctcagctcagtgcttctcaacctgtgagtcaggactcttttggggtatttatattttaaaagttttacatttttatcagttaagtactttacaaattattttgcagtatattatatatatcaatataataaaattaattagatatttagattatgattcatagtggtagcaaagtaagaattatgaagtaacaaaggaaataattttatggttggggtcaccacagcaccaggaactgtattaaaaggtagcagcattaggaaacttaagaaccactggctttaacacatcccttcatcatccactgaccttttcatctgtctcctggaggtcccggagctcacatctgccactcagggagaccactcactgactgactcatccactctgctgaaaaaggcatacttccgacagcgagcctgctctggccacttctccatgaggcttgtctctgtcttgttttccttcttcatatttgttgtcacaggcatgggctctaatatgtgtgctgactgcttctccttagcagaacaagctcccacagctgcaaaggatttcactaggttttgttgttgtttttaaattgcacattcctcaatccttgggaagagagctgacctaaaacaggtagtgaataaatattttattgaataaataagtttattgtatatcttgtacacacaggaaaagtcacagagtccagacagataagttcaggctcacatttccatgtgagttttattcactacttctctttgctcatttaaagatggataaagctgaaaatgtacccaagtgaggtgttagtcacagtctgtattatagtggctagaacgatggtgggcataccagacctgttgacttacgaagatgtaaagtacttaggtactaaagcctagcctgtgagtttcaacactgttgaagatcccacttgaaatggctatgcacattggaagactggctcacagtgctggaagacctgctagagtgctgtacctaaaactgcttggttctttgtgctcctatttagcacctctcagctcattgaattgacaacaaagatatgcctactgctttgtacccatttaaatgttaaaggaagataagtatacaaagaaccctgacatgtgaggaactgtattactttgatcaattgtttaattttttttccaacagagtgcagcctcacctcaagaaatgctttgaaggaattgcaaaggtcgaatttacagaaacattggatattacacatatgaagagtagtgagggagaagtcgtggagcttgtagataccatttcaacagccaaagccaggggccaggtggagaagtggttggttgagttagagaggactatgattaagtccattcacaaggtaattggttatatttattatttttaggaaaaaataatgcattactaatgttgctacaaatatgtcattgataagtagactaataattaggtagtgatttataagacataaattactattctaagtctaattggtaattgttgtattagttccttcttgctgtgacaaaatgtttgacaaaggcagtttaaaggctttgttttgggtttgcagttgaaagggacacagtctatcacaacatgggagacagagaagtgaatgctggcattcactttactttctcatttttatttataatttacttatgaaaacttactgtgtgggacagtgctgcccacattcagggtgggtcttccctcctcagttagacttgtctggaaacactgacagacatgagcagagaggattctaaattgagtcaaattcacttagttattagcataaccattacagataacttagaggaaatgtgtggtttaatctgaaatgattattttgcaatgactcatttaaggtggaacaaaatggcatctctgccagtggcactcaggctgtacagcatgtgtgcctgattgtgtacagctgcttgcaggtgctttcatcgtgaggagacatgctgttgcttatataattttagtcccaccttggaagcatctttgtgtacttcacatacttggtgcatgtgaatcttaatgctgtgtgtgtatgtggaattcccaccaggatgtgaccgcctgtggccatgctaaccgggtacttctgaaaggcaggctggggctgaaagagactagacagtgagaaaagaaagaggccaagacaaatttttctctgatccaggcccccgagtttactgagactgtgcttataaaggggggaggctcatcccccccaccaatccattcttggtgccaggagccagccagtaggagacttgcaggatagggtgtgtctccagaatgtctcaagggtctctcagcaggtagcagagtctcagagaagagcagctctagttgacataacaatagagccatctaaatcagaaggctacaccccaggtgatctcattttcagtggcagcaaagtctgaatcagcctgcttcaaggctaggacaccagaaaatcacacatactttccctgtctataacaacctcatgtttttcacatctcacaaagcactgttatcacaattattgataattattttttgtgttatgccaataagtggaaaatgagtacttaaattcattttactattgtatgggcttagttatcaagttttttagtataagaatgaaaactattaataatcagggaacatgcagggaatataactagctaatgtcacattaatttttttcatttcctcctatacactattggataagttaactcaaacccaggtgtttcatgtcactatgtagtataatgttataatcctaaacaaatcttttagtaaatttatgcaagtttgttgcaggatatagggtcactctttgaaccctgagattgtgttatttactggaaaaagttgattttagttgtgttgtagctcagccttagcacacacatttaatccaagagctttctgcttgaatattgtaaacaggcttaagtaaagtcaaccataggtcaagaggcagagcaagcaaccagttgacaggaagtaaacataaattattaagaaaaaacagagtaagagagagccggaggataatagagagacgcacaggaagtagaagagaaggactcaatttgaagggttgttttgttttcgagatggttttggagagcatttgtgctgtgactcaggagcactgttgaggagaaaggtcagtggggtgctttctctgcctctctgagctagcagaatttcacctcagcatatgaatcctgagtcttcattggttaaaccaacaattgatattttgtttaaaaataacaaaaaaatcatttagacttagacctgtccctcttcaccccttttctgagttacaaatcagtcaatgtccctttggatatgactggcttcactgattgagtcattttttttctgataagtttttttattagatattttatttacatttcaaatgttatccccttttctagtttcacctccaaaaatcccctattccctccctcttctccctgctcaccaacccacccactccagcttcctggctctggcattcccttatactggggcatagaactttcacaggaccaagggcctctcctcccattgatgatctattaggccgtcctcatctacatatgcagctagagccatgagtcccaccatgtgttttctttgattggtggtttagtcccagggagctctgggtgtactagttagttcatattgttgttcctcctatggggctgcaaactccttcagttccttgggacctttctctagctccttcattggggaccctgtgctatgtccaatggatggctgtcagcatctacttctgtatttgtcaggcattggcagagcctctcaggagacagctatttcaggctcctgtcagcaagctcttggcatccacaatagtgtctggtttgggtggttgtttatgggatagatccccaggtggggcagtctctggattgtcattccttcagtctctgctctgaactttgtctctgtaattccttccatgggtgttttgttctctcttctaagaaggatagacgtgtcaacactacgtgtgaccacttggccagggagtatgagttttacttgggaagtattgattttacacacacacacacacacacacacacacacacacacacacacacacacacacacatacacacacacacacacacattatatgacttaaatgagcttagtagagcttgagtactgtagaaaatttatataactgtgtttctctttaccaaactgtgtagcatctgtatatctatttttgtttttgttttgttgttgttgttgttgttgttgtttttcaagacagggtttctctgtatagccctggctgtcctggaactcactttgtagaccaggctggcctcaaactcagaaatccacctgcctctgcctcccaagtgctgggattaaaggcgtgcgccaccaccacccggcatctgtatatcttaaatttttatttcattctttctgtccccacagtgtccttctagaacacatcctaactacctctactgtgcttttctagcctttctttcattattttttttaatttttttaatttcgaagttataattttcattttccccctttcttcctccagggtctctcatttacctgctatatacaccttgttctcttccaaacctaatatgctttacaaaatttttttttctaatctttaattttccttaattgctgtagtgggtgtgtgcacacatgcctaaatacataaatacagtctgctcagtctgtgtgatgtttctcattcatttggcattggatagccaattaatgtgcacttccctgaggaagactgcgggtcctgctctcaactgtccattgctgcatatagtcccttgtatagggttgaggctgtgggcttttctcccttacacattagtatctctgttggcttcattcttgttcaggttctatttaggtagctgtacaggtgagacttcacgtttgggaaacagcctcacagcaaacttcctgttctaccggcccttacattcattcattctgcctccgcttccacagtaatctctgagctttaagtgcagaagttgggctacagatgtattagctgggactgggctccacatctctgaattttggtcattggtggttctctgcccccatttattgaggggtaagaactacactttatacttatccataagtataaggataaacattgagagtgtagttatggattatgctggtttaataaagtgatagttttagattcacctcctctgtgattaggtttacagtaccagggatggtttctttcatgttgagagggtcttacgtcaaattagagagctgttggttactgctgatgtgtttatgccactactgcacccttagggatattgccatgctggtcattgtgatttattggccttatagctgggtagggctgcttgttgcttccctcctttggaagcttgcatgacaatttctggtccttgggggaggaagctttcaggttcgattcggcttgggtcctctgggctccaagtctgaagcgcctgatgtcctcattgtttcttccattctttagccatttgctttcttttctagtctgccctgcttgtgctttttatggtttgttaaaaatgttaccattggcagttacctcttggcattgtctttgtcctgtgagactctggctaaaccagaagtctagaatgttttaactgttcttatctatttctctgaaaactctaattttgacagccccttctgaaatttaaactctgaagtcagcatcacttctcagaggatgttactatttttaattggtatataagacagactagagtgtttcccattgatatcttgtagaaaaagtagatatatcagtccactgaaaatttgtaacaaagaacacaaattagacttgtggatttgtagccttcacttttccatgagagatctgtccatctgtcccatatgaccatcattactgtcttgagcattggatctatgtccagaaaagggagtaacacaggttgagaagttcggtaacatgggtagcagttagagaactgtgtgttctgtctgtgtgtacatgagattgtgtggagagctgatttaaccaaacaaaaatcatatgctacaaatttgatagctgtcatttcgacattacttgaatttatactttgcactaaaattgtgtatagacttatctaacacaaatgtgtctatgttatctttggctaaaactggtcatataataatttgataaataaagtttatacaaattgataatgcttgtcaaaatatatataatatgcctgatcatatgaattaacttgtatgtaaggattttaattatattctttatgtgaatctaccagttggatgagcatgttttaaaagttaagtggtatgagttgatttagtttaatagtttagctctccaatggttttcttgttctagaatgttcatttttaccatttttttttaaattaggtgattagagatgcaattgttgcctataccaaaacttcacggattagttgggtaagagattggcctggacagactgttctctgtgtatctcaaaccttttggacggtagaagtccaaatcgctatacctgaggggcaccgggtaagcttttattactcatgtttttcataacttagaaaatagttatatcaagaacacacttgccctaacatattaaatgaagactgtccatccaaaaatataccttttgctacaagccaaactgtagtcgcctgtggccacacgaaccaggttcctgagagggaggccagtgctgtatgagagagaagaaatgagaccaagacaaacttctgataaaggcccaatgtttactagcagtctgtgcttataaaggaggaaagcctgtctcctaccatgccagattgtaatgcctttgtaaattgtacagcttggttgaatttttataaattctgaatttaaatagtatttagaacaacatctggataaatctgcaacaatgttgttttagctaaaaagaaattcccctgaagacaggcaagaacttccctaggcacagtttgtaaaacaaaagccacataaacccgctgaagcttttttgctgaacccagtaatcacaattgcagagaattttctaggaaaaaacaactatcagcttcttttgccttagaactaagaagctgcagactccttttttaaaaacagtttttcagcagtagctaccctgctgtgtgtcactcctggctaaggttcagggcaacttaaatcagactccaatgtgtaaaccgactaaatcaagagatggatagctagcagataacgttttaaatgccccccccccttttcaatatggaacatagaacaacagtcattcatacaacaaaacaaaaacagacatgaattgacacgtggacatattggtgcaccaaacacagacaatacagagaaggtagagaacttaatgtaaccagatctgagagtgtctcctgtagggtccagagagaaagccaaacatctctggatttccctctgtccctgggagagttccgaaatccattttccttctctcttgatctctctctcctttattattttttttgaattttactcattttattctattttattttattttattttatttattattttaagctctactcctctcgcctgatgcagttcttgactgcggacaaatggctgttttctttttctctcccattttccactgtcaacccctagctgatatcagtgctggaccaacactgactcagtctagcctgtatccttttgcacctacagcaacaatttcaaaaagatgaagtttaaagccagagctaacatgaatacaaaatattgctcactgtgccagatacatcttcttaatcttcctatagagctctaccaagacagtattctcttagttgatccacctatactcagttcgctgttcggatgccacctgtagctgcctgcagccacacaaactgggttcctgagtgggaggccagagctagagaagaaatgagaccaagagaaatttctgatcaagcccaatgtttactagcagtctgtgcttgtaaagggggaaagtccatctcctgccatgccaggcttcttgatgctttgttgctaagttgttagccatagtctgccagagctgttagcataggtcgccaattccacaggttgtcagctatctcaggaatatctcaggaagagaggttcagcctctcagtggtagaggggtcttggagcagagcagtggcaggtgacagaagaatagaaccatctaggtcggaaggctccaccctaggtggtctcattctcagtgatagcaaggtctatcacttgaaacagcctgcttaaggctgggggaggctacaccaaattataggttttaaaagtaaaatacatagaaaaagctacattattattcaagatttctatctgaaccatttctttattcacatcatgtcagagccaagggtgcctgcttctcggtcttgttgtttgcacactgttatcctttacaaataaaaccaggaaagttatgatgttcagaaacaccaggaggatatgggataatggaacccccttctgtgccctgagtaaaactaccctgtgcagaaaaagcatccattcacttattttgactatttttattttttaatgtactgattttgaatcaatgaacattttgagttgtgcttaataccaaatattcaaacatatttgagtatatgggtttaacaatattatttggatggaacaatattatttggatggctgctattaatttaaaaaaaaaacagaatagtacttaattagactctctgagtgacgctccgtttttgagtgaagggatatttagcatttcttcattcatcacagatgctctgagtgtccacataatccaagactgtgttggacactgactcaactaggggagaggtggaatgcaacattttcagttcccccgtaaattctctttctgagctttcatttgtctttgagccttgggaactgtcagatagctaaagaaagcctctgtgacatgttttagtctgtttacactacttgagaatttaagacatgctgcaagtgagaaattacatcttttgttagaaactttaatttaaagagctatgttatcatttattttttttcctaccaatactataataatatatgtatcagagctctttttgatttttgtaaattaagtggtcagacttttttttttttaaactatcaagtccagttcatatcacctgactgcttctgggagtgaggcttgtcctggagtgtggtcggcataccagtgtcactctattgaggaagctgactctccctctgcaagcagcagtcaaatggcaataccttcccagctaggggacgactctgtggccacttccctttatccatgcagggattttgtgttccccctcatccatatagatccttgagctatatgtgtgtgtgtgtgtgtgtgtgtgtgtgtgtgtgtgtgcacgcacatgttcttgcgatctagatttcccatttagggttgaacactctgtagtctcttattctgtgcatgctgaccagttgtgggctctgtgtcaactgctgactaccacaagaagaagctacagtgatgtaggctgagaaatgtactgatctatgggtatagctataagtcattagaattcattttatttctctgtccatttagcagaataatagtagtaggttttccataaagggcctgtgacctgcctagccacaagccatgacttcactaacagtataggggttctaggtcatgtgcaggccttaatcaataagacactctttttatatttgaagaagttcaagtgagtcaacttgtaattaaccaatgaatcaactggaagctagtagttactgatccttagtttaaaatgagttttaaatatattttttgatgaggaatttgacatgactttaatgtgctgctgaaaactaagttagtgttggggtttgagagggcttcttgttctctttaggcaagcagattccagtggggaaggactgagttgcacatgtgtaagtcactccacctcatcaatatgtcacataattttctgcaggagggagaaagtggtaataggtcaaggattttcaggtagcagaatatcagggcatagagttcccatgacaacagtaagcatgtgcggtccctggatgtctctactccacgcatttaatattctctgtgctgattattctctcctaacaaatgagtggtttacattggaaaactgatgatgtggttgagtgtctgaagactctgcaagcacctagagtttcctcaagcttaaaaccatgactttttactacactaaagcactcagagagcatgctcacctcagaatccatgttttcatttccttattctataagtgatggttgtgaaatgagactgtgggagacatcacagggtctataaaataaatggaagaaatgtcagaatattgaaagtatgaatgtgattttgagttagtttattggggcaggaaggtaggacggtctaggcatgacaagaataatcaattccaggtaacacactgtggtagcttcactggctcacgataagaatgttgacaaggtataaaatgagatgaaacattatcatatcatttttccagtcagttaattaaattgtcactgatgcatacaaaatcattccaaaagtgcttagcttttggtattttggagccaaatttcagttctaacattattgttctatcacaggaaaatgcagtattctagtgcagataaacttctaagggcatgtagttagtatgtgcatccaatatgtccaaatgttatttttttatttgtgtcatgataggatgtgaagactggtggggataccagaaggtgctgaactgttctggtgagaggacaaggatgtaccttatgtgactctaggatcccaagctgtctttactagggtggcttctaaatacactgaagttcactaattgctccaagtatttaaacactcatgtggctaaacatggatgaaacaaaagttaatttttcattgcttaagaagcaaattagcagaaaatcattcatgtaaatgatagaaatgaagtggcatttaatcctctaagggcctgaataaagagctttcacaaaagtacaaattaaagagataaaatcttcaaggaagatgtcttgtcccagcttggttctctaaacttcacatccttggaagctgttcttccttccttccttccttccttccttccttccttccttccttccttccttccttccttcctttttctctctctctcttgctagcaaagcataaaatatttatctttttttttccttatgaagagtaactttggcatgctctgctttagggtcaagtgaatctcagaaagtattgaacaaggccaagtacacctgaaatgctagtcaatggtccagatgctgggtggatgcacttgtgacaggcaactaggcagcacagttatatgcatcatatttactcagaagcctaaaaatactgtgaacatttttcatctacatgaacatttggcatatttaacatgctagcatgctttgataatctctaagagggcataaactatttctcattcttttttcccccacatctttttattagatattttcttcatttacatttcaaatgctatcccaaaagtcccctataccctccccccaccctgctcccctacccactcactcccacttctttaatttctttatttcttccttgaccaaggtatcattgagtagagtgttgttcagtttccacgtgaatgttggctttctattatttatgctgttattgaagatcagccttagtctgtggtgatctgataggatgcattaggataattacaatatttttgaatctgttgaggcctgttttgtgatcaattatatggtcaattttggaggaggtaccatgaggtgctgagaagaaggtatatccttttgttttagaataaaatgttctgtagatatctgttaaatccatttgtttcataacttctgttagtgttcatgtgtctctgtttattttctgtttccaggatctgtccatttgtgagagtggtgtgttgaagtctcccactattattgtgtgaggtgcagtgtgtgctttgagctttactaaagtttctttaatgaatgtggctgcccttgcatttggagcatagatatttagaattgagagttcgtcttggtagattttacctttgatgagtatgaagtgcccctccttgtcttttttgataactttgggttagaagtcaattttattcgatattagaatggctactccagcttgtttctttggaccatttgcttggaaaactgttttccagccttttactctgaggtagtttctgtctttgttcctgaggtgggtttcctgcaaacagcaaaatgttgggtcctgtttgtgtagccactctattagtctatatctttttattggagaattgagttcattgatgttaagagaaattaaagtatttgttgcttcctgttatttttgttgttaaagttgggaaaaagttgttgttaaattcttgtggctgtcttcttttagttttgttaaaggattactttcttgctttttctagggtgtaatttccatctttgtgttggtgttttccctttattatccttagaagggctggattcgtggaaagatattgtgtgaatttagttttgtcatggaattctttggtttctccatctatggtaattgagagttttgctggatatagtagcctgtgctggcatttgtgttctcttagtgtctgtataacatctgtctaggatcttctgactttcatagtctctggtgagaagtctggagtaattctaataggcctgcctttatatgttacttgacttttttcccttattgcttttaatattgtctttatttactacatttgttgttctgattattatgtgttgggaggaatttcttttctggtccagtctatttggagttctgtaggctccttgtctgttcgtgggcatctctttctttaggtatgggaagttttcttctataactttgttgaaggtatttactggccttttaagttgaacatcttcattctcatctactcctattatctgtaggtttggtcttctcattgtgtcctggatttcgtggatgttttgagttaggatccttttgcatttgctttgattgttgtgtccatgttccctatgggatcttctgcacctgagattctctcttccattccttgtattctgttgatgatgctcacatctatggctcctgatttctttcctagggtttctatctccacagttgtctccctttatgttttcttcattgtttctacttccattattagaccttggacagttttgttcaattccatcacctgtttggttgtgttttcctctaattctttaagggatttttgtgtttcttctacctgtttagcagtgtttgcctgtagttctttaagggcttctacttgtttagcagtgtcctcctgtaattccttgaggaatttttgtgcttcctctttaagcgtttctacctgtttagcagtgttctcctgtatttctttaagtgggttattaatgcccttcttaagatcttctaccaccatcatgattttaaatccttgtcttgcttttccggtgtgttggggtatccaggattagttgtggtgggtatactgagttctgatgacacccagtgttcttggtttctgttagtaagattcttacgtttgccttttgccatctgcagatctctggtgttaatgttcaagctgtctctggttggagcttgatcctcctgtgattcttttagcctctgtcagcactcctgggagtccaactctctcctgagtcccagtggtcagagcactgaggttctgtggcatggagagcactctggagccctgttctttgcaggcaagctctcctctttcaggacaggtgtccagcagtctagagctctgatccacctcctcagttctggagtcagaactctccctgtaggctgactctcctctggcaaggaatgtgcccaggggtttgggtctcagctctgcctcctggctgaggatgaaggcccaacaggaccctgaccaaaaagctctgttgcttctatcgcccacgtactctcaggtgatcaggaggtcctgggtgtgctaggggtcctgtggcgtggagagtcctctggtgccctagatgcccttggccgggttcacgctgaagatggcagggctggccccaacctgaatcccagccaatggtcgggcggggttcctttgtccctgttcctgctggcacaagaccctctgcaattctttggagctgatgttgcattccactcacccgttaccccgaggtgatcccgaggtcctgcggcagagagagcaccctggagtccttagtggtctccgctgggctcagaaggaagatggcgggggtggccccgactggaacagatcccagcctctggttgggcgggattcctttgttcctgttcctgctggcaaaagaccttctgcgaatctttggagctgatgttgcattctactcacctgtgatctgaagatgatcctgaggttctgtggcatggagagcactctggagcccttagccaactgttatttctttacttatttatttattttggttttattgttgcttcttaaaaacaggattgaaataaactccttggcataaagcacttattaaaaagtatgggagtggagaaactggtcaccagtcttaagcacaatactttttattgattgtaatttactttcatcttaaatcctctttcagttgtaaattttcttatctactggaagacagactccagagacttttccttagaacttgccttagttcaagataaaccaaacaacttggcgttattcagcagtattatcatcattattatttctttgctactttctgttgctataagaaaatatgagaaggtagatacttcatactgagaacagctttacttgtcttacacctataggctgcaagtccaagatttaggcagccctatctggttttggactccagtgagggccttctggttatatcacaatatggtggatgatgccaaggttagatagtacacaagacacatactatgagagaaacaacagaaaatgacaagaggctaggctccctttaaataacaacccaagttaacgttccatcactgtaacaaaactcctgacaaagccagtttagaggaagatagaaagattttggcttgtgggaaaaaagaaaggaaggaagacagacaaaaagacagaaagaaaagaaaaaacagagagatgggggagaaggagagagagaggagaggagaggagaggagaggagaggagaggagaggagaggagaggagaaggagggggggtgaagaagaggcaaacagtgattgggtccattgtagcttcatccattcccttctggaagctccacatcttgaattctccagcacctcccaacaaataccatcaccatcaaccctttagaggacactttatagccaaagcagagtataatccattctcctgggaatagtctaactccatgagactcacttaatgcctgccccacacctaagggtgatattcactaccttgtgactgttcaccaagtcctgtcccttacagcttctaccagttcagtactgccacactggagatcaaacccgtggcacattaattatcaatggacagatgaaaagcatatttaaaccttaatggtactagtatttcaaacctcatatagcagtcttaggggaaaaaaaaatgctttgaggacccatgacagcaaagggagaaagatatggcccaagtgtcgcagggtttgatcccttcctagccaactttccctgctgcctctcctttctataagtctttgttgagaggataatattttcagtagctcagaatcacagactcacaattgacaaaatctaggtaaaaatacttggttgtgtccttggggagagctgtgttgactctgaatgggtctcttctcctccttcatgttccatgagttgggacagtaagactgacagctacaaaataaccagaatagaaaggggtagaaaaacaaggggctgatataaaccatgtttgcccactatgtttgccaaatgtgtttgtttacttaaaactatgtagtagggaaaatagattatttttaaattacatagaaactatgtcgaggatatcattttgatatatatatatatatatatgtgtgtgtgtgtatatatatatgaattaataaatatatactagttaaaaatgtttttgttcacaatgattctgtgaactatgtagtagggaaaatagattatttttaaattacatagaaactatgtcgaggatatcattcatatatatatatatatcatatattaataaatgtatactagttaaaaatgtttttgttcacaatgattctgatcatattgggaaattctaccttatttttctcaggcccttgaaggctacttggcaaaatgcaaccatcaaattgatgatattgtcacattggttcgtggcaaattgtccaagcagaaccgtgttactctgggagcccttgtggtactggatgttcacgctagagatgtgcttgccagccttgtagataaaaagatcagtgatgactcggacttccagtggttaagtcagcttagatactactggcaagtaagtggtctcacactgcagtttctgcccatagcgtcttaagtcatactcactggctcagctgtgtaacaggattggtaaaagggaactttttgctgatgaattcttatatatgatttttcagattgaaaattaagggagccaataattatatgtattatcatcagtatctatatttatgtacctatatttatatcaaaatgtattatcatatattaacatacatgtacgtgtgaaggtaccaaaaggaacagaaattaactactttttaatgtattactgtgtttgttatttacaaaatgttggtgttagttagcttaaattgtgatttttagattcctgatgcacttaagtgaggtataagtcacttttcttgtctggtttagtcattgaagaagccagaaacatggtccataaggaaagaacttttcaggctatctgggtggataataatgcttatctcggctggaaggaatgggggcaggacagttacagcagcctgctgggtgtgggagagttggggctcagcagctctcaggattgcatctaagtcttaggagatatgggaaggaggagacaggtatggaccagaaccttgtaggccttttcagagccttgctatttggtggtaggaagatgggtatgggatgcttgattcagaagccagatccttctttcttaggctatggacaaggtgctcatctctgtaagcaatgggctcctcagctgtaaaactgtgacagtgcttgtggtggtttgagtggaaaaggtctccatgagctcacagggaagcaccataaggaggtgttgccttgttggaggacgtgtgtcaccgcagatgggctttgccaggcccagggttgcttcttttcctgctgcctgttggttcagatgtagaactctccactatcactcactccagcacacgtctgcctgtgcgcttcctgccatgactataatgggctaaatctgggaactgtaagccagccccagttacatgttttcctttataagagtcgctgtggtcttgtgggccctccacagcaataaaaccctaactaaggcagtggcagaaagccattgccttccattattcattcagaaaagtagctattgaattcttgtagtcagtgaactgatgtctgagaggacagtctaaacaggtctgcactgtgcttattccttattaaagatcttgtgattttccattgtttgaaattttgcttcctaaccaactgcattttttttctgattgatcctaggaaaataatttagaaacaaagatgatcaatgctggtttgcgatatggctatgaatatctgggaaattcccctagactagtcataaccccactcacagaccgctgttacaggtaaaccctgccaaagacatgggagcaataacttacacacacacacacacacacacacacacacacacacacacacacacacaccctaggccagcgattgagttacaggtaagtatttttaccttacattctataaatggatcctgtgtcctttccccagtccctaagcctcctctctgctgctttcctgttttcatctctggggataagggtgttctttgccttggcaggtgttggcactttctgtcccccctcccaccttctccttctttttccttccaactctggcttctttttggatcatttgagttacactgtttttcctccctctgaagctgaattttctagagttctgtttctgtgttccattatttccagactgtttacttccaggctctaactacccatgttcaaaagaaccatgtctgcatctctctcctgttcacagtgcacgtgcctggtgggtatctcctttgagagatcatatttacattttattcccagtggaaattaaccactttctgcattaagttagctttgcttccacgattgtgcttctcagaagattgatataaacatacattatattttgattcccatcctattcattcccatccttcatctcgtcctagaccacccgccctatcccattccatacccaacaagtttgtgtcctcttgtttatttatttactctattaatcccagttagtgctgcccatgtactcttagatgtgttgacattccctggaacatgtctgacccaccagaggtaacatccttaaaaacccaaacaaacaaacaaacaaaaacaataaacaataaaagggagctctccttctcttaatagctgccaattaccaacagctcctcatctagagatggggctccatgccactcctctctccatgctgagatcttacttgacatgagcttgcacaggtcctgtgcatgctgtcataatcactgttagttcgtatgcgcagcttccctattgtgttccctgtcacacctggtttcttcctctgccttattgctcatcacaatgggctgaggcatgcttgctatattttatattatttattggagactttcatggaaaaagactatgtgctatttttttccttgtctccaataccaccacattctctggcataaaggagacattaaataaaatatgccgaattacagttttaaattatactcttagagaatactcagaattgtgaacgattttgttgaacattatgacaaatcacatgtttgactacaaatcacgatgactttcaggtatagtgttaatatctgtagacacaagctataaactctggtagcacagagcaaagatggaatatataagccttttctattttatatcaaaatgaatatgactaggaaacaatataacacaccatttcattatttggtaataaccttggcagaacatagactaaataaaaacatgttattgtcttcagttttataagattaaaaaaagatacagattgtgtcatgtcactcacatgtttttctgtcatttgggaaagctagattaaaaaacaattgcaatagtgtgtactgagtgagatactagagggaaacattaggtggcataggtgtgtaacccagatgggaactaagtttgcaggaaaatcactccagaagcagtgtgctaagatattcattcatacccatgaatggagacaatgtattacatggtaaatggatttgatcacatggaaaggaaaaggctctctgtacttcggtagcaaatttaacccacttaaatttaattaaattagcaaactacttgggcccattaagataattgtactgtaattttatattcctagagccttacttttgatcttaattcacttagtttaatactattcactataattaaatattattttaatcattctctccatctctgttatgcccttaaaggatttttctctcggttattaatgttcactataatgttactagaagttatttacttatttatattacttgggatttccttttattcatgtctttcttccattctggaaagttttcagactttgccatttaaattttgggtcttcaccattttaaccttctttattatttttcctttattttttaaaaaatatatatggttttctactctctaagcaattcccttatatttacctcccaacaaataattttatttccttatgtttattctgatatttaaccctttattgagttttcaagagtatatgaatttcaagttgccttttttataaaaatggcccccacctcagacagacagacagagagacagacagacagacagacacacacacacacacacacacaatatatatatatatatatatgagagagagattggttggttgattctgactgctaagaaccaaatatggaagacgggatgctgtgaatatagtgacactcactgccgctgtactgtgtgactgactcaatagtgatcttactgcccagtttttactgtgagcataatttggtaagggtggcttccccatgctgcttttactgatgtctgttgtggacacagccacagtttcagaccaatctttaaagagggctttaaagttttcttcagttcagaaaacaaaacaaaacagaacaaaacaaaaacaaaaaagtaaaaaaaaaaaaagcttttgttcttttttctgttttggctcatatgcaatgagaaatggaaatttaactcatcctcttcttgaggagcaatgcaggcttgttccacagactgccaagagtggtgagcttgtgagcttcctgtcccttctctgattaacctccttgactctctggtgtgtgctggaggaaatgtgatgtctattagagacaaagcagcatttcaagcttccataataggtccaaagggtaaatttatcccatttccccttcttgctcaattctaatggtttcatatctgtgctgcctaaagtatatttgtgttcatttgtattcaaccaaataatatatatatctgcagatttgcacataaccattcctcaaacaatgaatccccctattggtaacatcttttattctttaaatgatggctgtagatttcaaaattattttctcccatgtgctatttctatactcttctagtaaggttaggtgttcatagagtcagttggattctccacattgacgagaagtcaggattgaattccaaaagttctaaatttgtcatgtatataaatatgcacatgcattttatctgcctgcctgactgtccatccatgtgttcatctatgcatctgcctatctatctactctacatctacctacctacatatccatccatccatccatccatccatccatccatccatccttccattttccatcatctgtctacttttagaagaaaagttaataactaagaaatgtgctgttagagattttctgaggttagcagtgtgtgtgtgtgtgtgtgtgtgtgtgtgtgtgtgtgtgtgtgacattatgaaagcaggggggctgagagttaggattcaatttaaccttttcttttgcctacttggtaattattctgtccattctttttactctaggaccttatttggagcccttcatctgcaccttggaggagcacctgagggcccagctggcaccggaaagacagaaacaaccaaggatttagcaaaagcggttgccaaacagtgtgtcgttttcaactgctccgatgggctggattatttggccttaggaaaattctttaaggtttggatcaactaactcctcatttctttacagtagggtagccatcagtgatggaagggggttacaaagagagacaactggatgcaaacagaagctttactgtgcctggtatagtctcaacaagttccaagcacaagtgagctctgccacgatccagtccctgctatggaggtcactctatctgactactcctgattgggtcatagacttagaaatattagttagctctttggatattctgaccagaaggcagtttttctggccacacaagtcaggtcacatagagggttattctttaaaaaagcaaataaactttgctttaaatgggatctttaaatatatcaggcagatagaagtttgagaaccacccactgggtaaaggctgtggtgtgggattcaaagatttctctaatctctatgctgtattatcaataagtttcagagttcgttaattgactattatagacacatcttcgattttctgcattggaaacgtataactcttctttattttaatagtgtggatatatgtccatacacatgtttgtgtgtttgtgagtgtgtgtggacatgtgtgtcatacacaagggggtcaggaggttgatactggaatccttctcaattgcactacactttgtttaaagacacggggtctttcactggcttagagcttgccaaataggctaatctgactagtcaaagagtcccagggaattgactggctctgcctctccagtactgagatcagaggcatgtatcactatgcccagctttgtgtgtgtgctggggattgttctcatgtttgtgtgtcaagcattataccaactgagccatcttcccacacccaaaagccctggcccctgactgactcacacaccttcctgtctaccatgttttattgatctaaatttgttagagtctagaggtctgtgagattgtgaaaaggagaatcaaggtggactgtgcttgtttggactagagcagcttggttctagaggctataactccttcacacgtgaggcaggcaggcaggcaggcaggcaggcaggcaggcaggcaggcaggcaggctgttgtaacagttatttgtttgggatggctgactctttgcatttacttccttttctttttctgtaatttttcaaatatattttatctattctgtactatttactttaaaatatttaaatttacctttaaatgaaactaacaaaaatatactatttctacccaacacagtgaactgttttccttgagtgatatgcactgtcattttaaacaactttataattgtataagtcgttatttgtgatttgaaaacagggtaagattttttttgaaggaagtcaaaataataaagaataatatgataggagacattggaatggtatttaatttgtcttctatagtgccatataaacttgacacaatgactaagaaatgggtggcagttagaagagcctaggtatggcttgaataaatagtatattccaatgtagtcaaagcaatgcctgcctttttttattagatattttcattatttacattttaaatgctatcttgaaagttccctataccctccccctgccctgctcccctacccacccactccaacttcttggccctggtgttcccctgtgctggggcatataaagtttgcaagaccaaggggcctctcttcccaatgatggccgactaggccatcttctgctacatataatgcctgccttctttatcataatattcttcattctttgatttagattgatagatttcaatagaactaaatttgcttattgctaagtactaattgatggtgcagatacatttttggtgtgaaattcatgttgaaaagtgggataacaaataaaggtataggtcttactattaagaacctcataatctttcaagcattatttttgaaaacttcatcacaatctgcatatttgcatatatgatgttaaacagcctgttctctgtgacaactaaaccttttattatattattcattgaaaatcaaagtaaggggtagtgtgctctcaggagacttaccaatctttgatatgcatgaagttcagcacatatctatgaggcaatcctttcttaggattataaattgggctttgaatgttagttggctattctgcttacatagcagtatctctggcaaggaaagtcatgttgcatagatggttattacaacccattatttcaaaaaagcaaatacagtccacttgtaaataaagagtaaaggcttggaaattatagatatacccctagatacctaaagacatactcagagcaaaggcaatacattgggaagttttccagttgatccaactctttattcacctagaataatgaattggtaataaaaaaatgagctgtctctaaagataaaggtaaataagcaatttccttgatgggaattaaatccctgaaaagatcaggtgaaattcatcatttcaatgtaatactcaatcagatagagttgaaaatgtttattattctttcctcccagggactgttatcctgtggagcctgggcttgctttgatgagtttaacagaattgatttggaagtactttctgtggttgctcaacaaatccttaccatccagagaggtaatgagcttgtctgtctatgcagcaagtgaaaacaaaggagatgggggataggaagcaattggcacaagctgaagcacagttaactcattgcacttgtggttcccacaggcattaatgcaggtaccgatctcctagtgtttgaaggaacagaactaaaacttgaccccacatgcgctgtcttcataacaatgaaccctgggtatgctgggcggtcagagctgccagacaatctgaaggtattgaggctgtaattataacatgtttctttttcaccatttatgaatgcaaagggaaaatgtgatcctaggattgtatttttaaaaatatgcttttagggaataatttgggaaattattctaggagttcatgtttaaagctttaaatagttttacaaaataatacaagtacaactccaaaattttatagttttataatgctaatgattatcacaaatgagaaaagacaggaaaaatacccactatctcttattgtattctatctttttagttttatatgcatttaaagggctcaaatctgacaattgtgtatggatggtaggctttttatttttaatctttaaaatttttttaaagttaatttagagccagggtgaacatttccccatctttgtaaacatgatctggactgtaagtaggatcactgagctgtctttctgatgggaattttaagttgctttcagttcctccattataaatagaaccactgaaggccattggtgctgaaggcctctctcgattggaagatgtcccttagctgaattgccttcaacacagggtgaagccattgacttgtcatatagagtctctcagttcctgttaacacatgatactttttcttttcatttataagggataaaacactgtcctagctgaatagagtaagacttcactttaaaaaattaacttttcattgattaagttaaaaaatgtttttttctccatatatttgccatctttattgtatattttcagggtggattgcatgtttatggattgtgtataagaaataatattcattggtgcatagtacattaataattatagacccaaacccaagatttgccttctattggtcacatgtgtgttgcaacagcaccccagggtcctaactgctacccaatagctttgtacttctaaacttcccctttatgtgcttacgtgatgaagcactttgctttagcgaaggaagggatggtttaaaaatgagaagtgagggatgaagagattgttcagtgggtaaatgttcctgcctctgagcccaagcacctgagaccaggacctgcatgggagaagagaactgactccctcacgttgaactctgaccttcacactctgacctctacatgtgggttgtagcatgcataaccctcctcaataagtaaatataatacattttaaaagagggaagtgctaaattctttatctaaaaggctctttgtgacatcttgcagctttgttctggaaagctctctctgcagctattccttctgttctacacttagactagtcttctattcggtgagatcaacctgagtacaaaagagtcacaaaagcagaaggcaaacctgtgcgtagttggtcataaaaagctggaagacatgattagctgattctgctaatgccttgggtagactgtcctacactctgtgtgtgtgtgtgtgtgtgtgtgtgtgtgttgtgtagtaatagacagatatttgccctgcagcccgtggcatgctgggtgttctctctacattaagctaaaagcccctgtgaagctcccctgacttttctgttgctaccattccctctttgtggctggagttgctatagaaacctgcttgcacatgaacatggaaattcctagctgggtgtggtggcccctagcctgtagtccagtttttgggaggcagtgacaggaggaccaagaattcagggtcatccttggctacaaactagccggaacaagaaacaaaaggaattctaactaaaggaaatgagctttgaattctgaaaaaggaaaaggaaaaggaaggaaggaaggaaagaaggaaggaaggcaggcaagtgttgaccccagaaatggttattatcctcactattatccctgaaccctctccactcacacctaaccctccaccttgactgctcttttggtttatgctgactctgcactgtcccattgttatgccatcttcccagccctcttcacttttggccgagctgttgtgacagctcccttggcagagatgtttcctgctctggatactactattgcaatactaccaatgtcttctatcaaaagaaatcctactatgttattccagatgtaaaagctactggggagctggagaggtggcttaggggtgaagaaagcatcctgctcttgaagaggactagagtttgcttcctggcactctcactgagagctcataagcagtgtgctatagctccaggagacccagggctttcttctggagtcagtaggcacatgcattcacatctgcaccaactcagatacaggcacacacatacatataattaagacataagacaaacctttaagactattggactcttttttttttttttttgtccacaaaagaaagtgttaagagctaatggagctaatgtgtgtatactgttgtttcttgtctatcccagaggcctatgtatctgtcacagtgatctttgagcctctgcatgccccatgcctttctacatgctgttttctctctctgaagtgctcaccttagcaatgactttcctccctaacaaatgaatccagtgtttgaacaaagaaccattgagcatacaaacggttcagaaatggcaatacactatgtcctgtgcttggcatttgtctgaaggttctgtgtagactaccctcctgggtctttcttcttcctgggttgctggaggcaagctccacaccaacttccaagttggtgagctctcagtctgcctggagtggtgggctggctggctgcatcttttatcatgtacatttcccacatcctcttctcagcaagctctgggcattgagcctggaaccagaggccacttctattttctcgaatgcagagagccctcccaactgtacattgtacttggggacagtatggagaatttagggatcatttctgaccagctgctcccatcaaagagagtatttgcacacatcccctcttcctaactccaaatacttcataataagaaggtttcaaggttattacacttcttttgtaaatttggcacacactatagcttacatatattgtgataactgataagcattattttgtgtggaaagaatcccccttttaacatttggtcatgtctggataaaacctgaaatttcttgaacacatctctacttcagaggagctatattttagatgggaaccactccaaagaattgttactcgccttccggtcccctcgagcaccggagtgcctcgccagcggagtctcccgacacccacaagggcccacacagaattccccacgggatcctaagacctctggtgagtggaacacagcttctgccccaatccaatcgagtggaacctgagactgcattaactagggaagcagacgacccggtcctgacctggggcacgagtcccttccggtccactcgagcaccagggtgccttgccagcagagtctcccaacacccgcaagggcccacacaggattccccacgggatcctaagacctctggtgagtggaacacaacttctgccaggaggcaggtttgaacaccagatatctgggcaccttccctgcaagaagagagcttgcctgcagagaatactctgaccactgaaactaaggagagaactagcctcccaggtctgcttatagaggctaacagagtcacctgaggaacaagctctaaccagagacaactataacagctagcttcagagattaccagatggcgaaaagcaaatgtaagaatcctactaacagaaatcaagaccactcaccatcatcagaacgcagcactcccaccccacctagtcctgggcaccccaacacaaccgaaaatctagacccagatttaaaaacatttcttatgatgatggtagaggacatcaagaaggactttcataactcacttaaagaaatacaggagagcactgctaaagagttacaggtccttaaagaaaaacaggaaaacacaaccaaacagttagaagtccttaaagaaaaacaggaaaacacatccaaacaggtgatggaaatgaacaaaaccatactagaactaaaaagggaagtagacacaataaagaaaacccaaagcgaggcaacgctagagatagaaaccataggaaagacgtctggaaccatagatgccagcaagagaaacagaatacaagagatggaagagagaatctcaggtgcagaggattccatagagaacatcggcacaacaatcaaagaaaatacaaaatccaaaaagatcctaactcaaaacatccaggaaatccaggacacaatgagaagaccaaacctatggataataggagttgatgagaatgaagattttcaacttaaagagccagcaaatatcttcaacaaaataatagaagaaaacttcccaaacataaagaaagagatgcccatgatcatacaagaagcctacagaactccaaatagactggaccagaaaagaaattcctccagacacataataatcagaacaacaaatgcactaagtaaagatagaatattaaaagcagtaagggaaaaaggtcaagtaacatataaaggcaggcctatcagaattacaccagacctttcaccagagactatgaaagccagaagagcctggacagatgttatacagacactaagagaacacaaatgccagcccaagctactatacccggccaaactctcaattaccatagatgtagaaaacaaaggattctacgacaaaaccaaattcacacattatctttccatgaatccagcccttcaaaggataataacagaaaaaaaaaagaatacaaggacagaaatcacgccctagaaaaagcaagaaagtaatccctcaacgaaccaaaaagaagactgccacaagaaaagaatgccaactctaacaacaaaaataaaaggaagcaacaattacttttccttaatatctcttaatatcaatggactcaattccccaataaaaagacatagactaacataatggctacacaaacaggacccaacattctgctgcttacaagaaaccaatctcagggaaaagacagacactacctcagagtgaaaggctggaaaacaattttccaagcaaatggtctgaagaaacaagctggagtagccattctgatattgaataaaatcgacttccaccccaaagttatcaaaaaagacaaggagggacacttcatactcatcaaaggaaaatcctccaagaggaactctcaattctgaatatctatgccccaaatgcaagggcagccacattcattaaagacaccttagtaaagctcaaagcacacattgcacctcacacaataatagtgggagacttcaacacaccacattcatcaatagacagatcgtggaaacagaaactaaacagggacacagtgaaactaacagaagttatgaaacaaatggacttaacagatatctacagaacattttatcttaaaacaaaaggatttaccttcttctcagaacctcatgggaccttctccaaaattgaccatataattggtcataaaacaggcctcaacagatacaaaaatattgaaattgtcccatgcatcctatcagaccaccatggactaaggctgatcttcaataacaacataaataatagaaagccaactttcacatggaaactgaataacactcttctcaatgataccttggtcaaggatggaataaagaaagaaattaaagactttttagagtttaatgaaaatgaagccacaatatacccaaacctatgggacacaatgaaagcatttctaagagggaaactcatagctctgagtgcatccaagaagaaactggagagagcacacactagcagcttgacaacacatctaaaagctctagaaaaaaaaggaagaaaattcacccaagaggagtagacggcaggaaataatcaaactcaggggtgaaatcaaccaagtggaaacaagaactattcaaagaattaaccaaacgaggagttggttctttgagaaaatcaacaagatagataaacccttatctagacacactagagggcacagggacaaaatcctaattaacaaaatcagaaatgaaaagggagacataacaacagatcctgaagaaatccaaaacaccatcagatccttctacaaaaggctatactcaacaaaactggaaaacctgaacgaatggacaaatttctggacagataccaggtaccaaagttaaatcaggatcaagttaacgatctaaacagtcccatatcccctaaagaaatagaagcagttattaatagtctcccagccaaaaaaaagcacaggaccagacaggtttagtgcagagttctaacagaccttcaaagaagatctaattccagttctgcacaaactatttcacaaaatagaagtagaaggtactctacccaactcattttatgaagctacaattattctgatacctaaaccacagaaagatccaacaaagatagagaacttcagaccaatttctcttatgaatatcgatgcaaaaatactcaataaaattcttgctaaccgaatccaagaacacattaaagcaatcatccatcctgaccaagtaggttttattccagggatgcagggatggtttaatatatgaaaatccatcaatgtaatccattatataaacaaactcaaagacaaaaaccacatgatcatctcgttagatgcagaaaaagcatttgacaagatccaacacccattcatgataaaagtcttggaaagatcaggaattcaaggcccatacctaaacatgataaaagcaatctacagaaaaccagtagccaacatcaaagtaaatggagagaagctggaagcaatcccactaaaatcagggactagacaaggctgcccactttctccctacctcttcaacatagtacttgaagtgttagccagagcaattcgacaacaaaaggagatcaaggggatacaaattggaaaagaggaagtcaaaatatcactttttgcagatgatatgatagtttatataagtgaccctaaaaattccaccagagaactcctaagcgtgataaacagctttggtgaagtagctgcatataaaattaattcaaacaagtcaatggactttctgtacacaaagaataaacaggctgagaaagaaattagggaaacaacacccttctcaatagtcacaaataatataaaataccttggcgtgactctaactaaggaagtgaaagatctgtatgataaaaacttcaagtctctgaagaaagaaattaaagaagatctcagaagatggaaagatctcccatgctcatggattggcaggatcaacattgtaaaatggctatcttgccaaaagccatctacagattcaatgcaatccccatcaaaattccaactcaattcttcaacgaattagaaagagcaatttgcaaattcatctggaataacaaaaaacctaggatagcaaaaactcttctcaaggataaaagaacctctggtggaatcaccatgcctgacattaagctgtactacagagcaattgtgataaaaactgcatggtactggtatagtgacagacaagtagaccaatggaatggaattgaagtcccagaaatgaactctcacacctatggtcacttgatctttgacaagggagctaaaaccatccagtggaagaaagacagcattttcaacaaatggtgctggcacaactggttgttatcatgtagaagaatgcgaatcgatccatacctatctccttgtactaaggtcaaatctaagtggatcaaggaacttcacataaaaccagagacactgaaacttatagaggagaaagtggggaaaagccttgaagatatggtcacagggaaaaaattcctgaatagaacagcaatggcttgtgctgtaagatcgagaattgacaaatgggacctcatgaaactgcaaagcttctgcaaggcaaaagacaccgtcaataagacaaaaagaccaccaacagattgggaaaggatctttacctatcctaaatcagataggggactattatccaacatatataaagaactcaagaaggtggacttcagaaaatcaaataaccccattaaaaaatggggctcagaactgaacaaagaattctcacctgaggaatagcgaatggcagagaagcacctgaaaaaatgttcaatatccttaatcatcagggaaatgcaaatcaaaacaaccctgtgattccacctcacaccagtcagaatggctaagatcaaaaatttaggtgacagcagatgttgtcgaggatgtagagaaagaggaacactcctccattgttggtgggattgcaggcttgtacaaccactctggaaatcagtctggcggttcctcagaaaattggacgtggtactaccggaggatccagcaatacctctcctgggcatatatccagaatatttcccaaccagtaagaaggacacatgttccactatgttcatagaagccttatttataatagccagaagctggaaagaacccagatgcccctcaacagaggaatggatacagaaaatgtggtacatttacacaatggagtactactcagctattaaaaagaatgaatttatgaaattcctaggcaaatggatggacctggggggcattatcctgagtgaggtaacacattcacaaaggaactcacacaatatgtactcactgataagtggatattagcccaaaacttaggatacccaagatataagatacaatttgctaaacacatgaaactcaagaagaaagaagactgaagtgtgtacactatgcccctccttagaattgggaacaaaacacccatggaaggagttacagagacaaagttaggatctgagacaaaaagatggaccatctagagactgccatatctagggatccaccccataatcagcttccaaacgctgacaccattgcatgcactagcaagattttattgaaaggacccagatgtagctgtctcttgtgagactatgccggggcctagcaaacattagaagtggatgctcacagccagctgnnnnnnnnnnnnnnnnnnnnnnnnnnnnnnnnnnnnnnnnnnnnnnnnnnnnnnnnnnnnnnnnnnnnnnnnnnnnnnnnnnnnnnnnnnnnnnnnnnnnnnnnnnnnnnnnnnnnnnnnnnnnnnnnnnnnnnnnnnnnnnnnnnnnnnnnnnnnnnnnnnnnnnnnnnnnnnnnnnnnnnnnnnnnnnnnnnnnnnnnnnnnnnnnnnnnnnnnnnnnnnnnnnnnnnnnnnnnnnnnnnnnnnnnnnnnnnnnnnnnnnnnnnnnnnnnnnnnnnnnnnnnnnnnnnnnnnnnnnnnnnnnnnnnnnnnnnnnnnnnnnnnnnnnnnnnnnnnnnnnnnnnnnnnnnnnnnnnnnnnnnnnnnnnnnnnnnnnnnnnnnnnnnnnnnnnnnnnnnnnnnnnnnnnnnnnnnnnnnnnnnnnnnnnnnnnnnnnnnnnnnnnnnnnnnnnnnnnnnnnnnnnnnnnnnnnnnnnnnnntgaaaaaaaaaaaaagaattgttactcaagattgtttcagagtagtttttaaaatgggcatattccagatctattggcattacaaaggaatagcttgacacatacacagctttccagagagcgtgtagtatgaaattctcttgccgcatctgaggaagaaaggaaagtagactgttacactcaactaacatcaagctcattccttgaataagacaacatgttaatggcatgtctttccagatccttggaaatagtagagaaaaaaatactgctgaaaatgtgggaacaggaacaaggctggggcctgtgagggtgagaggtgatggagtcccgtgaagaatcccaggaatcagactctgggaccagcatcagggtgcagatctgagtttattgtgcaatgcataagcttatctacagtgttgtgtcaattccaagcccctaaatccttcaccaattgttacttgccacaaagtcaccatgctccaaatgaaaactctgtctgatgggataactcagaagaagtagggggaacatagtcacctcttgggacttccgtgaagacaggtggtggggtagggtgggggtggggctggggagggctcagccaccactctgtcctcaggttttttttttttttttttttttttttttttgctgtctctcagtgttcctggagccaatttcaatctaatgccatgtatggcagattaggattcttgaagagtcacagaagcctatggtgcctttctttttatccacttttccctcacaaggttgacttgcacatccccaaaactttgagggtttctttgttttcagctgcatcgatatgcaggcctttggatcatactccagaagttcttcttcatagagcaccacagcatgtgtgtagaggtgagagaacaacttctaatatagttagttctcttcttctattatgtgttctggtaataggcttatataacaggaatctttacctactgagaaatcttattggcccataaaaaagtacttcattttggacaatttcaatgtcaactgttgtctttagaaaaggatttctaataagtggaataccacagtgatatggtttggtaaatcctttatgtgttctaactgttggcccttttgtataagtatgttcacagtgttccagagccgagttatgacaagtgagagatagggagataggaatctgggaagcacatggaaggtgagagttcagcctgccacataaggcattggaaataagctactattacgttgtactgttgtcgaactagaccgcataactcacaactagacagaagcttctgattaaattgtagattcagtctctctgactctgtctctctctctgtctttctctccccttctctctcatgaattaaaaaagtagcagaattatatctatgttcatgtgtgcgcaaggagcaatgttttaatacaaaacatattaaagtgaaccctgatgcacactaatattctaaacataaatatcatatttattctttaaaaatctatttaattttatatttgcttaccatcacattacatttagttgttttataacatttataattctattattataaatgatctttatagcttgcaaaattgttgtttaatagtgaccatctatgttttttcagtgttttttgcgttatctgtttgcagaagaactagtcatgtttctacagactcaaaagattctgagaatctcaaaatatttcctttacttaacacagtcttgtcattgggagggcagattccctccaggttataagttaattggatcccccgagtgcctgactgaaaccaggctcccaacagcagggtctttatcactatcctgggtgagaggcccaatttgcttgcatcctagctgtctggtgtacacatgttgctttccacaaagaactgtgcaaaactgattctggacgtttggaaagaacagtttacctaaagctagtgatatgtttattacatatgcttaatggaaaaccaactttaattcctttatctatatgatgtgcatttgtaactagtgaatattaaatagcaaacattatggtaggtatgagattactgtagaaaagcaattacaaccatagtgcttgatgaaacaagagcaagattgcctttctacaccatttaactacctcctttgtgcactgcaggctctgttccggacagtggccatgatggtgcctgactatgccatgattgccgagatcgtgctgtactcttgtggctttgtcactgcgcggccgctgtccataaagattgtggcgacataccgcttgtgctcagagcaactgtcctcccagcatcactatgactacgggatgcgagctgtgaagtctgtgctcacagctgctggcaatctgaaggtagaactgagagctgtgactcacttcatttctattcttaaatctcaggagcaagtgtgttcataagagttccagcatctggttgcattcatcaactagcctgaaaaaaatcctttgctgacaatgaaaataaaatgttataatctttgtaagacaggatacaggtaatgcttattggttgcatttaaatatatgaagttaggtagagccaaagaatacagtcacatactttcaataaatcttttgaaggctttctatttatataatatgcagcattttgtggagaataatgaagttaatacatagaaacccctgaacatcatcactatgttttacagaaacttttattctccctctatttgtcatccccgaggctcactgcctcaatctgctaacctaggcctggaagctttaagcctctgtacagtcttatctaggcctagaatgttttctgcctttgagacttactgctgaataagctcaccctttcttgtgttttctgaactcttgctggctggttcaactcagcagttctggttcaaaactcctctccaagctgactgattcaacctgactcctctcagtttcttactgaattgctctgcttagtctcatactaatgttgacaatatgttctagtcttctggctccttctcattctctgggtcattctgtcttcacctgtgtctagcttattatcccttcaacttatctctgcaaaaactctcctggtaaaactgcttcctcgccccattttttctgcattgctccctcttatagcttcccttccccctctcttcttataagagttgagcatatcctattctatcctcttatttgtctctttgtctgccactcaataggtagcactttcaaacatgggtgctgccttctacacactaactttatcttcattgtttgagattaaaagtatgtgctaaggctctctacacacaccacaactagaaacaggtttttttttttttttccagtaaacacaatctcagggttcacaatgcgatcaaatatcctgcaatacttatgtaattgacagttgtggtcacgtgtggcctagtgataatagtgatcaggtgtttgcatttaaaatcataactaaatacatgaaaacaatagatactttaggatacggctgacttctctctggaagtagaacaataaactagagctatatattagttatttatgaagccaagatatgttattgttaagagcaagctccagaaatgtgaccttggaatttatgaaatgctcacatttacaatttgtagaagatatagattttaaaatacatctcatgtgattaacaatggtttgcatttttatcctctatcataatgctattaagaattctgatatgtggtggctatattctatttcatatttgcctaacataacttcaagccccacccctcatttttacaataaacgcaagtgcctggaagcaacaatttatataccctgtcatgtcaggattagtctgtggccagataatgggagagataatacattgtcctagtacaaatcagagctggaatcttgactggaattgagctataaaagttaggctgcaaatgaatcctgaaaatgaattctatcactctttgttacaagctaatttagattgttgaatgctttggcttgaatattttcaagtttgtttttgttctaccaagagacaatttaagcatttgcttacaaataatagactctcaaataataaacatgaagtttgatacttcaaaattcattttatgttacattgatcaaaaacaaagactatatgagcagggctaattttgacctctgggagctctggagagttagagatgtgctgacagccaaacacttgtggctgcttaataaagaacaggaatctctctctctctccttattggtagatatgtttttgtaagacaagagagaattctaggaaacagccaaataaacaaaccaaatggtcagggaacttttgaatgacatattgagtaagttgagtttgggagaaatagttctaaggttagatttgggaggcactaatgatgtgaatgttgatataggcataagcaacaagttccaagttccatcagatttttagtaaatactggacatgcaacagacatgtttaagatttcttatgtactgtttccttgactgaattaaccctctccaccttctctctggagcttgttgattgcttggcatgtgaacaggcagtcagcaggtagccagcaggtaccatggtgctctgtgcatccactccaattcacaatattcctcactcagagttttacagaactaacctatcaggggtcttgagtaagcaagcactacccaataagcaggcagtgacaactctcagtgtactgaattcctggtcaccaatcctgtatcaaaatatccatgggaatgtagtcagttctgcctgtgttcatgttataagggattctctgaagatagacatcagtttctataatgaaatacagtgaaaacatgagcaatagtttgtttagattgttaggtgctgtgcatttgtgtaagtatagaccgaaaaaaggtgtccatggcagaaatcctcatgactgtattttcttttagctgaaatatccaaacgaaaatgaagaaattttgctacttagatctattattgatgtaaatctgccgaagtttttatcccatgatttgccactctttgaggtaagggagcacttattctttccaggtgtcagcacttttacaggagtgcaggaggcagccatgtctgcagagctctctgtaggaacttgcactgtggaaagcaatggcatgttcagagggatacaagccagtcctgcttttgtgtgaaatatatttgttgggattgttgcttctgaaacttttttttttttttttttttttgtttcgagacagggtttctctgtacaccccttgctgtcctggaactcactctgtagaccaggctggccttgaactcagaaatctgcctgcctctgcctcccaagtgctaggattaaaggcatacgccaccaccgcctggctgcctctgaaacttttaacagcttgatatttttatgtgtttttactgcataataataataaacaaagttataaaatattttctataagttccatgagaatgtagtctgagttgaaaagtagttaggttagcacaccaatgaatctttagcatttgataaaataagaattatagttctttaaaagaatggagcgacttttatgaaattgtttattcaggataattttatataagaaccaaatttgaaaatcttgttatattttaagattagattatgaatagctggatgaagaaggattaggataatagtttctataataaatctctcattcttctctttgtctaccataaaaagtcataggtcattgactcttactaaatggtagtggtgtggttttggaccatagctgccctgggaggaagataagaaatgcttccactagtgtcctcctgtagcaactgtctttcatcattttgaaaggaattctccttgggtctagacttggcagggcacatatcttcatggaacaaaccaacagggaaagatttcaagtgttctgcctaaagttttccttccatacccttggtgctgaaacacagaacaaattttgcagaaacaaaagctgcatttccttccagagggtgggagtgtgtgtcagtggacatgttcatatgcagtattgcttctgtgaatcaagtgtttagggatgtctctctcaagtggagtgtgcttgacattttcagtcaggaaaacttcctgtgtaagtcagcctcatgtactgcaggacacctcccaccccagtgagatgtctacacaccgctctcaaattggcaaacagaaagatgagtatgtctagtctttacctgacaggagagtcaaggaatattcattggtcttcattgagaagcactgatgacaaatttccacattgtgttctttcagggctatcctcaaagtacttgaatgctattgtgtgaaagatacttttatttagaagccattacatttcactatggatggcatactgtgggtgtgtgtataagtgtgtgtgtctgtgtgtgtacagtggaaatcaagtgatcaagtaagggccttgcttgtgttaagcacatacctacacatatctattaagtccccagcctggatcaaataatgcctgcaggaatatcatgcctgtgatggcagcctgcaccacatggcaaactacagaccagcctgaaacatgtgcaaaaccttgcctacctatgttttatgttctcaatagtaaaggggagcaagtggcatcaccgtctccatttcatgtcagtgcaagtgcaacagaaagatgacaaaaagcttgtgtctgtggcatgtgcatgagggcagggatcctggccagccaggctacagtgccccaagggagcttactgatttagttgagggagtgattaaattggtagctcaaatttttaaaatacaactcgggcatatggtttcacattaactacctctgaaatttcacttttattttcagagtgaaaaaaatagtaaattctcatataagttgtaatgaaatttataaaatagacttaacaatttataaaagttgttccttagatcttggaattaactttatgttcataagcattacacgtagagcctcagctcttacaaatgtacattatatgattgtgttagtgtccttaaggttgccatgatgatgtcctgcaaacttgcagtacaacataaacacttactctcttcttgttctgagtcaagaattatgtgagagtgccagagaccaaaacataggttgtcagttagggttttactgctgtgaagagacaccatgacagactgaggcaactcttctaatggaaaacatttaattggagctggtttagtccattatcatcatggcaggaagcatggtagcatgcgggtagacttagttctggagaagaagctgagagctctacacctggatcttcaggaagcaggaagagagagtgacactggacctggcttgagcatatatgagtcctcaaagtccaccctcaatggcacacttcccacgacaaggccattttccctaactgtgccctagtagccagtggggaacagttttattcaaaccaccacatgcatttttagggaatttttctcagtttcttcccagctcctggtagctccctgcaatcctagatgttttctatcttgtggttgttctatactaatctcatatgaacatactaatctctatcgccacatggccttcttccctgtgcccacgtatctacacaccctctcctctctcagacagatagcatcatccttgtctagtgtgacaacctaaccttctccatagggaaaccaaaggtttcattaaagtcttgttctgatgttctgggttaacccaaaacactcaacctacataatacatgcttgtactgaaattacttctgaacttgttcttgtctatgtaaatggccagaatcaaagtcaaccattaggcatagctagttattctagaaccagttctgtgtaagtcacttttctttactaacttgcctttagtttgtgtctctgagcatctattgctgggcctggcttgagcatttgaaacctcaaaacccacctgtaatggcacacttctttcaacaaggccatacctgctccagcatgtgagtcggtaaattcccggctcccttcttgtgatgtatgtgttacctcacaccaatgcagcagttcataatagtttatcagccacgtcatatccaacttccaatttttaaattagtttgccagacttcagggtataagtttttctaccagaaaacaaagactcaaactgttataatagcactattcccatttttatgaaatgcaattttatttgatacattggctaatagaaaatcgtttggttatgtcttttggttataaatatattcaatataaaattcacaccttttatcagggaattacctcagatttgtttcctggggtgaaattaccaaagccagattacaatgatctgctggccgccatcagagacaactgccacagcatgaatttgcaaatgaccgacttcttctctgagaagatccttcagatctatgagatgatgattgtgcgtcacggtttcatgattgttggagagccatttggagggaagaccagtgcatatcgtgttctagctggagcattaaatgacatttgtgaaaaggtctgtgtgctattaatacaatagcttgttgatatttatctgtgtcagaaaggatacagggtggttttgaaatattctttccatggcagagtgtaaaatcattaaaaacagaaaacgagttatatatgataaaattagaagggcaaaatgaaacaagcaatgagtccaacacacgatacaaatttgcctttcagtctttaatttcatctcttttagttaaaggtaatacatagtttttttgtttgttttttaaaagaaatgaatatacagaagaaattgaaggtttcttttaatacttttaggagagcattttttttttcctgagaagttctaatgtaagtttctgttaagagatgccaatgaatttagttttaagacatgtgtgtgcataggtttgtgtatatagtatgcatatgtggatatatgactactattcaaatttcttcaagttgtattatttatttatgtgcatgtgtgcatgcgtgtgtttatgtgtatgtatgtgtgtgcatgtgcttgtgtttttgtgtgtatgtgtttgtgtgtgtgtgtgtgcatgtggatgtggatgtgtgtgagtgcccttagaggtgaaaagaaatggctgattccctggaggtggatttgaaggtagatgtgagctactagacataggaactgaccccagtgagaatagcaagtgctcttaacttctgggtcttgtctagagctcccagctacttaaagttcctaggcaagacacactgagacctactttgatgtgccaaaccaatgaacttctgcagctgatactgctcttctgctcacatctcttgtgccttggatagtgtttccctcctatttcagtgcctggggcctgtaatggggtctctgatcattatatcttcactgtgaagtttctctttcaatgaatacaaatatattcacttgtcttgtttaccttggatctgctatgttttgtttcactaatactatatctgtgtttccctgtgtatctgtttaccttcaggtatggcttcaaatctattcttattatcattgtgacttacctttttaaaataataagcaatttgaattttcatttcttcaggttgatggtctttattttaatttttatttataaattttatacaatacattttggtcatgttttccctccttcaattcctccctaatcctttccattttcctatccacccaacttcatgttctttttctctcaaaagaaaaagaaaagaaaatcaaaacaaacaagaaccaagtaagatcaaaaaaacagaagcccaaacaaaagaaaaaagcccacaaaagaacaatgacaaaatgaaaaaacagcatagagttcattttgtgttggcccactactcctgagcatggagctggctctagagtagttcatatgcccagtgacatgccattgttaggaaccaatgttccctttgctcctgggtaacagttgcaaataacggtgtagtcaggggtgggagccgctgttcacccatgtccacatgtggtctttctattttatagggaaatttcaggagatttatgtctactgtcataaactgacacactacttttttcacctcttttcatgccattccctctcttccttctttttcccttccctcttgtgcttaaccctcagcttgccttcttatcttacctttcctgtgtttaacttgtctgtatccttgatggtgctactgtatcactgttatgacataattggttttgccacacacacacacacacacacacacacacacacacacacacacacacaagtctctgaaaggagaaggcaccacagtgctcagtgaggggcaggaatcaagaagttatatgggtgttttctggtgtcccttaatgcccaaatggcaaaaggtttgttcactctctggaaattttaagaataacattgctattcccttagctatcatactcttcctacagcttcttgctggcctttggaataaaagctgtctttaagggcagcaacttcatcctgattaaaaatgggtacagtttccctattcttctacactggggaagtttccaggtaaagctcttccagacacagggaagaaagcaaagactttgagctttgtcttgttacttaaggaaattatttacacatctgccctctgatttgctggtttgtgctgcttcaaagcttgggcagaactggtaagaactggacttgctatgctgttgcacataaaaataaatgactaaggaaagtttgagcacaggggcttttaaaggaacttatattgttctgcacagtgctatagtgactgccacatatcatggtgtatttagcaaaccccacagagtgaaacaccgagtcaacactaatataagttatgcactatgctcagccatagtgcatctccacacaatcatcagtaatgccctgtgcctcccagtgtgtgttagtgctgctgtgggggaggggcgttgtcagagaggcaggggagggctccagaggctttgcactttctattcaactttccataaatttgagtctactttaacagttaattctgttaatttaaaagtaagacttatgtgccccaggggtgccagcatgtctcataataatgccatagaaccagggttctggccaaaatgggcaatttactaatattaagtttttgactccatgggaagtctctagcattacatctctttattttctctcagaaaacattttgttggaagggtcagcaatttacagcccacaggccaaatctagccaaagcttattttggtaatgccgatgaactcagaatggtgtcaacagtttttacaatgtttttgtttgtttgtttgtttgtttaacagaaagagaacaagaacaccagatgcctacatctcttgctctgtgggccttcaccaagcagttgtcaattctttctctgatttcagaatatgagactgaacacaatttactaatttatccctatgtatttaattactttaaaatacttttataaacaacatgtcaaagcttgactctcagttgttcattggcattacagagagcatagaaaggacttctttccaaaccctgtgctttggaaccttgttaaactcattccttactgctggcagcttctttgtaggcttcttaagatatttttatatacacaatcatgttttcaatgaggaaagatagtatccttcgaaataaataatgctgtttttttttttctttttcattaagggactaatggaagaaaacaaggttcaaataactgttttaaatcccaagtctgtcaccatgggccagctttatgggcagtttgacttggtttcccatgagtggtctgatggggtcctggctgttagctttagagcgttcgcagcttcctcggtaagagtctgtcttcttacatgtagattttaaaagagttatgtgtcctgtgaccagtatctgattctttcccaattatttacttcttaagatatttactgaaagcatgttactggaggctttggtggtatttctttgaggaatgatggcagcccatacaaggacagcacagaccatgtccctgggcacctctgtcctggaggtccttttcagaactcttggaagtcaggagagtggatgattccagtgatgtggcacacagcctcttctctgacatcatttctgtctgcagtctgaactgctgcccttattatatccttgttagaaataacttcagaacatgtccagtgttccataactttccatgtagaatggttggaagagaagaggctacacctaagagatatttcagggctggggtttattctgtgccttgttttgtgcaggtgactgtcacactcataagcagggtccaaagtgcatgtgctcaggccagaataatgtaacatgaagcttctagacatgtaaacaggcacatcatttacatagaaagagccatgggttacctctgtgcaacgtgcccttacatagcttacattacactgtgtagaaagctatgtcctatttacactaaatctcagtgaggtgcagtagtttactcaaaaccagtagagcagggtggaaaaagaagtccttcagacgatgaagctcaaggtcacagcagtgtcacagcagtgacagttgacaggcactggcagtggagagttcaagggaattctggtctcagtgatcacccagagcataatgtaatcagtactcttccgtgctgtcctcctgagttccgagcacacaagtaccagcttcggtgtgaagatagggtgctgaccctggggcagctcacggtcctatggagttaaccacagggtctgagactgtggtaagaaggacttagttccatcacgactggaactaagtaaggtgacagtgaacaaaacatttgtatacataagcaggtggaaatataggaatcagaaaggtggttattttctggacaatgtgcaagtatttttatatttcataatatttgtcaggtcattatactgactttgtattatctatacatcactagtacatattattactggtgtacagaactttatgtgaatgttatattgattttcatatcctataccagtggttctcaacctgtgcatcacaatgtgtttgtgaagaaaatgattttttcataaagatcgcctaaagccattaaaaaacacagatatctacattataactcaaaacagtagcaaaatgacagtcatgaagtagcaatgaaagtcattttatatttggggtcaccacaacatgagaagctgtattgaagggtcgcagtattaggaaggttgaaaaccattgtcctacactagtatgtgtgtgtgtgtgtgtgaatttattttgtggaagaaaaccaaagttttagcatagtgcatagaagccattaaccttataaaaacgttaggtagaattcataagagtgatctattagagaatactaagaacaggcatatttgaatgaacattttgttttccctatcaatagtattttcagttctaatattttaaaagcagtttacatgtatttagcattggaaacattgaaaagattgaatcaagtgaggtattggagttttgtattgtccatggcatatgtagacttcttcatctacgcttatgtgtttgtttgtattagtgtgtatgtgtgtatgagtgtgtgtgtgtgtgctaatgtgcctgcgtggatgtatacatgcacctgcctgtttatagttcatattaaagagtactgttttatgttttcatggtaaaataaattattaaatggtaaaataaatttctaaattttgaaatattatttgtcctttatccactctgcatgtagactccagacaggaagtggttaatctttgatgggccagttgatgccgtgtggattgagaacatgaacactgtgctggatgacaacaagaagctgtgtctgatgagtggggagattattcaaatgtcaccacaaatgaacctgatttttgaaccgatggatctggaagtcgcctctccagccactgtaaggtctcaagtttggcgtctgcctacaaattgcacaatttctgcaaatgtttatttttacttggtagctttactctaaattgaatgtacttatacattccattgtgaaagcaatctgtggtcctgaacgagcaggcactatctgctcacataccatggcagatttagtaatttgtttatttttttctcctattttggatcattttacaaaatcacacacataagctaggatcaaggaatgatataaaattaagtctttgtccctatagggttgtaagaaacagatgtcccaactcatcttaatgcccagtaggaaaccagatcttgtgcacaggactccctgcttaaccccatctgattctgtctcagtgattaactgaagtagattttctttcattatgggaaatctgatggtcaacaggaggcttcttagagctgctcgctgtagtcagtcccctgtgccaggcactgcatgtggccaaactgaatcagtggtgaggctagcaaaggacttggtgatctttgttcttgagagacataaaacagaaaagcatccatgactaggtgcctgggaacagatatacatcacgtgacctccaaccttcatctgttagaaggtatctacccatttacaatcacacatcgtttctggaaaatgtccttaatccacctcaagtgatgactgcccccttcctgtcgtgtgagcagactgagcctgtgaagcaatggaacgttttgagcagtacttggatgctaaccaacacgttccttccaggtttcccggtgtggcatgatctacatggagcctcacatgctaggctggagaccactgatggtgtcctggataaacacgttaccacagtcagtcagtatcattcagaaggaatttatagaaggcttgtttgatagaatggtccctctctctgttgaattcatcagaaggcatacaaaggtaagacaaactggaactttaagatttaaaaagtggaaaacttgaattaaatgtattaatctcaacaagttttttaaagctaatggaaaacatactttttgttaggtatgattggaatttttttccattttattcttttttatttcttttccttggtacaaatcttctcaggcctggagcccaggctggcctgtacctggagtctggctgcctctgcctaccaagtgctatgattacaggcatatgtcagcactgcctgctaaaacctcagctcagaccaaaataaaaaggcttgaactcataataactattatccaaaaacaggcaaagtgtagcatcttagaaatggagacagtgttatcagtataattattctttcttaaaactgaagacacctgaaaagcctgcctagccttgtgcattacagtatctagatgttattgttttctttttttaatctctccctgagtgtcacagatgtaggccagattggagcagattaaaagcaggtaaaggcaggtttattaggaggcagctctcaggtgggtccactaatctcccagatagaggtaagtgaagtcacacatccaggctaaagcgggggagggggtaatagagcttaggtgaggagagatggtgtgttggctaatgcctgggattgtgtctatacatggtcaaaagcttagcccctgggcgggcactcttgggtgggttgctagaaacttggagatgtattgacatgttagcctggagttctctccatgtggatggagaagatttttctgtgtgggcaggtttagaggaagaagagcagactgggtttcccaacttgtgcatggatgagcagaggctgcaacctagcagttttctcttatttcaggtgagcagttgtatattatattttcatgtgcctgtatgtgtttatgtttgtgtgcgttatttttccaaattttctaaaacaaatgcttggtagaaagataagaacgaaaataggggcttccaggcaaatacatgtgaggatagagacctgagtatctggggcagtagctgaggaatgtgcaagatgctgatgagaaaatgggtatcattgttctttcagtcattgactggcacctaagtgtgttataaacaggaagtaaccatgctccaaaccatttaaacatacatgctctgagagtcagaagaaaacaagatatagaattcgtgtttcttcttccctagcactgtcagaggatttaagtcctacaaagaaatgaactgtctatgtcatggacatgtgccttggctagatggcaaaaccaaacttttttatgtacactttctaacatagtaggacttctgttctgccttacagaagttatggatagccattataaccataggtgtctgcctaggaggaaccatttgtattggtctgaaagacccacaatgtgaggactcccccatgttctgactcaggagaggcaacaccccaaatcactcatgagaaacagtcttgatgcaaactgcaagaggatttttttatgccaagagcgctctgggacccacagtcatataccatgcaggggtagaggaccatggcccccgagtagctgggacagggggtatttaaaggaagaaaccacaactcaagggggtgggaagggcgttgttggaaaataccaaaaataccagttaagaatcatgaggaagtgcaaggtcacaagagtcacaaggaatgcctggtaattgtgtggttatttctcaagacagtttctatgagcctctaacaatagcacatttgcatagtgggttccatgaatggtcagggtggtcctttttgagcaaacactccctgaacccaggaagcgggtgggtggaggaatgtccctatctcttttatgattagcatgccttggagcattgagtcacaaaggtcacattctcaagcctgggcctaaaggcctagttttcttttttgtttttatactacacttttacaggcccatcccatcaatttcagttccatgttagccagaagctcagtcctagggtctgtaactcttatgaggtcaagatgtctgactaggaatcctgccacttctggtcctcagatatcacttcactgggtgaattttcacctgataaccacaaaggactgcacccatggaggctgggagagagagactagatgagaagatggcgggtgcacagtgagaacatggccctgagaaacgtgtgtgtttccgggttcactttatataattgtaacagtgggatgctgaaaacgtaaagtgaataatgtgtgttactaccgacattgagtgaacttggatatctctcatggagttgagtttactgtatgtattgtaaacaaatctttaggtgtgtttgtttgtttgtttgttttcgtgcaaaggtaagataaaacagagtgtaactcaaatggaacatttagactaattcagaaaggaatattaaactacagaaagtgattttatcacacagaaaagtctaaaaatactaattaaaaagtgtgtgtgtgttcctgggaattgaacccaggtctttgtgcatgctaggcaagagctatttcctcaatagatcctaaaccttttgaaggaatgtgttgtgtttatcttaatcaaagattaataaaggatagagtctatgcctctgattaagataaacaaataccttttaactggagaggtttttatagaatatacataccatcagctgctgtgatggctcagtgggtaagaacatctgccaggcaaaccggagttctattctcagaactcacaaaaagccagatgtgacagatgcctctgaaatgtcaatgtcaggatgggaagaagaggcaagacaatcactcagaagttcacagatcagctagttgtggcatagaaagaagtgcccctgcctcaacatggtggaaaaagactcagcccctgaaagacctccatgcaggtcatacatacatattataatatgtataaaaagagagcatgttactgatgcgtggtagtcactgtagagaagacatgaatgtagacctcagttttccttcataaatgagaatcacagagtaccttttcatagattccatgcctgctaggatgagacaggctccatagaggagatgcgggaacacgagtgcctggcgtcctttgtttgacagactcttctgattttccaggagctctctcctacttcagatacaaacttggtccgatccttaatgaatctcatagactgttttatggatgactttgctgatgaaaacaaacaaaaggaaagaaatgaccgagaaagtttctctttgctggaggtaaggccatacattgttttctgggtcttgcagtagaaaaacaaatgtcttttgctttcagcaaagctctccaatcaatgagacccactttgctcctgaaataggactcagggatgaggcatacattttgggggtccacctgtggttctgaattctctgttttctccctctcagggtgtctagatgcttttgcacactgagctagaaggatgaagggcagttctggatgggtgagagaaggccttctctgaggatcttagtgttacagctcttgcaggcaaaggccttctctgatgatcatcaatgagacagctctatgagaagatcttagcttgcatgtgtatactttattctgagagaaacaggggcatatgtggactttggagagtgggaagaagtttcagagtaaatgaaaattattggctagagtttaaagttctatgaatggctcctttgcatggagaggctttccaggaacccaggtacttgctggttgggttcttatcaggaaaagaggaagggaaacagagaaagttgaacaggtaaagagaggctgcccagacaaggtcagagaaagggaaaccctgctggtaaagggatttgtcccccatattgtccagctcagagagccatctggactatggtagactttgaccttaattaacagggtccaacaaagggaagttgtggaagcctaagagggaggaagaggctgagccccaaatgcagagtgctgttaggaaaactacactggtagagatagcgggatgtaagcttttgagtagtgaatgacagtgcagatcagtgagggtccaccactgaaaccaggtcctgaccagcctcaaaagtagtctctgtcacaaaggtttccaccaagccatgatttattattttctactttgacatttgtcctttttgtttaagaacaagtttatgttttgggaggataggtgtgtgcaagtgtataagtacatttgagattgaagaaagtaggaaaaatagacaattcataaataaatccataaataaatgttatttatgtgtgtagttattaattcatttttcagtattggaaactgagagcttcaggacctcaggcgtgctaggctagggattccccactaacctatattgtaagctaacagatttgaaaaataataatataggactggagagatggtgccatggctaagagagcttgctgctcttgcatgggaccagagttcagttcatagcacttaatccaggtgactcaaagaaggtatttgcagggacatctgtcaacacatatgctcatgtgcacatatctcacacaggcacacaatttaaaattaatataaatttgtaaagagtattactatcaatagaccttgatagaagttttagataaaaatactaatatgctgctcatagcataattttgccaatgtgtaatttttttcccatgtgaaagaggtttattgtgagggagagacaaagggagttgcagggtgagtggaaggggagagaagaaagagagaaagaaccaatgtgtaattcttacaactcatatattttgtgaaaaaaaaataatttaggggcaagtatttttgagaaagttttcacataaactagatgttacacaagcaagattaaaagcaaaagcctttttttcatggtggtggttggttgtttcaacattttaaagaagacagacttttgccatccagttaattggtgggtttagtcttccatgcatttgttttggaagaagcagaatgcttttggaaagacaaatctagtttgtataattaattctgagatagcatttcaagtaaaaagctagagactagttttatttaaatccagtgcacttgtatcaatatggaaatgaaatgtgtctgaattttcatcccccaaagttacttcaatgttctttcagagaataagctctagcatgcgtccgaaacacacaatttattagaatcatggttgcaaggtttgccttgacttgaatttgtgctgcattgcatcactttaaagattttatgagacataatttgggggtaaagtaatccttatagaatccttagattctataagacctgctattacaccatagctcacctattactacttggagatatcaatctggctggtgacgtaagtcatcaggagagactgaagcatctgttttaattgcaccctatcttctcatctctccaacacagggcatttttctgttttcattgatctggtctgttggtgcaacttgtacagatgatgatcgtctgaaattcgataagatcctccgagagcttctggaaggtccaatttcaaacctaactcgaaataagtttaagttactgagtggtactgagcaaacatcctcaaaggtgtttatagtgccatttcctgagaagggaacaatctatgattatcagtttatcccagaggtgagttctgaagcaagatgtgtaactgccagcctggcagagtccctggtgagacagagcatgtggtggctctggggttgtttgcccctcctggctcacatggtgtgaattagaggaaggcatgccagctttgctgccagacaccctgagttttagtcctggagaagttatttttttcctgcatagtcgtggatgggataattttcttaaatgtagttttcctcagtggtaaagggaactaataaccaatggaccagttgtacccattaaataaaattacacattatgatacgagccaagcacggggcacatgctattcaaggccatatcttggagattcatttgtatgtacatcacaggcacagagtacagtagaagtaaatctatgttcctatgaacagtttctgatggattggtctataagtcttgagttctgtttgttggttttgttgtaacttccacaaacaccatgcttagaacaaacattaggaataataaataattgaagcatatattgaaagaacctagtggggaaacccccactcaactcctgattcggcgtgcacccaagaatcacgaacaaacagagcatattgttgtaaaaacatgaggtagtttaatggtggagctctgggtcgaaacatatctcacgcaggagacagtggtttcgaccacaaggcttggaagctaggagtttttaaagaaaaggggctggggctaggggaggaattggcacggtttcacatgattggttcatttaaacataggtcagacgggtgggagatagggaggcagtgggccagtctgaacatgtaatgatgggcctgcccgggcatgtcctggcctgttctgctatgttctcagccccaggttttaaagctcacaaacaactctttgggctatttggcataaattacatgaatcacaggtctcaagttttatttcctttcaatataaacatagtagaattgggatcgtgccatgtaatcaatagggaggtcccctccccctacttaataaagagaaaactttccagatcacttgtgtttcttcagtagaattatttcccagggccttcctaaatctaccaggacacttttcaactcttcagtcttccacttttataaattcttagaagactagttatggtatgagcatcgattatttccttaagataaatttttagggctttctaattattatagctctagagttgtgctgctgatttcatctgacaaaggacttcatcctgtccaacacatatttactaattttgtttcaatttattcatacacttgaaattttcatagagaggaaagatagagaaggtgggatgttccctatggagggacctgggacgtggagctcttcagtggtttctctaaggtcacagcctttaaatgactgtacactccaacttactgatttttaatgtctcctttcctaaatgaggtcaaagatatatgtttgaattgattattaagaccatgaaaagaagctgctttttctcaccagttatagaataatctgcaaaattgtttttagactgaatataaattcagtgcccttattaaacttagtgtcttcgccaaatgtgtagctagttgctagaacacacaaaaatgaataaaatacagctgggctcagtgagtccatatgtttttcagaagagcatcatgccatggtccaggcccagggaatgtggtgcaaaggccaagtggaggagacatctgttgtctaggatagccaccagtgagaactagttgtgggtatttggcaatgccaaggaaagataggtctgcatctgatgtgttttgaatcactagtttatctctaagttggtattaaggacggataaggcaatattatttttctagagtggaatgattttgaaactttattataaaaaacatatataactaacaaactaactggatgcaaataggtagcatattttcatgataatcacaaattagaaatcttactatattataattcattgtgaatatggttaatatattattacattagttgtatatattaattagttaacaattttaaattatattacattttcattaaatgaatcttgcctgatataaccattaaagtcaagtgctgtaatgctgcggagtggactcagtcagcctccctcaatccgccaaagaaatcagggtcctggacaggcaggcaaggagttcacgtggagggtgacagaaacaagggagtgtattatatctgaatgtaatttgtctcaaagcgagcaccagtcttataagtgacttttacacaaaacagagaaatgcataggaaaagctaacaggaactaactgggataaaaatcaatgttaatgactgggatcaaaagcagccccacctaaggtcagcttaatcttagaaggcagggtcaagggcttcatgcccttgccatagttccaattctagtctttgtatagtctaccttccccctaggccattgtaaattcctgtctatgggtgtaactcagctatctatagttcttagtatttactctagttccttcttagaccacaaccttccttcttcctaggtctttgtaaattcctgcatattcgagtaacttggcttctcttttaagtatctgtagggaatctccatttgtcagaagaactcaccaactttcttttaatatgcaatgtactctgccatacttgactgcaataaagattctaagtatactttgcaagattgccctgagatttctaactctatgtaggagatagtaatgtctgatttctttcactgtctctcttacaatactagaggcaattctgaatgtcactgaagaggcaacattcttactgaattccaagcccagggtcagctcaaggactacctagggcattggctcaaggactacctagggtgaaggccagaaagcaaagttcgattttgcttaggtatttggcaagtcattgcttggaggcacctataataagataatactgaaagaaagcacacagatccatttacatggacaagtttggagcattcattatccaggatgccacggttccaggagactaccttttcgtgaacttttcgcctcaggattgtgtccaggtttctaggcctgtcaagctagttactactggagtgattgtagtactgtacagttaacttcttgggaaattattgcatgtttttgcaaaatattaaataaaattctttactctttaattgttgtctcatcaaattttgtcaatgtgattaaagaatccaatgttgatggagctgtcatagctgtagcttcagaatatctgagatgcccaagcactaccagtgcagttatagtcacatgggagcggagtttctcctccagtttcatagaaaattcaactttcagactgagaggataattaattgtgctaaagaacaaaacaaatgaataaacattagaattatattggtcttgatgttgtctacaattgcacagaagtacagagcctttgaaagtatttaacacctttgactgtttgcttgtttactgtaaacagggcttaggaagatgggataaatggataaaggatttggcagatactcctccaattcccaaagatgtacagtttaatgagatcattgtgccaactctagatacgatccgttactctgctctaatgaatttactgaccactcatcaaaagccttcaatatttgtaggaccaacaggaactggaaagagtgtttatatcattgtgagtactgtagaaatgtaaatgaatttggttaaagcattcatggtatcttaagaatgatcatgtttaaggttggcttaatttacaaatatactcaactattttgttgtttaaattgcaaggaatttgggatctattgtcttttatttttagaaactctttaaagatgtaccttttaaaaaagagaaagaaagctcttagcagttttgtctctggtgggctgcatatgttaggtgataatgatgttactgaatcactgtcccactcattttgatataagaataacttatttagggtgaggattatgcctcttgaaaactgtagccagacttgatggttacttatctgaattactttccagctgatggttactttgtagtaagaggatggacttcccacagtgggtttggaaccatccagctgttagctgtgtgttggcggctgccatgacagatatggcccacatctcagctaaaggaggggaaggaaggtgctattgccagactgttttccatccgaagtttccaattattccacattcctccagtttttgacaatgaattccactgaattctgcttgaaatgaaatgttgttaattcagtttagctgacagaatgatgactgggcatgaaagaaaatcatgaaaggcagtaatgatcacctaaaagacttgtgtctatttagagacaaaagcaagctaaattcttgtccttcctctaaggctggagataattttcctaacctctcagtccttgctggttcctgttgagtaatgtgtactattgtgaagatcagagaagatacatgcaaagtacctgggcaggtagagacaggctgttgctgtggtaactgttgttcatattcattccttctttgcattgttctgatatgtcaagttcaactcacgtttatcaacaagtgatgcttcatgtttattctgaaatgacaaaacaagtttcaactgtcgctcactcttattttctgttgtgtagaattttcttttaaatcaactcaataaggacatctacaaacctcttatagttaacttctcagcccaaactacagcagcccaaactcagaatatcatcatgtcgaaactggacaaaagaagaaaaggagtttttggccctcctttaggcaagagaatggtaagggcttctccccactgttctatctctagtataatcctgggcccatttatgtccccactgccacaatcagaacaaggaaacctggcaagctaaagattgtcatctttggtttattttttgttttaaatgatttgatgtgcatgctttgtgtgtgtgtgtgtgtgtgtgtgtgtgtgtgtgtgtgtgtgtttgtgtttgtgtgacggtacacatgttgtggcaaaaagacaacttttggaaacaactctctctccctcaaccatgtattctcgtatcaaacccagggctttagtcctgacagtgggcacacttaccctctgagatgtctttctatctcattggtccttttcttttaaatgaattctttttaattttaaactttcctaggctgggaatgtaatataacaagtagagtatttagctagcttgcacagagccctgagtttgattacagcaaactgtgtgtagtaacaaaagcctgtgaggccagttgtaaagagatggagagagagctgccagaaattcaaggtcattctttgatatatattgagttcaaggccagccttggatacataagaccttgcttcaaaacagaaaaaagaaaaccacaaaagaaaaagaagaaaaaaaacttttcttaaaacaggtcatatttgtttttaaaaagatcctacaactggtcatatttgtatgacaatgacatcttaatgttattttaagtgccagccctttgatacttttaagctgctgctttataaatagaaaacaaaatattgaaatgaaaaattaaactttaattcctgtattaacactcttaacatgtttaatgctttcttttctttaagaactctctctacaagacgacttatttatgcttctttgtaaggaactccattctcaactgaaccttcattgctcaaaggctctactcacctaacagttgcacctttctttgcaagctaataattcagagtgcttcacaagggaaaaaaagtacagtgagccacaaatggcctaaaacgatttgtatgccttgaaccaccaacctatacatattagcagtgaggaaggctccttatttctgtaggaacgtaaagatagcatttttgtttgaaaaagaaacaaaatcacctctcagctatacatcctatagctgtaagaatacagactaacactttatctgcatcacttatgtagtagggttctatgtcaagtgctaatattttctattctattcctttattttatgtttttcttttggagacagtatctcactaatgtagccctaggtaggctggcctcaaactcagagatctcctgcctctgcctcccaagtgcagggattagaggcgtgtgccacaacaagaggcttgagtgctaatattctctaatctcttttctttcttagatagtctttgtagatgatgtgaatatgcctgcccgcgaggtctatggggctcagcctcccattgaattacttagacagtggttagatcattggaattggtacgacctcaaagattgctctgtgattaaactagtggacatccagatcatgtgcgctatgggccctccaggtaggcatacattctgagtttgtgactactaagagagaaaaccactctggttgcatctacagagatgactggagagcagagaatacatcccagataaccatcattccacactagtgcacttcccttctctctcgttcctgcattaaaatttgctaagagtaattaaaatagtgagaacccagaggaatggactcttctgttccttttcctttttcaaagaggagtttgtaaactgagctaatcctggcatgcctaaaatggctcaattctgctaaccggagacctctcactatctttctgccttcaacctgacattcaactaagaaagaactctgaatatactgcttcagagactatgtttatgcacagtagatgctaaaattattacatacttttaaaattacttctttactgagaatataagagaaaatccctttttaaattaactgttatttgtctgtgttttttatttgttgaacctggagtgtggtaagcctctgtccctcccctgatctttgtccccagacctatatactttaaataggatacagttttaaatatcctttaagtatgatactgttctgtgaagtagcatgttaaatgctgtcacttacagaagtcatgtgtttgaaaatgtgctcattattctatgggaggtcgacatttctcaggtcttataagtacccagtgaaatggatgtatgtacttatagcctagtcttacatgaaattggtcaagacgtgggggaggcgtaagaatagattaaccaaatggaatttactcaaataatttgattagaaaaacctcatcttgagtggaaataagttgtggtattagtgtctccccaaacaggtaattacttttaaatcttttgacataccatgaattgatcatcttctaggttactttaaactgccaaatactgaagagaatactttggcattattctagcaatattattaaggaccatgctttctaatctttaggtggtggccgaaatccaataacccctcgttacatgagacatttcaatattgtaaccatcaatgagtttagtaacaagtcaatgttcacaatcttctccagaatcctggcctggcatctaagaacctggtaggtaatttaagagtgcttatcttttctttctcattaaagaatataaagtcttatagcaacatatcaaataagtaatagttattacatgttcctatgaaagcatccctagacagggaaaggtaacaactgacgtcactctctcacaaatnnnnnnnnnnnnnnnnnnnnnnnnnnnnnnnnnnnnnnnnnnnnnnnnnnnnnnnnnnnnnnnnnnnnnnnnnnnnnnnnnnnnnnnnnnnnnnnnnnnnnnnnnnnnnnnnnnnnnnnnnnnnnnnnnnnnaacaactgacgtcactctctcacaaatgggccactgcactctgttctgcagtaagtccatgtgtgggtgcttgccttgaggtttcataactgagtacaattaaggctgaaaaaaagtatccagtttatgttatgagtttgatatcatcttacagaaacctgcagaggtgtttccatgcccaaatttcagaacatagacttgagcctcttccctggggaaatgttccccagctctggggattcaactttaacccaaaagatgagtgggtattctggagccattcttacttggttgtcagccatctaggctctctggtgcctattcttgggaaattgttattttgttgccaaacccaacgatgatggagcagacacttggcttctcattaaccaagagttgaaagcagctaatctttccatatatatatatatatatatatatatatatacatataatttactctaatcatatattttattcttcgtttcctttgtaatttttattttccctttttttctttggaatacctatttttttttccattttttattaggtatttaactcatttacatttccaatgctataccaaaagtcccccatatccacccacccccactcccctgcccacccactccccctttttggccctggtattcccctgtactggggcatataaagtttgcaagtccaatgggcctctctttccagtgatggccgactaggccatcttttgatatatatgcagctagagtcaagagctccggggtactggttagctcataatgttgttccacctatagggttgcagatccctttagctccttggctactttctctagctcctccattgggagccctatgatccatccattagctgactgtgagcatccacttctgtgtttgctgggccccggcatagtctcacaagagacagctacatctgcgtcctttcaataaaatcttgctagtgtatgcaatggtgtcagcgtttggatgctgattatggggtggatccctggctatggcagtctctacatggtccatcctttcatctcagctccaaactccgtctctgtaactccttccatgggtgttttgttcccaaatctaaggaggggcatagtgtccacacttcagtcttcattctccttgagtttcatgtgtttagcaaattatatcttatatcttgggtatcctaggtttggggctaatatccacttatcagtgaatacatattgtgtgagtttctttgtgaatgtgttacctcactcaggatgatgccctccaggtccatccatttggctaggaatttcataaattcattctttttaatagctgagtagtactccattgtgtagatgtaccacattttctgtatccattcctctgttgaggggcatctaggttctttccagcttctggctattataaataaggctgctatgaacatagtggagcatgtgtccttcttacctgttggggcatcttctggatatatgcccaggagaggtattgctggatcctccggtagtactatgtccagttttctgaggaaccgccagactgatttccagagtggttgtacaagcctgcactcccaccaacaatggaggagtgttcctctttctccacatcctcgccagcatctgctgtcacctgaatttttgatcttagccattctgactggtgtgaggtggaatctcagggttgttttgatttgcatttccctgatgattaaggatgttgaacattttttcaagtgcttctctgccattcggtatggaatacctatttttttttagggatctaagagatataaaattggaaataccaaaagtcaaagagttaggaagcacttggtttgagcatagtggcttttgtctggttcttatgcttttgtacacacttgaaatctgctatacctgttgatcctgctgaattccaaaggtttcttcagaaacctcattaaatactaaatggaaaacatcttgaaaataagttaaaagtcgagtattataattagaagtgggaatgttataagccaaattgattgaatcacaacaaaaatgtcacattagtcacatgaagtattcctgtgtttgctaactttttttcttacatttttcccctaagttataagtttccagatgattttctagacttgactacacaaatagtgaatggtacaatggccctgtacaaagatgccatgaagaatctcttacctactccagctaaatctcactatttgttcaaccttcgcgatttctcccgagtcatacaaggtgtttgtttgtcaagaccagaaacagcagaaaacaaagaggccattaaacgcctgtgggttcatgaggtaaaattctgaatcattcaaatgtgagtacagaagagcaaggactactgtggcagtgactgagtcaaagacttagggatgcttgctgtgaagcccattaggtacttggcactaattaggccattgtgaaagtacattttaaagtatttaataccataaattttaaggtacttaatgtttaatcttgcattttggcatacagagtatcctgaagtatgaattcatttcagtccatttcctttaagcatggtaaccctccctaggtccttgttaaacaggttttgtttgtgataagaaatgttaaacggtagttttataaacagtgactgtatcagttaattttgttatttatttgacgatggcctaaagaaaataaaattatgaagctaaccagtgttaggatccctagtttgagagctcaaaagatatctctaagttctctgggaaataaggcaaggatgtcattatgtctatgtgcattttcttttaaagacttggtagaagtagggaggaagagaaaacaaaaaagtgacacatagaaaataatagtttggcccgtccggtccactccagcaccagggtgccttgcctacggagtctccggacacccacaaggacccacacaggatcatccacgggatcctaagacctctgatgagtggaacacagcgtctgctccaatccaatcatgcaggacctgagactgtattaactaggaaagcagataacccggcctgatcaggggcacaagtccctcccggtccactccagcaccgaggttcctggcgcgcagagtttctagacaccccaaagtcctcacaggaccctctacgggatcttaagacctatggtgagtggaacacaacttctgccaggaggcaggttcgaacaccagatatctggggaccttccctgcaagaagagaacttgcctgcagagaatactctgaccactgaaactaagtagagagctagtctcccaggtctgctgatagaggctaacagagtcacctgaggaacaagctctaaccagagacaactataacatctagctataataactcacttaaagaaatacaggagaacactgctaaaccggtagaaaaccttaaagaggaaacacaaaaattccttaaagaattgcaggaaaacacgaccaaacaggtgatggaattgaataaaaccatccaagacctaaaaagggaagtacacataataaagaaaacccaaagtgaggcaatgctggatagaaaacctaggaaagaaatctggaaccatagatgccagcatcaacaacagaatacaagagatggaagagagaatctcaggtgcagaagattccatagagaacatcggcacaataatcaaagaaaatacaaaatgcaaaaggatcctaactcaaaacatccaggaaatccaggacacaatgagaagaccaaacctatggataataggagtagatgagaatgaagattttcaacttaaagggccagcaaatatcctcaacacaattatagaagaaaacttcccaaacctaaaaaatgacatgcccatgaacatacaagaagcctacagaactccaaatagactggaccagaaaagaaattccacccgacacataataatcacaacaacaaatacactaaataaagatagaatattaaaagcagtaagggaaaaaggtcaagtaacatataaaggcaggcctatcagaattacacaagacttttcaccagagactatgaaagccaaaagagcctggacagatgttatacagacactaagagaacacaaatgccagcccaggctactatacccggccaaactctcaattaccatagatggagaaaccaaagtattccatgacaaaaccaaattcacacattatctttccacgaatccagcccttcaaaggataataacagaaaaaaaccaatacaaggacggaagtcaccccctagaaaaagcaagaaagtaatcccttaagaatcccaaaagaagacaaccacaagaacagaatgccaactctaacaacaaaaataacaggaagcaacaattacttttccttaatatctcttaatatcaaaggactcaattccccaataaaaagacatagactaacagactggctacataaacaggacccaacattctgctgcttacgggaaacacacctcagggaaaaagacagacactacctgagagtggaaggctggaaaacaagtttccaagcaaatggtctgatgaaaagagctggagtacccattctaatatcgaagaaaatcgacttcgaaccgaaagttatcaaaaaagacaaggagcgacacttcatactcatcaaaggtaaaatcctccaagagcaactctcaattctgaatatctatgctccaaatgcaagggcagccacattcattaaagacacgttagtaaagctcaaagcacacattacacctcacacaataatagtgggatacgtcaacaacacaccactttcatcaatggacagatcatggaaacagaaactaaacagggacacagtgaaactaacagaagttatgaaacaaatggatctgacagatatctacagaacattttatcttaaaacaaaaggatataccttcttctcagcacctcacgtgaccttctccaaaattgaccatataattggtcacaaaacaggcctcaacagatataaaaatattgaaattgtcccatgcatcctatcagaccactgtggactaaggctgatcttcaataacaacataaataatggaaagctaacattcatgtggaaaccgaacaacactcttctcaatgataacttggtcaaggaaggaagaaagaaagaaattaaagagtttttagagtttaatgaaaatgaagccacaatatacccaaacctatgggacacaatgaaagcatttctaagagggaaactcacaactctgagtgcctccaaaaagaaacaggagagagcacatgctagcagcttgacaacacatctaaatgctctagaaaaaaggaagcaaattcacccaagaggagtagacggcagggaataatcaaactcaggggcgaaatcaaccaagtagaaacaagaagaactattcaaagaattaactaaacgaggagttgtttctctgagaaaatcaacaagatagataaacccttagctagactcactagagggcacagggacagcatcctaagtaacaaaatcagaaatgaaaagggagacataacaacagatcctgaaggaaaccaaaacaacatcagatccatctacaaaaagatatactcaacaaaactggaaaacctggatgaaatggacaaatttctagacagataccaggtaccaaagttaaatcagtttcaagttaacgatctaaacagtcccatatcccctaaagaaatagaagcagtcgttaatagtctcccagccaaaaaaagcccaggaccagatgggtttagtgcagagtgctaccagatcttcaaagaagatctaattccagttctgcacaaactattccacaaaatagaagtagaaggaactctacccaactcattctatgaagccacaattactctgatacctaaaccacagaaagatccaacaaagatagagaacttcagaccaatttcccttatgaatatcgatgcaaaaatactcaataaaattctcactaacctaatccaagaacacattaaaacaatcatccatcctgaccaagtaggttttattccagggatgcagggatggtttaatatatctaaatccttgaaagtaatccattacatgaacaaactcaaagacaaaaaccacatgatcatctcattagatgcggagaaacatttgacaagatacaacacccattcaagataaaagtcttggaaagatcaggaattcaaggcccatacctagccatgataaaagcaatctacagcaaaccagtagtcaacatcaaagtaaatggtgagaagctggaagcaatcccactaaaatcagggactagacaaggctgcccactttctccctacctcttcaacatagtacttgaagtcctagccagagcaattcaacaacaaaaggagatcaagcggatacaaattggaaaagatgaagtcaaaatatcactttttgcagatgatataatagtatatataagtgaccctaaaaattccaccagagaactcctaagcctgataaacagcttcagtgaagtagctggatataaaattaactcaaacaagtcaatggcctttctgtacacaaaggataaacaggctgagaaagaaatttgggaaacaacaaccttctcataatcacaaataatataaaataccttggcatgactctaactaaggaagtgaagatctgtatgataagaacttcaagtctctgaagaaagaaattaagaatatctcagaagatggaaagatctcccatgctcatggattggcaggatcaacattgtaaaaatggttatcttgccaaaagcaatctacagagtcaatgcaatccccatcaaaattccaactcaattcttcaatgaattagaaagagcaatctgcaaattcatgtggaataacaaaaaacctaggatagcaaaaactcttctcaaggataaaagaacctctgatggaatcaccatgcctgacctaaagctgtactacagagcaattgtgataaaaactgcatggtactggtatagtgacagacaagtagaccaatggaatagaattgaagacccagaaatgaacccacacacctatggtcacttgatcttcgacaagggagctaaaaccatccagtggaagaaagacagcattttcaacaaatggtgctggaacaactggttgttatcatgtagaagaatgtgaattgatccattcctatctccttgtactaaggtcagatctaagtggatcaatgaactccacataaaaccaaagacaatgaaacttatagaggagaaagtggggaaaagcctcgaaaatatgggcacaggggaaaaattcctgaatagaacagcaatggcttgtgctgtaagatcgagaatcgacaaatgggacctcatgaaactgcaaatcttctgcaaggcaaaagacaccgtcaataagacaaaaagaccaccaacagagtgggaaaggatctttacctatcctaaatcagataggggactaatatccaatatatataaagaactcaagaaggtggactccagaaaatcaaataaccccattaaaaaatggggctcagagctaaacaaagaattctcacctgaggaataccgaatggctgagaagcacctgaaaaaatgctcagcatccttaaacatcagagaaatgcaaatcaaaaaacaaccttgagattccatctcacaccagtcagaatgactaagatcaaaaattcaggtgacagcagatgctggcgaggatgtggagaaagaggaacactcctccattgttggtgggattgcaagcttgtacaagcactctggaaatcagtctggcagttcctcacaaaattggacatagtactactggaggatcccgtaatacctctcctgggcatatatccagaagatgtcccaaccggtaagaaggagacatgctccactatgttcatagcagccttatttacaatagccagaagttggaaagaacccagatgcccctcaaaagaggaatggatacaaaaaatgtggtacatttacacaatggaatgctactcagctgttaaaagaatgaatttatgaaattcctaggcaaatggttggacctggagggcatcatcctgagtgaggtaacccaatcacaaaagatctcaaatgatatgtactcactgataagtggatattagcccagaaacttagtatacccgagatataagagacaatttgtaaaacacatgaaaccgaagaagaacgaagaccaaagtttggacactttgccccttcttagaatttgaagcaatcacccatggaaggagttatagagataaagtttggagctgagacaaaaggatggaccatctagagactgccatatccagggatccatcccataattagcctccaaacgatgacaccattgcatacactagcaagcgtttgctgaaaggaccctgatatagctgtctcttgtgagactgtgccgggacctagcaaacacagaagtggatgctcacagtcagctattggatggatcacagggcccccaatggaggagctagggaaagtatccaaggagnnnnnnnnnnnnnnnnnnnnnnnnnnnnnnnnnnnnnnnnnnnnnnnnnnnnnnnnnaacgctaagggccaaaaaaagtgggaatgtgtgggtaggggagtgggggagagcgtatgggggacatttgggggtagcatttggaatgtaattgaggaaaatatgtaataaaaaaaaagaaattaatagtttgttattttaaatgatcacagagactacagaatggtggaaacacctagccctatcccatgttccatatgtgaataatatagttgttttcatttttactaacctagcaattggaatatgctgctacactaaacccatgtgctacagtcattaaatttaaaagatcccaacaaatcagcttcccaagggactttagatacaatacttgaattcctaaatccttacaaatacaaatctgaattctagtggccatctgtacttggaagttacagcctcagcaaggcaaatgttactcattggaggggatgacctccctgtcattcttgagttagctaactggctgagtatgggtcatagctggggacagggacagaggctcaatgtttagtgggcaaatgaatcatagaaatatcctagaagtcagagagagggacaaggatgaagcattagggtcattggtagagtgtgtctcctgttattatgtggcctgttgctaaaagacagtggtcacttctaaaagtccagatcccacaccatgaagaccatgcctccctgcagctgggtgtggagcagagttaagaagtctgaaagttaagaaaggagctgggcgtggtggtgcacgcctttaatcccagcacttgggaggcagaggcagacatttctgagttcaaggccagcctggtctacagagtgagttccaggacagccagggctatacagagaaatcctgtctcaaaaaaccaaaaacaaacaaacaaacaaacaaacaaccaaaaaaaaccaaaacaagacaaaaacaaacaatcaaaaacaaaaaaaggaagaagtctggcaagccttgaaggctctgcgtatgggacctaacttttctctcctcttcattacaaacacagcggtgcacaaaatcacgtgaagttaaagttccctccagtccctcagacttacaaatgtctgatattctatctgttcctgggatttgctcagagaattgttctgaagactgctctctaaggagactcctctctaccccacccactactagtctctcctctcttcttcatgaagcaactctccaggctttaaagggaagagcttccttctccgtgaggcctcattatgtctacatttatatttattgtattgtttctgtctaaggctgttcatcccaactagaggcctgagcacagccttgagtacttctgtcctactaaaccagatcttctaaagtgaattacgcactggctcgcttcccaaccaactgctatagtttttttcatcatcacctttatatgccttatatatttaatactttcttgaggtggatactttaaccaagaaccattagatcaagtggctttagatcaatagcaggaattttatctcaaacagttctagagaccaagtcggggagtggcagtgtgggtatctgtggagagtctgcttgtttgtcgacacagctttctctctgtgttcacaagatcaaggattctacagttttgtttataaaacattaatctatttatgagtactctgccctgtaacttgattacctccccaaagttccacctattaataccatcatcttggaaggtggatttcaacacataaattctgcagttacacaaagatttagaacaaggaagcatttcatcatgagacaatcttactctaggaaacatctagaatttttcatctaaggagctttgcccttgatcactcttctgtctgcagtattttcttctcagtatatggaatatccgtggtcattacttagagatccttttattatagtacagttgtacaagccaccccaaaccatgtcattggccattactttgatgtattctttgtaacatagaatagaacctggcacattctgaattttgtttgcttttttgcttgctgtctctgctactgtatcagcctttgcttgtgttccccaatgtgtagtatgtaacaagcactcagtaaatagtggtgcatgagtacataagggaggagacaggcaacgtggatattacataatacacttcatcacttgggaatatacatgctgttgattctatctagccaatgagtagtttatatatgctgttgtgtgtgtgtgacatactcagtttcttttgagccctttgcagattctatcagattatttaactttaacagtggctaatagatctttggatattgaacaaggtccatagtaaaataacttgtaatttttatgactattttatattctcagatatatatatatatatatatatatatatatatatatatatatatatatatatatatgctggcatataaatatgttcagaattttaatccagtggttcacagagactggtttaggtacctacaccccttcctctcaggttgtctggagggcttttctgcctgatgttgagtatctgaacctaacctcctccctgcctcattgaggtctccactgaccatgctgtttaatactacaacccaacagcccactctcacccagcagtttttctcttctccactttccatagtatatggcagctcctggtttgttggggtttgtttgttaggtttattgtcatctcctttagcatgtcacaggacaatttcttttttcccctttctttctctgatttattaaagcaaggacattggagcattctttatacaggatgccacagttccaggagactaagtttccatgaacttttcgcctcagaacagtgcctaggttttcggggcctgtcgtgcttgtcactactggagtagatgtagcacttacactcttacttgcacaggtgttctcagggatgactgacactgaaccaatgggtgtgtcgtcccctggggaagatcacctctcacactctcatcttttctcagttgcctatagttctttgtgtaaagttgcagcctttgggcttttcctcatccagcttggcatgtctattagtgtcatcctcgttcagcttgtatgtgggcacttatgctggtgagactttgtaggtacagtttccgatgttactaggagacatatcagcaaccttccagatcctctggcttttatgatctttctgcccgtcttccacattgttccctgagacttagatgtggggatgttttaaagatgtatccattgggtcggggctccacaattctgcatttttattgattgtgggtttttttgtagtggtctccatctgttgcaaagataaggttccttcatgagggctgaagactgcagttatcttgatgaatgttttagattgctgttagggagtaggctggtttagtacagtactggttacaggtttccctgcagtaaccatgacattaccagcacttagtgtagttatctacatttcaagtaccagacataatttccctcttgaagtggtcttaagtccaattagagagctgttggttactcttaaacgcgttctcacgactggccaggaagaacacaacaaaccagaatcttctgcggcaaaactttattgcttacatcttcaggagcaggagcgcaagccccaagccccaaaaacgaaaggccccccgcttacatctttaggagccagagcgccagcgcgccagagcgccagagcgcagagcaagagctctattgtttacatctttaggagcaagcgagcaagagccagagccagagagcaaaagcgcaagagcgcaagcaagagagagaatggcggaaaccccgtcccctttaaggagaattatcctttgtctaggacgtatcactccctgattggctgcagcccatggccgagttgttgccatggggaaggcagagtacatggggtagagaaatacccttggcacatgcgcagattatttgtttaccacttagaacacaggatgtcagcgccatcttgtgacggcgaatgtgggggcggctcccaacatctccccctttccttttaataagagcaataggccacccatattaatgagagtggagatagaggtcaaatccccagtgtgcaggtaaaggagccatgtacaggattagctcttaggctcacaggcttttacccagagcaaccctgacctgctcccgtgtcgttttgcctggagagaaggacacttggacactcaaccttcttgaaagatgacatgtctccctagaataggctcatatatgccgcagagcccttctactgcagtgcttagcagtgcaactctctcgggctgctgaagcacactcactctatcccgtgcaatgagactagcctcgtgggatgcaagagctgagtggccagcgacctattgcctaagcatagatatatcacgggaagcaccatgttctagagctgcaagtgcctgggcaataaccaccttgtctctcctagtttgggccttaagcttacagaccaaccaaagaagcaacactaatccacagcaaagtgtatctccaaataatatcaatcccacccattctttaaagaaggaaaatgctgaggagatccaattgggtaatcctttgatcagggacaggtccaagcgcgtggagttgacctgaagtctcaattcccgaaggatctgttcaaattcagccgtccaattctgtaacatatactgaaaaagactttttgacaaattagctgccctagtaaatttctcatactgaatggaagtaacacacaatcccggaaacttttgttcacatcccagctgagctatttgccataatacatctagttgtttctggacaagatctatgagttgattaaccagcatgagaccaccctgtatcttgacattagctgaggcctgtttatctatgactgtagtcactgaggctgacaaagtgttaatggtgtcagtcgtctggacctgtccagacagagccaaggctgtctgaatcaaggccaaacccagttcctagttagtagtaaaaaagcaggggaatacttgagcattatacatcaccgtcattaggagtggaaatgtcgacattatcccccaacgctgctctctctttattattgacgccctggacatcaccaagacgagggacatcagtattcccttggtcagtctggatttttcgggtgagtctttctggtatccaaaatgggttgtcttcattctgtgggaaaacacagatagctcccctggatcttatcaaaataggatctgggccataccatttattatcaaggacatttttccatttaaccatctcattgggcctatctggctctgaacaatgacgttcagccgcagtatggccatgaacatcaatatttaaaaaattgagtgtaaagagtgccatagacacagacactcttggtactcggggtagagtctcctcaattcccctcttctgttttataagataggctttgagggtgtgatgcgcacgctcaacaataccctgtccttgagggttgtatggaagtccagtcaggtgggtcacgtctatctgacggcagaactgctggaatttttgagatgtataagctggtccattatcagtcttaaggagtttgggtttcccccaagcactccatgcctcaagacaatgttgaatcacgtgtgaggccttttctcctgttaaaggtgtggcaaacattacaccagagcaggtgtcaatagaaacatgtaaatattgatttctcccaaaggaggaaatatgcgtgacatccatttgtcagacctgtaatagcctgatgccacgagggtttacccctacatgaggagtagataaaatttgacaacaatctaaaggcattattaagtaatcagaatcatttccagtagaaccaatccctctggcagctctaggaataccagaggaagaaaaaacagccatgtaggcttggcaaaattattagttgagctattctgtccctttgtgatatagaaaagacaacttgaggacaagaacagagaacctgaagttcccctttataatcctgatctacaactccagggtggacaataagaccttgtaggctgcaagagcctgcctctgtcatactggccacaaaatctgagaaggactcttaaggtccctggatgatctttgttaattgtccagtggcttcacctgctcgggagagcgccttccaggccctaatagccttttcatttgattcagaactattaagaactggctccttgagctcatctagtgatgagtagaggctccttctcctagaagcctccgctgattgatcttttttcttttctttttccttctccttccttccaatctctccccaggtatttttacctgacctaaacttttcctcgggttcaagacccgtggaaaggcctgtatacttattttgtgtaccatattttctctttgctcctactctctctccccgctttacttctgatagattgtctcgaatttcgtccagaatccgccctgccttaaccacttgataacatgtgaaaaggaacaaaagggcttctaacactagagaaagttcaaggtcaaacataccttgtaaagctatttcccactttacttctgatagactgtcttgactttccttagaaagttcaagaccagacttaccttgtaaagctgtactcactggtactcctgttccccagctgaagagttctgaattcacgcagttgaatccttctcaacagtctgtgatgcgggaacactttattaccgccgtttcccagctgaagagttctgaattcacgcagttgaatccttctcaacagtctgttttacgggaaccttcattaccataacccgcagttctggttccggaatgagggatcttccttgcgccggtgatggttaactcccgtcccgagttttcttgtcccgggttttttttttttttttttttcttcccggattttctcatcccgggttctcggcaccaactcttaaacgcgttctcacgaccggccaggaagaacacaacaaaccagaatcttctgcggcaaaactttattgcttacatcttcaggagcaggagcgcaagccccaagccccaaaaacgaaaggccccccgcttacatctttaggagccagagcgccagcgcgccagagcgccagagcgccagagcgcagagcaagagctctattgtttacatctttaggagcaagcgagcaagagccagagccagagagcaaaagcgcaagagcgcaagcaagagagagaatggcggaaaccccgtcccctttaaggagaattatcctttgtctaggacgtatcactccctgattggctgcagcccatggccgagttgttgccacggggaaggcagagtacatggggtagagaaatacccttggcacatgcgcagattatttgtttaccacttagaacacaggatgtcagcgccatcttgtgacggcgaatgtgggggcggctcccaacaggttaccaccaaggtgtgtgtgccactactgcacagttagggttgtcatgccacactggtcattgatttataggcatcatcctggatgcaaattatttttcatgtattgatcactgaagcaaactattgtatcaaacagacattgttaaagttaatatttaaactttattatgagataatcttaagtattcatgtatgcttctaatacaacttgtagatagtttatgatggtattttgtacctattttatgtttttataatttttacaaaataaataagcaaatataaaaatattcttaatgccacttttaaaattattcaggtcctcagagtctattatgatcgccttgtggataatgctgacagaagctggcttattaactacatacaagaaattctgaaaaattacatgcaggaagattttcatgacctatttaaaaacttggattttaatcatgatggcactgtagaagaagatgatttaagaagtttaatgttttgtgatttccatgatcctaagagggaagattttggctacagagaaattgcaaatgtggatgctctcaggatgattgttgaaggccatctagatgaatataacaacatgagcaaaaagcccatgaacctcgtcttgttccgatttgccatagaacacataagcagaatttctcgaatcttgaagcagccacggagccacgcccttctggtgggggtgggcgggagcggaaggcagtcagtcaccagacttgctgcgcacatggctgattattcacttttccaggtggaaatctccaagggctatggtagccatgagtggcatgaagatctgaaagtgatcttaagaaaatgcgcagagagtgacatgcagggtgtcttcctgttcacagatacacaaataaaaagagagtcgtttctagaagatgtcaacaatctcctaaacgccggggaggttccaaacctctttgctttagatgagaagcaagaaatatgtgaaaagatgcgtcagatagatcgccagcgggataaaagcaaacagacagatgggagccccatagctcttttcaacatgtttattgactgctgccgcaaccagctgcatgtggtcctggccatgagtcccattggagacgcatttcggattcgtcttcggaaattccctgctcttgttaactgctgtaccattgactggtttcaggtatttccatgtaaaatttatgtagagtcctcgaaatgttgaatctccatcatcactgtgaaatattttatagactccacctcaaaatgatgtagactagcaaaatctttgattttttttatcataatgtatcatatgcagttatacaagcataaatcattataggatataatccattaatatcaatatatcccagaacagaattttaggattattctgtccttatatcaggatcctgataggaagctccgtactcgaagtcctagctgagaagaatttgggagggactggtcacagaagcactgtgtggggaagagagtcaagagagcatgataggacatgtacaattcagacagacccccaccctctggcttattctaccctctgccctatttaccaaacccaagaaaaattcaagggaaaacagtgtggggatttttgtagcagagctttgtctcagaaagcacaggctgaaaccagagaagctatgacaaagatggtggggtaggggggagagaaaagtagtaaatgtgtgagaagtcagattctcctggttttctgtggtaccaccaagcagcctccccacttgtatgtagatctgacacaaccacttacggtgctggaaatttacataggctctataactctatggcctcacaatttacttcagatgagcatcctttgttcccttctttcttgctttgtacctactaggtaatattgtaacaagaagagatgaggaggtacatccatggaaccaaggctttctaaggacagcctttaaaagaaaaacaaaacaaaaaaaaaaacaaaactgaccaggaccaagaccttgggaaagacatgaacttgagaaaatggggctggatggaagagaaggggttgggataatggcagtagaggaactcagagggaggtgtcatggttgagatcagaaagttaggaagggccaaatcagatacaaatttgtaagttggtagggatcttttcaaatgcacactgggaggacttcctgagttgtactgggaagtgtgctatgagggtgttttctattttgtaaagacattttgtgtctttctgaagaacaaaggcagcaagggtaacagtggaacttattggctaaagataacaaacacgtgagtgaggatggctgtggtgtggaaagaagggagtttggacatgatgaggagaagggagagttaggcatgcaatgctgtagaactttctcatgcaacacatggaggtctgaggaagtggagcagaggaaggatgaccctgtgttttgacacgctggtgactgatggtgaagtttgctgatttgtggaagaatacagctctgatagggaaggcgatattgtggtacaggcttgttgacattgaggtgcctgagttatccaagagataggttgtagtcatttatgtgattctgtcctttaacaggaaattattaaaaaaagagagagaggaggattaaatgaaataatacatagcatacacagggaaacacacattgagtttagatccccttcccctttctttgtcctgttaacacttggtaactatgtctctaaacccagagtaaactggagagagttgctaccagccctggccaccactgtcattttgtctcaagcaggcaagggcaggaaaaaggctcttcatgagcatgtctttcccactgtatgttccaaactattcctctctatttccagcccacttattgcaaaaggccgcagcagtgacaagatcatattacccaccttgatgaattgctaaaatattcattttaaatttagtcatggccagaagatgctctggaagcggttgcttctcggttcctggaagacattgagatgtcagaggaaatccgagaaggctgtattgacatgtgtaaaaggttccacacttctactatcaacttatcaacatccttccacaatgaacttcaaagatataattacgtgactcccacctcctacctggaattgatctctaccttcaaactgttgttagaaaagaaaagaaagtaaggatgaaatgttctgtctttaagtaagcaatgaaagttttaaaatgtttgtataaaaaatgacataacaatggtgcaaacaaatgtgatgaatataatgttttactaaaactgggagtcagtgcttacagagtcatggtaggaagcagtctattcttgggtgtaatgatgttgcctagtacactataaattaatcattgcatttactgcaagaatcaaggtatcactggggaaatggctgtataatcatgaggaccttaattgtaatccccaggaccccagcagggagcagacgctgggtgggcatgacagcgtgtgtttataatcccagtgctagaagatagagccaggccaacccctgaggcttgctgcccagccagctttatcaaagtagatggtgttggaggaatgaaaccccaagttgaccactggctgaaaaacacaaatatacatgtgcaccttcaagaacatgtttcccccacacatagaagaaagaggtgttcccttagggcagtgggtaaatgcctaggattccttgacaatgatgttgagtaaggatcatttaagagtggtggttttccccttttcttaggaataagctgatgggtaagccttctctttgggatctctacagccacaatctcagagaccgccattcagtttttagagctggcttttcttctccactaacctttcatttgaaaaatgtcaatacagagcgcaagaggcatatgctatagccagtgtcaacatgagtttttcagagaaactgatctcaaacttcctttggttacactcgaagtgcatttgaatttaaaacttactaacattaagatcagaagctaaaagtttagaaaatgttagtaaactatgccacagcaagtgtcaacatgagttttaagaaaagttgaccctagactttctttctgtctaaaaacttaatagttggaatgcatattctaaaatttaagatttattaactttaaacttgcctcaagttgaaaatttagaaaattttagtggtgtccgctaagaaagccttcagttaatactgggtctcaaatgctcactaaagtgaattctatattgtatttctacatttttgcaaagggaaaacaagcaagacttagagagactttagagaggcacagtaacattccctgcagcagggagcctgatagctttgcatttttacacttaaggtatttttatcttaggtttaacaaatcaagtttagttacttaaataatttatgaatgtagttaatcaaatttatctctgtactgtaaaccataaattatacattataaaattctaaagattttttaaaaataccttaaacagagatcataatctatggctcaattacattatatttacaatggattcaagactattaacctaacagaacaaattctaaaaatattaaaaaatacttaaaacagattcattaacatgaactattagtacatatttccataattaaattcacaacctcccagtagccagctcaggagcataagtattttgaagtcttgcatatcatattgaacaagatggtaccaagacacttgtaggacattccttatgctaccctctcccagctgggctgtcctggtccctttgaaccataccctagtgagtcttaccattagtaaactttccatctgtctaatggaatctgcaattcccacccaaggctgctacttgaatttggctctcaagattctttacctaaagtgatcttgcttgttctttttgatttgcctatgaaagaggaccataaattctcagagattaaattttggatatcattcatgagcaagactctcacttgtatactcatggtatttaatgttatcccaactgactgcaaggtaaagctaacaagacatgaactgatggtaaggttgaagagtcatggctttctgggcatctcagatactctcattaccctttcaagtttttaatcaagtttatagagtcagggtagaaagcagtctattcttgggtctaatgatgttgcctagtacactataaattaatcattgcatttactgcaagaatagagatatcactggggagatagctgtacaatcatgaggaccttaattgtaattcccaggaccccagcaagaagcagaccctgggtgggcttgacagcatgtgtttataatcccagtgctgaaagatagaggcaacccctgaggcttgctgcccagtcagctttactaaggtggatggtgttggaggaatgaaaccccaagttgaccactggctgaaaaacactaatatacatgtgcaccttctagaacatgtttcccccacagtttcccttcatagctttctgcaaattattttttaatatttatttttacattttgattaaaatattatcttttctcctttcccattcctttcttctttcaatccctcccacatccccttctcaaattgatagcctctttttcctaaattattgttttatacacacacatatacacatgcaaacacacacagagatatataagtacaacctgctgagtctatttttgttgtttgtatgtatgattgcagggctgaccactttgtgttagataaacagtcaggaactcatccctgggaaagactaattctccctctttggcagtcactgattgcttgtgttccttgtctctggtgggaccttgtgagatttccccgtacatgttaacatttctattcatgttgcttttgctccagtcttggtttatgtacccctttctaagaaagatgacctcaaaacagacttcctcgtaacctggatgttagactctttctgcccccctttctctgatgtccctgagccataggtgcaggagctgtatcacagatgcatgtgtccagcagggataagctctctccaacacagcgttctttgcatcatgcccagttgtgggtttctgtaatcggatcgctttgctgtacagagaagcttctttgatgaacaatttcaaatgttcttgcgaattaaaaatttaaagttctcaatttcaactagaattcttaccttgtatttgtggtcattttagttgcttaaaccccagatctctcaatatagccagttataactggaaaaccaagtcattgcgtcacctgaccaaaagtcagtacttaaaatgtcacctggatgagtgctgttactatctcatgctgacaggaacaaaacctttgtagagctcaggctttgacggagaccaaactcacacataatacaggactcaacatagatctggtgcctctgttcctagttttgtcaaatgttttactttgtcagggggaatgcaacacatgatagaaatgtgtgtttccgactttcttttcctccccatcacagcctttcctgtggttggttttgcttttcctcatttgggttactttgtatataataagctaggtttttttggaatgtctcaagctgggctcctttgtatacctcaagttagtgtcttactccagctacttcttgacttttgaaatatagcacctttgaataaatgtaatattttaaaatgaattgttatagataaggagatttttcttagtagagagcatacatgaacaagcatttcaaagaatattaaaaatttttaaaggactaaaattatttctaatcagtcaccattcctttaaaaatcactttgcatagaaagtgttgagtttcaatatccccttttgtcttaataaaaagaaacttcctatttcaagatgtaatttaaatacattttaaatataggtctcactgtgtacccgaggctaatgtagcccagcctggctagcctcaacttcctaacaggtgggaagatgtaataacttttgaatatattttatattttgaatacatggcaatattcaaaatgacctattttgggcatcgaggtctctttaaagtaagtgactattgcaagaactgcaactatagtattgttggaaacagctcacagtggagactaacaatacagggagccttcttatttttggcacaggaggctttttgccttgttactagtggttttatttattcttgggagcttttgttatgtacccagaggcactgaaaacacagaaaggaccgaaagttatgactgattggtcataattgtgtacaatccagtgttgttttgttcataatttgtattttttttttacacctagtatctgtgaaggacttttagaccacacttttagttacttcaaaaggggtgaaagactcaaagagcttgcagaatgcctcttgatgcaataaacagatctgtgcatctcaccttttttcatctgtttgcttccagtgaagtgatgaaaatgaaaaggagatacgaggtgggtttggataagctggactcggcatcatcccaggtggcaaccatgcagagtgagctggaggcgctgcatccgcagttaaaagttgccagtagagaggttgacgaaatgatgataataattgagagagagtcaatggaggtggccaaaactgagaaaatcgtgaaagctgatgaaacagtagcgaacgatcaagccatggcagccaaagccatcaaagatgaatgcgatgccgacttggctggagccctacccatcctggagtctgcactggctgcccttgataccctgaccgcgcaggtgagagctgtaccctgggctaaagctttaccatggggtggggaccacagtttagtttctctcaaattagcatacagattttgtaaccatttttttttcaattggcaagaggattccctagtttacttgaaaagaaatgcgttttcatgacaaaggcatttttgaaaagggacaaaactgccagttgacaccacaactacaactattaccaccaccaccaccacaggagcagccaccactgccaccactgttgccactgccaccactgcccccacaaccgcccccagcaccctgctagttctacctcctcttctttctgctcagcctttctccatcatggtggttccttccagagtcttgtgtcactccccactgccccccactgtaagtttccacgattatccttttgttgttttaagatttcctcccaagaggcccttggttttgtgaagataatatgccccagaacaggggaaagccagggcgaggaagcaggagtggatgggtttgggataaggggggtggtataggggactttcaggatagcatttgaaatgtaaatgaagaaaatatctaaagaaaaaaaaaagattccctcccaattgacttgtcaaaattcttgccatgattctatcattgctgccatttctgcccaacacagaaaatgtccatttcttagggtaccttaaaacctagtttgaaagattggacttgttaatatgacttcaatgggtgtacaagcagacatttatttctattaataataaaaccttgcttttcaaggatatcactgttgtgaagtccatgaagagtccccctgctggcgtcaaacttgtcatggaggctgtttgcatattgaaagggatcaaagctgacaaaatccctgacccaacaggttcagggaagaaaactgaggatttctggggccctgctaagagacttctcggtgacataaggtttctgcagtcacttcatgagtacgacaaggacaatattcctcctgcttatatgaatatcataaggaagagttatatccccaacccagactttgttccagagaagatccggaatgcttcaacagctgctgagggtctgtgtaagtgggtcatcgcaatggactcctatgacaagtgagtgtggagaagaaacctgtcggggctgttgggtttgccctcccactcatagagacaagagaaagctaggagcccatgtgagaaaaagggtggtcagaaaacacgtgtttcaattgctgcttttatttttactagagcccaaagtgtagcagttaaaagtaatatgtaatttaatgatcattaaagttttgggagttaggaatactctttactaaaatatttctaaagtctccccaaagcttttatttatttactatgttgaaaaaattaaatgaagaagtactaaacttgtactaagacacttaaaaataaacaaaattatggcatggtagtaaagattgacttttttgtatcttacaaatgtaaattttatttaaaatagggaagatgttggggtacaactgaggggtagagaacttgcctagcatgtacgaggacacagattctatcaccagcactaggacataggactatttgggctggagagacagctcagtctgtaaagtacttgtcttactgcataagaacccatgttcaacccactgaacacataagagaagccaatcatagtagcactaacttagaatctcagcactgggtaggcagcagtgcaataggtgtggccttagaacttaaaataggtgtaggctatcttagcctaccctgcaagttccaggccagcttgagagactctgaggggtgacaggtccttacctgctctcttaccccacaagtcttaaccatcagttttcatactttgtatcagatttgattcttagatgaaatatggactctacaactaggtgtaaattctgcataaagaagtgtcttaagtccttgcaaagagtattcagaaggtaaattgacattacaaaactccatatgttcagggggatttaatttcctaaattgattgttttgtagagtggcaaaaattgtagctcccaaaaagataaagctggctgcagccgaagggaagctgaaggttgctatggaaggccttagaaagaagcaagctgccctgcatgaggttcaggacaagttggccaaactccaagacacacttgagttgaataagcagaagaaagcagacttggaacaccaggtaggtgcagacaattgcaaatgtgaactgggatcacctcagaaataaagactttgtggccaacacaaaattcaccagtactgttttcttcctggtcatgattagtgggttatggttccaagggcagacctacccaatacctggttgtgcatggccctggaacttggagtggttctggcattaaatcatgatcttgtgacatgaacgtccaaacagccatgtagtatactaccagttgtggccccttggttcacaaagtatcagtcattcacttgtcacccttagaaaatggaagctgggagaggtttctgcctcaggccccggcgggagcctccttggctccgggactcctcagagggcaggctgcacgggtgagggtgtggaatacagaggccagcagtttctgggacaggcgagagccacagagtttctgaggcggcgccatcttcggctccagacaactggccaccttcctggccaaagcaacacagcttctgggaaagatcctgttttgggccttcatcttcagccaggaggaggtccaaacatcagataactgtgcaccttccctgaaagaggagagcttgcctgcagagactgctctgaccactgaaactcagaggagagagctagtctcccacgtctgctgatagagggtaacaaaatcaacagaggaacaatctctaaacaaagacaactataacaactaactccagagattgccagatggcgaaaggtaaacgtaagaatcctactaacagaaaccaggaccactcaccatcatcagaacccagaacgcccacttcgcccagtccagggcaccctaacacacctgaaaaggtagacctggatttaaaagcatatctcatgatgatggtagaggacataaagaaggaatttaataactcacttaaagaaatacaggagaacactgctaaagagttacaagtccttaaagaaaaacaggaaaacacaaccaaacaggtagaagtccttatagaaaaacaggaaaacatatccaaacagatgatggaaatgaacaaaaccatactagacctaaaaagggaagtagacacaatgaaaaaacccaaagtgaggcaatgctggagatagaaaccctaggaaagaaatctgaaaccatagatgccagcatcagcaacagaataaaagagatggaagagagaatctcaggtgcagaacattccatagagaacattggcacaacaatcaaagaaaatggaaaatgcaaaaagatcctaactcaaaacatccaggaaatccaggacacaatgagaagaccaaacctacgcataataggagtggatgagaatgaagattttcaactcaaaggaccagcaaacatcttcaacaaaattattgaagaaaacttcccaaatctaaagaaagagatgcccatgaacatacaagaagcctacagaactccaagtagactggaccagaaaagaaattcctcccgacacataataatcagaacatcaaatgcactaaataaagatagaatactaaaagcagtaagggaaaaaggtcaagtaacatataaaggcaagcctatcagaattacaccagatttttcaccagagactatgaaagccagaagagcctggacagatgttacacagacactaagagaacacgaattccagcccaggctactatacccagccaaactctcaattaccatagatggagaaaccaaaatattccacgacaaaactaaattcacccattatctctccatgaatccagcccttcaaaggataataacagaaaaaaaaactaatacaaggacgggaaccacgccctagaaaaaacaagaagataatccctcaacaaaactaaaagaagacagccacaagaacagaatgccaactttaacaacaaaaataacaggaagcaataattacttttccttaatatctcttaatatcaatggtctcaactccccaataaaaagacatagactaacaaactggctacacaaacaagacccaacattttgctgcttacaggaagctcatctcagagaaaaagatagacactacctcagaatgaaaggctggaaaacaattttccaagcaaattggtatgaagaaacaagctggagtagccatcctaatatctgataagattgacttccaacccaaagtcatcaaaaaagacaaggaggggcacttcatactcatcagaggtaaaatcctccaagaggaactctcaattctgaatatctatgctccaaatacaagggcagccacattcattaaagaaactagtaaagctcaaagcacacattgcacctcacacaataatagtgggagacttcaacacaccactttcaccaatggacagatcatggaaacagaaactaaacagggacacagtgaaactaacagaagtgatgaaacaaatggacttaacagatatctacagaacattttatcctaaaacaaaaggatataccttcttctcagcacctcatggtaccttctctaaaattgaccacataattggtcacaaaacaagcctcaacatatacaaaaatattgaaattgtcccatgcatcctatcagatcaccatggactaaggctgatcttcaataacaaaataaataatagaaagccaacattcacgtggaaactgaacaacactcttctcaatgataccttggtcaaggatggaataaagaaacaaattaaggactttttggagtttaatgaaaacgaagccacaacatacccaaacttatgggacacaatgaaagcattcctaagaggaaaactcatagctttgagtgcctccaaaaagaaactagagagagcacacattaccagcttgacaacacacctaaaaggtctagaagaaaaggaagcaaattcacccaagaggagtagaaggcaggaaataatcaaactcaggggtgaaatcaaccaagtggaaacnnnnnnnnnnnnnnnnnnnnatccatcctgaccaagtaggtttcatcccagggactgcagggactggttcaatatacggaaatccatcaatgtaatccagtatataaacaaactcaaagacaaaaaccacatgatcgtctcgttagatgctgagaaagcatttgacaaaatccaacatccattcatgataaaagtcttggaaagatcagcaattcaaggcccatacctaaacatgataaaagcaatctacagcaaaccaatagccaacatcaaagtaaatgataagaagctggaagcaatcccactaaaatcagggactagacaaggctgtccactctcgccctacctattcaacattgtacttgaagtcctagccagagcaattagacaacaaaaggagatcaaggggatacaaattggaaaggaagaagtcaaaatatcactttttgcagatgatatgatagtatatataagtgaccctaaaaaatccaccagagaactcctaagcctgataaacagcttcaataaagtagctggatataaaattaactcaaacaagtcaatggcctttctgtacacaaaggataaacaggctgagaaagaaattagggaaacaacacccttctcaatagttacaaataatataaaataccttggcatgactctaactaaggaagtgaaagatctgtatgataagaacttcaagtctctaaagaaagaaattaaagaagatctcagaagatggaaagatctcccatgctcatggattggcaggatcaacattgtaaaaatggccatcttcccaaaagcaatctacagattcaatgcaatccccatcaaaattccaactcaattcttcaacgaattagaaagggcaatcggcagattcatctggaataacaaaaaaccgaggacagcaaaaactcttctcaaggataaaagaacctctggtggaatcaccatgcgggacctaaaactgtactacagagcaattgtgatcaaaactgcatggtactttatagtgacagacaagtagaccaatggaacagaattgatgacccagagatgaatccatacacctatggtcacttgatctttgacaagggagctataaccatccagtggaaaaaagacagcattttcaacaaatggtgctggcacaactggcggttatcatgtagaagaatgcgaattgatccatttctatcaccttgtactaaggtcaaatctaagtggattaaggaactccacataaaaccagagacactgaaacttatagaggagaaagtagggaaaagcctcgaagatatgggtacaggggaaaaattcctgaatagaacagcaatggcctgtgctgtaagatcaagaattgataaatgggacctcacaaaattgcaaagcttctgcaaagcaaaagacaccgtcaataagacaaaaaggccaccaacagattgggaaaggatctttacctatcccaaatcggataggggactaatatccaatatatataaagaactcaagaaggtggactccagaaaatcaaataaccccattaaaaaatggggctcagagctgaacaaagaattctcacctgaggaataccgaatggcagagaagcacctgaaaaaatgttcaacatccttaatcatcaggaaaatgcaaatcaaaacaaccctgagattccacttcactccagtcagaatggctaagctcaaaaactcaggtgacagcagatgttggcgaggatgtggagaaaggggaacactcctccattgttggtgggattgcaagcttgtacaactactctggaaatcagtctggcggttcctcagaaaattggacatagtactaccggaagatccagcaatacctcttctgggcatatatccagaagatgcccccaccggtaagaaggacacatgctccactatgttcatagcagccttatttataatagccagaagctggaaagaacccagatgcccctcaacagaggaatggatacagaaaatgtggtatatttacacaatggaatactactcagctatttaaaaaatgaatttatgaaattcctaggaaatggatggacctggagggtatcatcctgagtgaagtaacccaatcacaaaggaactcgcacaatatgtactcactgataagtggatattagcccagaaacttaggataccgaagatataagatacaacttgccaaacgcatgaaattcatgaagaacgaagaccaaagtgtggacactttaccctttcatagaaatgggaacaaaacacccatagaaggagttacagagacaaaatttggagctgtgacgaaaggatggaccatctagtgattgccatatgcagggatccatcccataattatcttccaaatgctgacaccactgcatacactagcaagattttgctgaaaggacccagatatagttctctcttgtgagactatgccggggcctagcaaacacagaagtggatgatcacagtcagctattggatgggtcacacggcccctaatggaggagctagagaaattacccaaggagctaaagggaactgcaaccctataggtggaacaacaatatgaactaaccagtacccgggagctcttgtctttagctgcatatgtatcaaaagatggcctagtcggccatcactgcaaagagaggcccattgggcacgcaaaatttatatgccccagtacaggggaacgccagggccaaaaaggtgcagtgggtgggtaggagattggggggtgggtattgggggacctttgggatagcattgaaaatgtaaacgaggaaaatacctaattaaaaaaaaaaagaaaaaaaagaaaatggaagctgggctatttccatctcttctcatttcacaaggagaattggaagagctcacacaacagccctggcagagctatgatgagcattctcaaaaccattactgaaaacactcaagaccaaagccattgtcataatttatataggattcccattcatgcaaagtaactgctaagtctgattctgtaaccaaaatatataccaatatttcatagcagtcaacatttatcaagagtttgatatgtataagatacttttatttttttaggaaaaattcaattttttactatgtgtttatgatgtgtgtgcctatgtatgtattgttgaggtttggtcttttgtttatattattatgctaaatactgacccccaagtctgattgcctccaggaatgagagagtctgcatatacctaatttacttacctaagtgacatacccaagtgacattatgtaaacttgccccaagttatccctgattggtgaataaagatgcctatagccagtagctgggcagaaaaaagataggcaggattcttgggtccgatgtctgaggagaaccacaaggagggataaggtggaaagagaaggaagccaccatggggtagataaatcatgaaaacatggccatgagggctggccaattggagttaagggctgcccagatgaaacatagcaaattataactaggagttatgggtggggaaatagattctaatagcataaaaggtagataaatatctgcccagctttagtactgactaaggcttataataaatataaagattgtgtgtctttcatctgggaactgaatggccaaaggtagagtataacccccagattgagattaaataatttacacacatgtttatgcccatgcatgcatgccacagcacatgtatggaagtcacaacttttgtgcatttggttctttcctgttaccttgatatgcagtctagggatcaaactcagagtttctttgtgcagagggcacctttatacacagggccaccttgccagtccttgttcttttttatatctttaatcattctttaacaaagtaaaaatgatattaacattcttcagaggttggaatatttcttccccttccattcctgcacttcctccagggacagacatattaacagtggcactcctggcttgctggccatagtcttctgagactaccaatcttcttgggttatttttaggatgccaaagcaaagaaaggttaagccatttattcacggacaacccagtttctagtcattgtctatggcctgaacacactgctttttcctctaagatctgccctgtaatctgtatttgaacacacacagaatattgagtcagtctttaacctgttactggccatgactacatgtcttagggtttctattcctgcacaaacatcatgaccaagaagcaagttggggaggaaagggtttattcagcgtacactttccacattgctgttcatcaccaaaagaagtcaggactggaactcaagcaggtcagaaagcaggagctgatgcagaggccatggagggatgttctttactggcttgcttcccctggcttgctcagcctgctctattatagaacccaagattaccagcccagagatggtcccacccacaaggcgacctccccccttgatcactagttgagaaaatgcctgacagctggatctcatggaagcatttcctcacctaaagctcctttctctgtgataactccagcttgtgtcaagttgtcacaaaaccagtcagtacactacatttaattttaacaatataaccactaggtgagtatatagttgctcactggaaacatttgtcaacattgttatgtatttgaaattttcaagtttttgtaaaagaatgttggaaaatataaagtcaacatatgcatatatttataataaatgtattttttattttgaggaaaaagggtcacaagtattttctttagggttttccagtggtagcattgttgtagtctgagatctgatccactttcttttgggcaatgttgaaggcaaaacagataaggaagcctagaagtgggacaccctttaaggtgggaaaactgaataacaaaggtttagttttggaaagatcaaaattattacccattacaaaccttgtactttttcaagcctatctgtaggtaaactgatattttacatcttttaatttaaaagcatttagttaaatgtggggctgtaggtataggggaagaggggggagggagagagagcctgtttctggcctgagttcctgtactctgggcaggcaggtgggggaggactgccaggctctttccactcggccctgggtaggcatctggctgtgtgacgccactgaccccactcggctggggggtggacatggggtagcccccctaccaggttctcggtctccagcatcccaccctggatacagcagaggagatgagagagggtagagggagagaggttcccatgcaggtgagagtctttagtctggtccatggctggagcacaggaaggccttctgacaggagattaggcacggctctttaggagaaagcctatcccatcgtccaagcacagtgggccttgataaacagagacagtctatggttttagagctttattgtaaaaaggcagggggaaagagagaaggtaggagagagagagagagagagagagagagagagagagagagagagagagagagtgttagagagtgaggaggggcaaagcagtccctcttatagtggacttcttatcttgttgttgctaggtaactgggaagagtctagcctagaggtcagaagcttgggacattgtctacatgactgttagccacacacttttcctgtggagctgtgggggcagtaacttcaacaggagccaggggtacaggagacatgagagaatgccttctgtcccatgtaggcgggaattaccaccactggagttctacctcagctcaactgaagaccagactttctgtgcatagcccattgccacacagttaaataatagttactagtattgggaaaatgcttaagacaaattcttactccaaaataatgtaaatgtctgcattataaaattgcacagtttgaatccctaagtaaactttactcagcttcttttatgagtaaggatgttgtctctctgggtctgggctatgtccaatgtaatctttcctaggtccatcatttacctgaaaatttcttaacttctcttttctttacatctgagtagtatccattgtgaatatgtgccacgttttcattatcaatttacccactaaaagacatttaggttgttcccctttcctgactgttgtgagtggagcagcagtgaacatgactgagtgggtgagccggaataccagggagtctgctgtgaaactgtctctcctaggaatggctgcatgaacaaggctggaacattggcagtatcaatggacatgctaatgtggaaggggtgatgaggttccactcttagacaaagaaacacagacagaaaggggggattagcctctcccaggaatgagaccccttattggttgtataatgcagggtagacagcctagaaactgtgtacacaccaacaagaaatatggactcagcaatgtgtactgtgtattcacatatcttaaaagatagatagatatatagatatatatatagatagatagatagatagatagatagatagatagatagatagagagataaatagaaagagagagtgtgctatcaaggtgagaggacataggagaagctaagagaagaaaatgagggtagtgatacagttccactactattaaagtacttttttaaaaagcaaaatgaataagttgattttatttaaaaaataatgatgctatcacttaaaaattaaattgcagtgactccatctaagtatcctgtggaacactgatcttacataggtttgggtgcctttccccaagtctggccaccttgataaacatctgcccctttccttttttattgaattgtttaatggtgtaaaataagctttgggctgattgtccaatgcagaaaggaggcttttagctagtgactggtgtcccctgtgaagcttaattgcaagtgtctgggaggacagtgatgccatttaacaacttaaaagattgtgcgctgtaaataagtgtaaattgctaaaagttttaacctttaaaagcaaccttaaatgcactaagttaagtgaggagacacacttataaaatatttaaaatatagtgcaaactctggaacccgggcccttggcatgctatgcaaatactctactaacctgcttcatccagagtcctcccccatatttgttatatatttttaaatctgtatttgcagtagagtgctggttactaggttaatctcagtcccttgtgttgaaggtcatttccttagagttgcctcactgttaaatgttagctgctctataggagtccttagaagcttattgaagtcacttgtttgttaaagtcataatgtcacgaacttgctttatctcagcgagatgcaccgtgcttctttttttaaaagtgcttcttagaatctgtctagtttgtaattgagagagtttatctcttgagtcgggaaatctgcagttttcagcccatttcacttgtagatattgataaaagctcacctttatttttgaggttgacttgtgcagcaaaaagctagaacgcgcagagcagctgatcgggggcctgggaggtgagaaaacccgatggagcaactccgcgctggagcttgggcatctgtacatcaacctgacgggagatatcctcatctcctcaggggttgtcgcctacctgggagcctttacatctaactacagacaggtgagggatgcctttggggcttttctttgcttccccccatcattgcaacattaacctctggtctgtttgttgctgctgctgctggtggtggtggtggggaacttgagggattttttttccatctgtgttattttgattttgtgttaatttttggttactgcaaggaaaagcagattagttttaaattatttgtagtcaaaaattttagacatcctgtaaattgcttggtagccaaatgatgctgtgtgaaatattgttttaaaatctaattttaaactggcgggctttagatgaatttttagttcctaagtgtaaaggaatcagggtgtgtgtgtgtgtgtgtgtgtttgtgtgcccacacaaaagcatgcatgagggatccatgccttaactactctgcatggatcttaataagtcattccaaaaccacatcagaggctgaaactatagtgggtggagacaagacaaccttcactgaccttaatcaagggcttcttggtttcccttaacatacttgcatatcgtgtccactgagcctcactgaggacttttctgtaagcagaactgagtcccccatttccattatggtttctttgactattgaatttttaaaaacaaacttttaaaaatcctcatatagatggagcttctattttagccttttcactttggaggcctctgtttaccttgttaaggtcatagaggtgcaatgactttccaattttcagctttggctgttcttttgagtcttgttcagtaggggcattaacatcatatatctagctcaggtggttaacatttaacttggttagtgatgggttagttcaattgacagctttaaacaaggaaacttacaaagcttgagacaatttcccaggcagagccatcaagccagtcagaaagagagagagtaggaacaagaaacatgttcacttgactctgtcctccaatagggacttggaacaatggaaatactagcaggcactcactcccatcgctgttagattaaatcatacccctgggcatcccagtgacccccattgggtacttacctgctgcttgggcagctagaagtgccaaaccacaccacaccacaccacaccacaccacaccacaccacaccacaccacaccacaccacaccataccacaccataccataccataccataccataccataccataccataccataccataccacatcacaccacacctgatgcttggttattttttgttactgaaagagcctcaaatatatcttagagaaacaccaggaaatgctcggaggaagatgggaatatggggccggggcgggggggggggtatgggggggaagacagaaaaaaaattcaggatagggcactgccaaattgtgagcaatttcagtatcccaaaaaagtgatagtaatataacttggaggataaaatatgaaaagatgaatttatgacatgaactaacataaatgagtatatgaggcatttccctcatcaccaggtgtcttccacaaaaggctgaaatgttaactacaaatggacaggatcaaggagcaaaatttatctcacaactgctgtcttcagtgttctcaattatgggtaaagcatccatattttcctgtgcagtttgctgagccctgagcccagtcatttcccttttaggctgaaacaaccctgtaggaaaatggccctcgaattattcaggtttccaagagaaacctcttgttatttccatatgaattactcagatgtgcaatccccaggaattacctgaaatctagctcatgccatcccacttattgtattataaacttttgctccaactgttgcagctcctcccagtgaaaaccctgtcataacactcacagcgttaagagaactctgcttctcactcacccaagtatatttgtgtaatagtctgagatccaaatgaccaataatcacacataattataaccctataattatgaaacaaaagcctggctttaatgaagtgattgaaaattagcatcgttgatagatgaataatttgaaattatgtactactgatgggatgcaatgagaaaaacagtgtcacctgtaattttaccgctaatagagatattggacattacaaataatattaacaacatttaagttcatgaagtggccactcacccaaatctgccctgacctttttgcataaaagtataatattgatacaacctactcagcaggaacctgagggaaaaggtagtgacaaccaaacccttctcagcaccatctacacataacacatgcacgtgcacgtgtgcacacatacacacacacacacacacgcacacgcacacgcacacgcacacacacacacacacacacacacacacacacacacacacacgcacgcacgcacgcgcgcgcatgcgcgcaggacatcctcattagcccagaacaggtacaagcatcatgccctttgcttatggacaccctctctttgcctgtctctatttccctcacagccatgtctttgactatttctgaagatttaggtgtataacctgaacttgaatgttagtataaactttagtattgagtaaaccatttagtatggtttttggccaccataacagagcatgcctctggtagataggacagaattcaaaatgtgtcctgacccttgttataactcaatatactttaggtgatccttcctatagagcacatgggagccagaaataaatgttatctgtatcctctacctattccacagatttagttttatattataaatcatatagtatttttctgtatatttataatttaaatatacatgcatggaaaatatgatggttttaactgtgaacttgacacaatctataatcacttacaaagggcatctcaattaggggttgtctatatcaaggtggcccatgaggatgcttatgagggattttcttaactggattagttgaggtgggatgatccacctggaattcggggagcaccattacctaccataggttctgcaggagagtgaggcgagcaatagatacaggcatacatccattctcactctgctcttgcttgtgactgtgaacagttgctttaagttccttccatcttgaattgaattgggagcaaaatttatccattttcccccaacttaatatttgcttggtgagtttatcatagcaacagaaatgaaactaagacagagaatgtcaactactctgtaagtttaaactttagaaaaatacacagtaattgttcttctcagatataaaattctaactttgtcgtgtggtccatctgggctttgtctcattgcttattacagtacatagcttactttctttgttataattttatttgaaaaaggtttggtacacaaatcatgttcgaggcgaagcttcaatagcagttggttttctcagtaaataaatgctaggtagtatccctttggctactgtccaacaactcatgtctatttttctgtgaatattttgaagaatcaaaccaagcagtggtcacagtcatgtaaagaaagagacatcccctgctccgatgactactctcttatgggtacactgggagaagccgtgacgattcgagcttggaatatcgctgggttaccctctgactctttctccattgataatgggatcattataatgtaaggaaaaatcttttctcacaaatgatctttattatctaatttgtagatacatttatttgcaaacattttaaaaaatggttttagctagtaagtctttattgaaatgtttgctaattagctatattaattaagcatggataatttttctgttaatattataatagtcaatggtcagaagctatgataaacaaacagaaatagctaaaatgagttttcataggtcttttagattataagaggaaaactcttttgtgagtaaagaacaaaatttttatttccataaaacagaaatcctgctataaagtgttaatagatacacagtggtgagtctttgatggtaattgtcctcattgttcacaagtctgtccgtgtccctgttttgatacaagtatgagctgaccataaaccacccatcacagaatctcctggctgatgaaaagacaaagagaagcagccaggaggacataggcctgttcaaccacaccctcttctccaggtcacacaagtcaacctgtctaactgtgagaacaagtatcgctttccgagttcacagtcttgtttctgacctggccaaagcattttagaatttaagagtgttaggaacagcacagtgtttcttagcatcagtaagaaatactcagttctgccatcagtcagaaacattctggtctgtgttgcagagccattgaatttgattcatttgtttcctgcaaacaacaacaaaaacccacctgaaatcgtattagtccaagtaaaagtggttggaatctgaatataaagtcttgagacagaaataaccaatagcatggcaagtgtgcaatgtttatgaaaatagtcatctaaagtaaagctttggtattccctcctcactgctcaacaggttatcctgatagaagtgccctgtggctattgcatccctctcagaaaacacttccctcttcaaacatgtgtgtttctagttgattgcctcctggagaatgatagccatgccttctttcttttattttgtaatttatgtcctttgttctacctaccaaaaggtgtctgcaaccattatatccattagagactaaactatatcgtatttcttacccacttgggtcttgttatactgcaattcatatttcatgttcaactgttggttaatatatcttacttttaagactctaagattttaatgaccattactcaagacaacacacacccatatttctaataccctcccctctgcttctgcacccttctccttgagcaatggaggtttattagtacctaatagtcctacatctttattattaatttatagaaaaattgaagaatttgtaaatcttatggtaacaacttgactgagaagaaagctctaacatcacttattctgtattttttggtcagtgtacttggcaaccttccagggagaagtttcaggacaaaggtttaaaggcatcgtttgaaatcactggacaagcatcttgtttagttgcacgatgcctccttctgtttcccaaagatgcttgcttagtaatcataatccctaacactaaggacctaacctaacacgttgagtacttaatacatattactttagtcaagtgccagcaaacggtttcgcaagtgtcggttaactgtttcacaagggactaccaaagaaagagagatacttgaggatgtaatgaagccttggaggagcagggaggtcagcctcagtggactgaagcccaaactgcctagcagaagaatttttcttaattattacacaaaaggtatttttagcaagtcaatttttaaataccataatctttgatctaatataggtgttgtttgaaggaacacattgcccaagcatttcccagccgttacaagactacctggtttaccaggaatgttttgtgactaaaggcatttataggttctgaagctcctataggaaagtcaactctataaatctcagataacaatcactgattatttacaaaagatcacttcaaagctaggtgcatgatcactccagagtttatgccaggtacaatggctctcctaaattttccactacagctgagtaaggcatgattattttggaaagctgtaagaatctataaaatttggacaagttagaatataattaaatatgggggctattaatacctaaaagtccttggcttcagaagtcagtgatagtggtgagcataactggattatagctttcccacattctgttctattagtttcattgtatctggttttatgtggaggtctttgatctacttggacttgagctttgtacaaggaaataagaatgggtcaatttgcattcttctacatgctgacccagttgaactagcaccatttgttgaaaaagctgtcttttttccactggatagttttggctcttaagtcaaagatcaagtgatcataggtgtgtgagtttaattctgagtcttcaattctattccattgatctacctgtctgtccctgtaccaatactatgcagtttttaatcactattgctctgtaatttaccttgaagtcaggagtggtgattcccccagaggttcttttattgttgataatgttttttgatatcctgagctttttgttattgcagatatattttagaattgctctttctatatctaacatagataacttcactttttgagaggcaggctttgattttctgtaggagaaaatcaaacttccactaaggcctcagggaaagccccagatttgcttaacctcaacagttaaatattctaattcggtgtcctctgccatgaccaacagacattatcatgattagaaatctgcattttttaaaaaaatccatgggcattaaatacaaatttgctttatacatcaactaaagagcaaactatcaaatcagaaacaataagtgctaacaaaatcattttccacttgctaacagttaattttaaacatctataaattcaagagtgtttgagggtcagtgggatagcttagcaggtagtggtgcctgttgctaagggtgccgactagaatctgatcccaaggacccacaatgctgaatgacaaaatggactcccacagattgccctctgaccttcacaccaacacatacagatatacaaatgaataaataaataagccaacatttaaaatagtaacaaaaggacatttaatagaggaagtaaggaaggaagactgaagagatacacattttattcttatttttgtcaaaaataatgtaaaatgatggtggcaatgtaagcgagtaaacagaatgcttgttcacttttctttcaatgttttcattcttatcatgaaattatttccactaaaatatactgtacaacaccttccacaataaattcttccacgagttattctaaatacaagcatttacttttccatctacctgcattttattcatctaatattttgtggaccccctcccaccaaaaaagttgaatttatgttattctgatcttcaatgaagaagttgccatatgaggaacattatttgataggacaaaagttggctatagctgttaactaggcatagaacactattcatttatttgtaattacacaggctcattcatatgcttacagaaagagggagagagagagttaccccagcacagcttttctaaaacgacatcgcttccccatcaatttcactgctgtattgttattgaaaatgtactgtccttatacatatgagtctgctgtgggattctttattctataccttgagctaactgcctaccatgatgcaagtattgtatcagcttggttctggaaactttgtgtagtcttgagttaggtaatatgtctttatcacttttacttcctcagatgaagtgatgagatgagagccatactcaagctgtgtaaacaaagggcttgggttgggcccagatcatttctttctctgttctaactatccctatgtctaggcttggaagcttctagacttcttacaatctaatcttccaagctgactgatttagttcacttgctctctgcttctgactcaattgctctgcctggtctcatatgccccatttggcaatctgttctaatcttctggctccttctcattctctggtttgttctatcttcacctgtgtctagcttgttctctccacaacctgtctctgtaaaaatctgctatacatacacataacccatcaccccctgccccccatcaaggctcttaagtagtctctcttcctctgctgttctcatttgagttgggcatatcctacctctgactcattctgtccaatctttttttgatgtgtcactttgtcttcccctccattagatatcactttcaaagatggccaattccttgtacaaattagccatacctacattgtttgagaataaaggtgtatattaagggcatgtctatattccaggtggatcatactgtaatccagggcatatcatttcagctacatcttatttttggaagtgattccatccctgagcagccatgctgctgtataaaaattcctctacatgtcttctatttttttgtcttctcttaaaaaaaaaaaaaacaaacatcattttgtttagttgttacctcaatataaattttagaataaaatataaatatcttaaagatatcttcttgaaatttttattttgattactagagaaagtacccaaagagctgaaggggtctgaagcctcataggatcatcaatatgaagtaaccagtacccccagagctccttggaactaaaccactaatcaaagaaaacacatattggaacttgtggttctagctgaatatgtagatgaggatggcctagtctgtcatcaatggaaggagaggcccttggtcctgtaaaggttctatgccccagtatagaggaatgccaggactgggaatgggagtgggtgggtgagttggggagcagggggaggggtagaggatagggaattttcagaggggaaactaggaaaggggataacatttgaaaggtaaataaagaaaatatctaatttaaaaagaagaaaaaaaaaagaaatcatagaactgtcatcatagcatatcaccattctgtgaatgtatcgtaaatgtaatgaggatgaattgctagagagattccaagagaaaagagatctcgaaaggctttgtggtctacatagcttttgagctgaccttgaatcatgagtagaatttagacatgaaaagattgggaagaagtacattttggacaaagaaacagcatgaatctggttatcatgactaaaataactggagaggggacagcagagcaacggcgaagttgctcagcttctctggagaagtctaaatgccatttaacatacatttctccaaatgtaaaaatatttctgaaatgtgacaagctaaaaatctttgcatatttataattttatttctttacaatttactttcatatgctttcattttctgaagcatacagttctcttcttattacttgtatctaagataccatactattctttggtctgattactttcaattttgggagataaattatccaatgacattctagattcatattaattattataggagtcaatttaataccgtcctgttccattcctattttcttccccccaatcctcttccattttcccctactgcccttcccattctgcatgaattttctgtgcttcctcttaaaagacattggccacagttctggccagtgtttattaaaacactaagtgctgattacatttcacacaaggcaggaagctacatgactacatctctcaagaatgtgtcagatgctggataacttctgattccccgtttctacacataagctgagtcctgatgactgttgctcttgcttttggcatttttcagtgggaataaatcggtaggtagagtttttccatgagttcatttctgcacttaggaagctcacaatcacaaggcgagtatacaatgagctacatagatgacattaaatgtctaagtgtttgaaacaaagatgggttcacggttataacactacagtgttcacaactacttcggaagtttgatgatagaaaactatgctgttcatttttcttaaatcattataactctactaaagggggggaaagaaagggatgaaggataagatgggaggagagagaggaagatcaagggggagagagagggagatagaaagagagggtgtggatggagagggagatgacaggggagagggatatgggaggagggagacttgagggggaagagggagatgtgacagggagagagagagagagattaggaatgaatcaattttttcctcttgaacaaacagaaacacacagaagctaaggaaatgaactaagctgctcaggtcacaggattaattgataacaaagcctaggtagaaagtagagtctcattggagcatattttacaagaactgaatatattatattgcatgtaatttaaaatttagagactgtaatattccaaaaagagttaaaggattcatttcaactttgtaaaatggccttggcagtttttctatcagtttgctcagactaaatgtgcctgtgtcaagaaaatcattttccatcctgtggaggtgtaaaacattactaacaaaggccaaacttagagtcatctgagaccgactagtgcagtcaagtgagactaaatatggtccaaccagaattatctatctcctctgtttcaggaatgcaagaaggtggcctctgatgatagaccctcaaggtcaggctaataagtggatcaagaacatggagaaaaccaatagccttcagctcatcaaactaagtgacccttcctatgtcaggactctggaaaactgtatccagtttggaactcctggtatgtaagatgagtaacaagtgcaggtgtggaaatgcccagacagagcacaataagcacacatgttgtaactctgttttgaaagcatctgtgtcaggcttgctgttttgttttttagggtttttttgtggctttttcaagacaggctttctctgtgtagctctgactgtcctagaactcttgtcctagaactgtagagcaggctggccttgaactcaaagatctaccctcttctgcctcctgagtgttggggttaaaggtgtgccccgcctccatctggtttattaagtgatgacctggctgaactctcattagttattaataatcaaatgaggacctcccagacagtaaacctctagaagacagggagttacaaagtacagttgtggggctgcctctaagttggctgttttaatttgtatctacctgcttttcttcagttttcattattaatcttctacagttaaaaagcctactcaatattgctatgccaagcatagttgaatacaacagttagtttcattttctgtttcttcttgaattatgctacaaaagcaccagggaaattgaacaggttctgtgtgtctatctatcatctggcatttgcaatggagagattagaaaaatgacaagaattgtcttaaatcaaggtcttgtgcaggtagcacacttgccaaaacaaaatgcatcgtgtttgtagtctgcactaattgggtcctattttaaatctgtgtggcttatcaaacttagccaaataaagacaagcacttatgaaactatagcatatgtggctccagaagaagttcctcagttctccaaaggacataacaagcatgctggcagtcccataccatctatgtttatttgttagtaataagcttgctttcaagttttaataattttaggattttagtgtaagcatgaaatgaaaaaaatctctaaatttatttttaagactttgtccacagacatgcaaacacacacgtggtatttctttctatactattttttaattttaaactattttaaattcacattaaattgacacataaatgcacacatttatggtatgccatgcagtgttcatatacatacattctgtcaaatcttgtaaacatatttatatcctcaaacatcattttatatggtaaaaaattcaaagtcctaattttttacaacagtgtgcagtacattatttatagttacttcagtatgacatagaacaacttgtatcgtggtgatgtaggagctacacaaaaagggagccataatctctactcttcaaatatattgcttgtgtggtttcagaatcattcatgtattaacataataaagacagaaagtgagaatctctcacaggaggaccagtgaactgattgtctcttacataaggaccagagtggtattcctggttggccccttagttctggatccagagtctctgcctttgccattcagtgtttagttcagtgactcagtttcctcacctacacattagctgtgtaatgtgagggagaaattacttattatttattgtataattagtgtcagatggctgctcagtccatagggttttgtaagtggtatagcttgtgttggctttttcaattactgaggatctttcagaatgtgataagtggctcacttataatatcttaaaacataatgaaaaagccatagatgatgctctgtgtgaattcagaaataccagagagaatttctagacagaattgtcactttaagttcttttcaagcaattgaaattatttaatttaaatattaaaataccggtcagaattctcaagtcttctgcctctggataatgtaatgtttttctttctttctttctttctttctttctttctttctttctttctttctttctttctttctttctttctttctttctttccctccctccctccctccctccctccctccctctctctctctctctctctctctctcttctctctctctttcttttttctttttttttcaccatgtattctaacattgaacatcagaaaggagtgaaatttttaaattctcatagaaaggtgtcaagctctaacctatatatttaaccatcaagtaaaagtttgaaaacatacatggttaaagctgcttctgcttgagaagttatctttagatactggcctattcatggtatttaaaaagtattcaatactttaaatcccttattcttcacatgtagcctgggtggagaggcagagggttttgtcaacctcatccacctgcctctgcttcaacgagagccatgtctccctcttctttcgccatactgagttttaaaataagacccactttaagaaaaaaagtttaaagagtctgttatttaaaaagtttgacaactgatgatgttgaaagtctaggtgtacctgcatttactgtatcaatcaataaagtatatatagtatgataattaaacactgctgagaagaagttaatctacacagatcattgacactctccattgaaatggggagagatagcatcttatctagaccttccctgagttttcctgtcttgactgttggcatccccctcccttgctttgtatcaagcattttacagataggtctatcagcagtgaagtgagtgtcctcctgcagctctgtctcacagtttttcaggaaagtagtttgtaatgtgacttaaagtgtctcaaaaaattgactgtgcattcacttctaggaccagcatgaacagaatcaggaacagacttttaggaaaaacaatattcacagtatcaataatggtgggaaaagaataacttagacagtggaaaattagcatagttattcattatggtatattcattttttaactataaagataactgagaagaaagtgaaaatgagttcttaaaagttatcttctgtttctgttggccaagatcccagcagtggaggaatgggtagggaggtagttgtagaaattcattcagccatgcatgagtaaccagggaagggaagaatatgtctacaggtgtagtgcaaacatctaccagtccctcagtcctgaggccactctttccagctgagattatcctcattccttcaagggacacttaccaggtacgtgaattcagaattgcctgtgtcagagatttaagccccattgtgtaacactttaacttagcactaggagtttaacactgttagggatcatttgtctctggccctttcgagaatggcatcgaaagaaaatattctgaaatgctaagttttgcttagagtgatagttatgtcttagaatagaaaaatatccaaatataatactatcaaaaacacaccactgtttaaaagataacagtaatatgtttgttaattttaataatgtaagataattgtgttatgatgtcatgcaaaataattaggacagaaattgatatttgtttcatcttaagcatgtatagagaaattgatagaaaatttcatctgagaattattcattagttacctatatgttatatgaagttttgtatcattttcaatcaatttacatatgtcaacctaaactatttaatagaggagagaaagataaggaaaatctgattagaggtagttgcccaatttcttttttataattccccgtgttttcagatgttctataacatatatgagttatttttgtaataaaaaattcagtgaacactgaaatagttccaaaaaatgcattttctcagccatcatgcctagatacagtgagtcccaggtggagacgatcaagccaggctggttggctaacaggtgtagaagtagaagcaagtggagaggccatgtagacctactcatgatccttcccacagcaggcagtgtttttatgacatcatttctctgtactcattgaagatgcaagtaggtagctactggaacagaaacaatctggagagttgaaagaactggagcactggatgttttagttaatattttaagtatgatggaatatttttttctgcctttagtgttgctagaaaatgtgggagaagaactggacccaattctagagcctcttttgttgaagcagaccttcaagcagggtgggagcacatgcattcggcttggagactccacaattgagtattctcctgactttcgcttctacatcacgaccaagctgaggaacccgcactatctcccagagacgtcagtgaaggccagtacctaagtttccttatcacagctcctgatctctgatcatattttcctactcagacataagaggaccaggtcttcctagacagctgaaatttgacctctctacttcctgaaattatgtgctgtgaagaatggccagcagaatctaatctgcatgatcatccttggatgatttcacaggtgtcatgtgccaacattcttgctttgtagtagataatatgctccttgttggagtggacacttaggaacaggactccatcctttctcagaggaaggctgctgctgctttctgattttgcagaattatttaaaagaatgatcagttttgttttcatttttttaataccgcaaattcctttaaaggataaagtcaacatgttatgcaaagattaaaatgaccgtaacattgatctaaggctgggcacctggagttaggggctttaccatagtctattttaattcccttattcgcttccctggttgtcactcaatgtttgagactgagtgtatcatttatttaccattatcattctgatctgttaaactacatataggaaaaaacaaaagatctgtccagtgtgcttagatcttttttattgagaacacttaacacgagcactccccctgaatggcagatggcagatgatgttgggacaatcattccatccatgataggtgagcatgatacctgttctcaagggcttcacactgtgcacacagcagtgtgtgcagagggaatgtaatgtgtgggccatgaaaagtaggcatagcggtggccacagtgtgtcctggaacctcggagaatacacatggactaatgaacacagctatggggtctagatgcttgtgtgtgacagtctagcttggttttgaaaacataatggaaatgctgtggccactgtttttaattaactaaacatactgttatttaagccctcaaaagaaaaacccaaacaaacaaacaaaaaacaaaacaaacaaacaagtcaaacccacctggtatctctctcctcattaggaaagagactaacatagttaagggtgtgaatttgagccactgctctatcatagatgtggccacgctgttccatgtccctgtgcattagtcccttcatgtgtaaatgatcattataaaagttactatgtcattgagtgaagtaaaaatctgagtagatgagtctccataaagtgctctggatggggcctagtggactgagtttatatgaatgttaaccatcagcatgacaatttaacttttcaacataaggagtaaaagaataaaacacgaggaaataaaatcccaaggctgtgttaagaaaaagattaataagcagtatggaaaaaaaccctttctactttccaggaaagcacagggtagtctcacagagagcacaaacagcccttggttggataataactgcctatgacagaagttgtaagctgcagcagggaggatgcagaagtgtgtatggttcagcactgaaatccctaagatcccagagtgttttattgctccattatttttaattgctagaattgattaaatggggattaggaagcttggtgaggtagtaactaactttcatttatgtatttaaatgtgtcttctcgcccccacattttggatctttcctgtaccttttgctttcaaaagcacccaagggagggtgccatgctgctcacatccttttgagtctaaatgaaaatgaaatcttgctgctgtgtctgtaggatttcaaatgctttgtgagtgtatggctacatttgcaaaaatcttggtttcaaagatctgacatcattaggcttgcaatgaataggtttaaacaaaagttataaaccaggcatactgctgatgctgtttttgcatgaacatgagtataccctgtagagctggctcctcgttcaggattaacctgttaataggatcagttttgcctttgtccatgattattacctcatcctaacctgtgactgcatccatataaactgtacaaagtggcacgggatgtagtaaaaaatattaaaatcccggcctgtggtttcttccccaccttagaccatttatgttcctggatgcaaaacacacacacagcctttatatttttaatatgccttgggcagcacaataactgggtgactgcctactccccatgctgttagaatcttggttcctatcaagaataccaaattatcacttactacttactgggttccatctggactgctcttaaccccaattggccagcccacatggccacactttttctggctcagctttcccatggtagcgctcctcctccctcctgaacattattcttttattccatggcagcctcttctttctcctctctcttcatggtcctctctcctgcaagccagcaaaacctgacccccatctatgtctcttctgcccagctattgcctgccagcaactttattcaccaatcataattaactcagggacagcatcccaggggctacgtgcagactccaggtcttgggggccccccagtgtctattacaataaacagtaaaagacagaaccttaacaactggaggctgagcactgagaagatggggtaaaagaacaacagggtgtcactaacacaaagcaggcatcaggtttgggtgggagaagtgagtcgtctttctagggtaccagaggaagctgatttgcctgccccagttagcaagtttctacacaaaaataaaatgacaggtccctgcagagggaatagtctcttgccagcaaagctccatagtcactgtgggtcaggttagatcccttttctctatgtcctgaatatttactacttttagatccttgtccactggatgttgttccaccctagaccaggtgacaaataaatgcatggctgcatctagtcacaggtgtgctgtaagaagttaggaactaacgaagaagcacaggaagctgctacaggtggggctggagtgcactggggaggtatctgtgaggaggtaaatctgcagcatagaaaatggagagttggtgtggtatatcccagtatctagtggtgtccagtagagcaagccctgagctcacagtgtcagtggagtaaaagacacaaacagaagtagaggagctgggtcttcagagtcttctggggttgcagaccctaaggcacgtgggcaactgttgcaggatagtccatcacactgagattgtattatttactggaaaatcctgctttagctgtggtgtggctcagccttagggcacaccttttaatccaagagctttctgcttgaatattgtaaacaggattaactaaagtcaaccacaggtcaagaagcagaacagacaaacagttgactgcaagtgaacataagattattaggaaaaaaaccttagagagtaagagggagtcaggaggatgcacagaaagacatgcaggaagtaaaagggaggaacatttagtttgatggagtctttgtgagactgcataagagagggggttcattctgggatgttggctaaggaggaagctcacctgggtgctttctttgcctctcggagctagcagggtttcaccctggagtcttcattgttaaaatagaacaactgagattttattttaaaacaacaggcagcacactggcaaatatacaaaaaccaataagtgagaatttcaaaggaaatgaagctcaagtcagtatttatcagcttctagattatttgatggccagaactagacagctgctgtttcattgttgtgtatactggtgggtatagaagggcgggaagggagcaggctacacaggactgaggtgtcaccgagatgggaaacagatagtattttcaacaagtgtaatggtgagaagtagaggtcattctagagctgcagggactatgaatagttttccagagaacattaaattaacacatttattgggaagtaccagaaagggatgattttaaagatgtgtcctgtgtgtgggcatgcacaactacaccagcctctccactaattaagtacttggatagagtggatatcagtagatagcccttgatgggcactataaacaggtaaatttcctaatgtttcttcttgcaggatagtggctcattaacacaaaaatacttcattcatagtatatgagagcagtgctctctcttgtatctctcttaagattgtttcatataacacctctaatgaaccttaaaaagagattcagtccagtttgtagtaaggcttgcttctaacctcattctaattgatttcactgttaaaggatcatcagaaattggaccagttggaattgggaatacataaactgttataagtacttgattttgactgtcataagcttttatgagtttttcatccaacaatcaggcttgcctgtatcattgctggctatcattaacagtcaggcttgcctgtatcattgctggctatcattaacagtcaggcttgcctgcatcattgctggctatcattaacagtcaggcttgcctgtaccattgctagatatcatctctgtgaattctattttcattcatatgactgccacaatatgtgttcaatgaatggaaccttgaatcacacagagagaaggtttcttagtggaaaaaacaattcattttctttttttctctctctctttttccatttctttttttttaattaggtattttcctcatttacatttccaatgctaacccaaaagtcccccataccctcccgcccaatcccctacccacccactcccactttttggccctggcgttcccctgtgctggggcatataaagtttgcaagtccaatgggcctctctttccactgatggccgactacaccaccttctgatacatatgcagctagagtcaagagctctggagtactggttagttcataatgttccccctatagggttgcagatccctttacctccttgggtactttctctagctcctccattgggggccctgtgatccatccattagctgactgtaatcacccacttctgtgtttgctaggccccggcatagtctcacaagagacagctatatcagggtcctttcagcaaaatcttgttagtgtatgcaatggtgtcagcatttggaggctaattatgggatggatccctggatatagcagtctctagatggtccatccttttgtctcagctccaaactttgtctctgtaactccttccatgggtgattgtttcccaattctaagaagaggcaaagtgtccacactttggtcttcgttcttcttcagtttcatgtgttttgcaaattgtaacttacatcttggttatactaagtttctgggctaatatccacttatcagtgagtacatatcatttgagttcttttatgattgggttgcctcactcaggatgatgcccccaaggtccaaccatttgcctaggaatttcataaattcattctttttaatagctgagtagtactccattgtgtaaatgtaccacattatttgtatccattcctctgttgaggggcatctgggttctttccagcttctggctgttataaataaggctgctatgaacatagtggagcatgtttctttcttactagttggaacatcttctggatatatgcccaggagaggtattgcgggatcctccagtagtaccatgtccaattttctgaggaaacaccagactgatttccagaatggttgtacaagcttgcaatcccaccaacaatagaggagtgttcctctttctccacatcttcattggcatctgatgtcatctgagtttttgatcttagccattctgactggtgtgagatggaatctcaaggttgttttgatttgcatttccctgatgattaagggtgctgaagattttttcaggtatttctcagccatttggtattcctcaggggagaattctttgtttaactctgagccccatttgttaatgaggttatttgattttctggagtccaccttcttgagttctttatatatataggatattagtcccctgtctgatttaggataggtaaagatcctttcccaatatgttggtggcctttttgtcttattgacggtgtcttttgccttgcagaagctttgcagtttcatgaggtcccatttgtcaattcttgatcttacagcacaagccattgctatgttattcaggaatttttcccctgtgcccatatcttcgaggcttttccccactttctcctctataagttttactgtctctggttttatgtggagctccttgatccacttagatttgaccttagtacaaggatataggaatggatcaattcacattcttctacatgataaccaccaattgtgccagcaccatttgttgaaaatgctgtctttcttccactggatggttttagcccccttgtcgaagatcaagtgaccataggtgtgtgggttcatttctgggtcttcaattctattccattggtctatttgtctgtcactataccagtaccatgcagttttttttttttatcacaattgctctgtagtacagcttaaagtcaggcatggtgatttcaccagaggttcttttatccttcagaagagattttgctatcctaggttttttgttattccagatgaatttgcagattgctttttctaaatctttgaagaattgagttggaattttgatggggattgcattgaatctgtagattgcttttggcaagattgccatttttacaatgttgatcctgccaatccatgagcatgggagatctttccatcttctgagatcttcttaatttctttcttcagagacttgaagttcttatcatacagacctttatcttccttagttagagtcacaccaaggtattttatattatttgtgactattgagaagggtgttgttttcctaatttattttcagcctgtatattctttgtgtagagaaaggccattgacttgtttgagttaattttatatccagctacttcactgaagctgtttatcaggtttaggagttctctggtggaatttttagggtcacttatatatactatcatatcatctgcaaaaagtgatgttttgacttcttccattccaatttgtatccccttgatctcctattgttgtctaattgctctggctaggacttcaagtacaatgttgaataggtagggagaaactgggcagcctattctagtccctgattttagtgggattgcttccagcttctcaccatttactttgatgttggctactggtttgctgtagattgcttttattgtgtttagctatgggccttgaattcctgatctttccaagacttttatcatgaatgggtgttggattttaccaaatgctttctctgcatctaatgagatgatgatgtggtttttgtctttgagtctgtttatatactggattacgttgatggatttccatatattaaacaatccctgcatccctggaataaaacctacttggtcaggatggatgattgttttaaaatgttcttggattcggttagcgagaattttattgagtatttttgcatcaatattcataagggaaattggtctgaggttcgctattttgttggatctttctgtggtttaggtatcagagtaattgtggcttcatagaatgagttgggtagaataccttctacttctattttgtggaatagtttgggaagaaccagaattctatcttctttgaaggtctgaaagaactctccgctaaacccatctggtcatgggcttttttaggctgggagactattaatgactgcttctatttctttaggggatatgggactgtttagatcgttaacttgaacctgatttaactttggtacctggtatctgtctagaaatttgtccatttcgtccaggttttcaagttttgttgagtatagccttttgtagaaggatctgatggtgttttggatttcttcaggatctgttgttatgtctcccttttcatttctgattttgttaattaggatgctgtccctgtgccctctagtgagtctagctaagggtttatctatcttgttgattttctcaaagaaccagctccttgattggttgattctttgaatagttcttcttgtttccacttggttgatttcacccctgagtttgattatttcctgctgtctactcctcttgggtgaatttgcttcctttttttctagagcttttaggtgtgttgtcaagctgctagtgtgtgctctctctagtttctttttggaggtactcagagctatgagtttccctctgagaaatgctttcatagtgtcccataagtttgggtatgttgtggcttcattttcattaaactctaaaaagtctttaatttctttctttattccttccttgaccaaggtatcattacaaagagtgttgtccattttccacgtgaatgttggctttccattatttatgttgttattgaagagcagccttagtccgtggtggtctgataggatgcatgggacgatttcaatatttttgtatctgttgaggcctgttttgtgaccaattatatgatcaattttggagaaggtaccatgaggtgctgaaaagaatgtatatccttttgttttaggatgaaatgttctgtagatatctgttaagtccatttgtttcatcacttctgttagtttcactgtgtccctgtttagtttctgtttccatgaaatgtccattgatgaaagtggtgtgttggtctcccactattattgtgtgaggtgcaacgtgtgctttgagctctactaaagtttctttaatgaatgtggctgcccttgcatttatagcatagatattcaaaactgagagttcctcttggaggattttacctttgatgagtatgaagtgtccctcctgtcttttttgataactttgggttggaagtcaattttattcgatattagagtggctactccagcttgtttcttcagaccatttccttggaaaatcttttccagcctttcattctgaggtagtgtctgtctttttccctgagatgggtttcctgtaagcagcagaatgttcagtcctgtttgtgtagccagtgtgttagtctatgtctttttattggggaattgagcccattgatattaagagatattaaggaaaagtaattgttgcttcctattatttttgtttttagagttggcattctgttcttgtggctgtcttctttttggtttgttgagggattactttcttgctttttctagggcgtggtttctgtccttgtattggtttttttctgttattatcctttgaagggctggattcgtggaaagataatgtttgaatttcgttttgtcatggaatactttggtttctccatctattgtaattgagagtttggctgggtatagtagcctgggctggcatttttgttctcttagggtctgtataacatctgtccaggatcttctgtctttcatagtctctggtgtaattctgataggcctgcctttatatgttacttgacctttttcccttactgcttttaatattctatccttatttagtgcatttgttgttctgattagtatgtgtctggaggaatttcttttctggtccagtctatttggagttctgtaggcttcttgtatgatcatgggcatctctttctttatgtttgggaagttttcttctattattttgttgaagatatttgctggctctttaagttgaaaatcttcattctcatcaactcctattatccgtaggtttggtcttctcattgtgtcctggatttcctggatgttttgagttaggatctttttggattttgtattttctttgattgttgtgccaatgttctctatggaatcttctgcacctgaggttctctcttctatctcgtgtattctgtacttatgcttgcatctatggttccagatttctttcctatgttttctatctccagcattgcctcactttgggttttctttattgtgtctacttccctttttaggtcttggatggttttattcaattccatcacctgtttagtcgtgttttcctgcaattctttaagggatttttgagcttcctctttaagatcttctgcctgtttagcagtgttctcctgtatttctttaagtgagttattaaagtccttcttgatgtcctctaccaccatcatgagatatgctttaagatcagggactatcttttcgggtgcccaggactgggtggtgtgggagtgctgtgttctgatgatggtgagtggtcttggtttctgttagtaagattcttatgtttgcctttcgccatctcgtaatctctggagttagttgttgtagttgtctctggttagagcttgttcctcaggtgattctgttagcctctaccagcagacctgggagactagctctctcctgagtttcagtgttcagagtactctctacaggcaagctttcctcttgcagggaaggtgcccagatatctggtgttcgaacctgcctcctggcagaagttttgatccactcacagaggtcttaagatcctgtggagtgtccttgggtaccttgcgtgtttccgcagactctgtgcctaaggtaccctggtactgccggggaccagaagggacttgtgccccgatcagtccgggttttctgctcccttaattaattcagtctcaggtcctgtgcgattggattggagcagcagctgtgttccactcaccagaggtcttaagatcccatggagggtcctgtgggtaccttgcgggtgtccacagactccacgcccaaactaccccggtgttggcggggaccagaagggctaatgcattttcaaaataaattctttcacttacaggtgaccttgttaaacttcatgataactcctgagggaatgcaggatcagcttttgggaatcgtagtggcacgggaaaggccagacctcgaagaagaaaagcaagccttgatactacaaggagctgacaataaaaggtttgaagtgcagaatgaagatttattttgtggttgtagtaaagtatatttagcatctatttagttaaaatatatatgtgtgtgtgtgtgtgtgtgtgtgtgtgtgtgtgtgtgtgtgtagaggccagaaaagcatgaggatggcatagaaaccactggaaatggagttgcagacagttgtgaactgcctggtatgggtgctgggatttgaacccaagtcctggaagagcaatgtactcttaactcctgagctatctctctggttcctcccccaaatgagaaagcttttaattcagggcctacagagcctctgcattaacttagaaaactgcattgctgagtctttttctcagactcgggaagaacactgaagcttgccacagatatgggcatgggtcttccgttcctcaacaaaggtgctgcatggaagtgtcttggttcactgtgtgaccaaagtgatctgttttctttgattctttcatttctttcattttggaagtaattggagtggtaccttgagttccatctgagccaagatactgtgtggcacaggagactggcttgctccatttctcagggtgtcacacgagtgatcattaaagggagctgagcagaaaggccatgtctcagtgacatttcacgagataagaaattaatctcacagcatccctttttcagataattgtcatggcatgacacatttctttaggttacaaggtctctgtttcttagaaaagactgcatatttcaagtgatttttaaaccatttcttttctgagaaagctgtacttcattctaggcagttaaaggaaatagaagacaagattttagaagttctctcattatcagaaggcaatatattagaagatgagactgcgattaaaatattatcttcctccaagtctttggctaatgagatttctcagaagcaggaagtggctgaggagacagagaaaaagattgacattacccgcatgggctatcggcccattgctatccattcttccatcctgttcttctccatcgctgatctagctaacatcgagcccatgtaccagtattctctgacctggtttattaacctgttcatcctgtccattgaaaattcggagaaatcagacatcttatcaaaaaggtatgtaaagggaatgctaatcttatacaagagaaaatgactgttttgattatgatttcaggttagcgtgaatgtcacagccatgaaccttaagggagcttgactcatcattttcccagacatagaacagaagtgtgtagctttagttgggaaataatggtttacagagctgtaggtgaagggactctagccagctcaaacatggcaaacgtggctctggcaggccttgcccttctctcccatgccctctctgccttgctaaaaatcccttagattacattcctaaagctagccaccagaggtcaattcacttacttggctacttcctcttcctgaggctgactatcaaggtccagctgtcaaaatattgaagtccagcaatcaaaagcccactttagcgcacctaattaaatgcccaattaaaattagatagcaaacactgggttttcccttttatctttataagtcaacattttcctatgtgctgcttctgtctcctctttgtccagaggcagtcttttgccctccccctctcttgtaggacaaatagcccttccccctcttttttattttccccctttccccctctcttctattgcttctgtttgtcccttattccctgctcattgtctctctggggcaaatcccctttgtgctgacaacttggtcttgggatatcctgaaccaacactgaacctttcagtagggctgtaatataattctagaagaaggaagcagttagctttgtttcctatttgcagaatctcctattgactgcagggatggagaggggagttttgtcctccaatgataagcagacactctctcagacaactctgaaactatagttttacatttgggtttaccacattgaaactctgccagataccagggcaaaagcaaaaatctgatattgattattttttgataatcacacaacttatttttatgattatctatagaaagcatattatttactattgaatagtatataaaaagcaaaagcactaagtgatgttatttctcagccatgagtgaaatgagtcaattcaagccagattatgttatattaaaagcaggtttattgggaagctgctctctggtggtgagttccctggcccaaggaccaaggaccaaggaatccaggaaggggggagtgggtaggagagggagaaagagagaaaggggcacttgtgcagagaaagaagaggaaaggaagagcaagaaaacaaaatgtctggattattaagaagattttctgggggaagggcagcccagcccctgggctggaaagttcaaggttggaggcaagttatgccaggtagtgactgagggatgctgggagaacctggaagccaggtcggcttaggtatgtaaaataggcacctcagttgcttgtcttggggtcagaaaccaagcactaagatcttgcttaagcttaagccaactagaggatagaattcatttgacttgttagtgagagaagttttcagtttggcccttgtttctaatttttagtgtttgtttctagtccttgaagttttcaagttagtgaggattactgaagaaaacaaaattgtaggtgatctcttaaaaaaaacatccatatgtttccagttaattaggcacacacatctgttttctgcactggatttgaagttctgggacaggatctttatttattttgaccaccgtttgagtgtgcatgtgtgaatgcatgtttgagtgtatgctgcacacttgcctgtaagggcatgtcacagcacacacatcgggattacgggacaacctcaggagctggttcttgttcaaggccaggactcactggtgtttagggctgtgtactccagggtagctgatatggggtagcagagggctttccctgtctcagcctcccgttttataatcattcaccaccacacccagctctctgtggcctctagggatttgaactcaggtcctcaggcttgtgtggcaagggtattttacctgctgagtcatctctctgtctcaccatgttcctttttggtacagttcttaatctcaagcttgttcatcacagaggccaaatgaacagtggctacacagagcagagacagatagagctctgtgaatttgaggttagcctgatctacacagcacagttccaggacacccagggctacacaatgaaataaacaggaaagaaaagaaaaacaacaaactaaaccaaacaaaacataccccccccaaaaaaaattaaaaaaaaaaaacccaatagccaccacaacgttatcatctatgtagatttaaagtctagctgttctctggagtctatgagaagagaattgctctgaccacccctgcagtgcaggttttttggttcaagattgaaaagttacaatgactccattcttcgaaggattctttttttttttttttttttctgtgccaaattagactcatccaagctgttttgtttgtttgtttgtttgtttttcataccagtaacaaagcccttgaaattaaagaaaagcaaatcccctttaccttaatatatgatttggattaaaatgtagaaaacaaacccagctttttatttgaagttaaaatcctttatctgtaaacactgaaaaccgtacgtgtgactactgtaaatgtgaagtacaaaaagactaatagagaagataaaattaaaattttccttgaagatagcattgtgctaacacaaatgtgcagaaatgagtttttacaaggaagcatgcctgtgtagctagcaccctcactctgtagttcatcctcactctgcctgctaatggaggggaccatctgtgttagcaaattaactttagtaagaggaaacacaaacttttcacacttccataggaggagatgactttgaaccataaagcaaggagcctggtgaagtcagggtaactgttcttctacaggcactgggtttatgcttcaaagcaatggcttccaggacattggcagacatttgagatattcctgggtcttaaagcaggtcctgactacgttttgaagtgatttttttttagaatatacatttctaaatattatatattctaaataatatacatttctctgtaatatacattcagtaggtaacaacacttgccttgcaatcctggcatgagttccatccctagactcatggtgaaaggagaagtgactcctgaaagtcatcctctgtcctccacaggtgcactgtggcatgtgtgcacccacacctaacacacacacacacatcgataaataagagtttaaaagcatcagaaagtagaaaatacttagaaaattttaagttctttaatttgaggctctaagaaaagagaggtaaggagtggactatccctttattttcaacaggagaaagaagcccttccacttactttttaaacgtttgtttggcctgacatggaacctaaaacaattgttcctttctgctgttgggaatatgggcttccagtctagggccacagtggatgtgtgctgcctgtgagcatctccatgcatggctcttggtgccaattcacgaacacttgtggtggatcgaatgggatgcaactgatggggcaagcattcgtgtgtacgctcttgttatatcaagaaccttctagacagcccttttcttcatccccccccccccagcaaaataagagttcaaattgaaaagctaactgctggtcaaagattaaagagagaacaaattcttgtagaaatgatttgtgatctcccagttattgataaacatggtattagtgggagtttaacagctattagactcagctatcctccaaagtacaggaagcacgggactgttcacacaagcctgcctactaaagatggttattactctagtattccttcttgttcctcttactcaagtatactgataaactccttttgatgactgtgcttcgtttaagtgtgacaccaagaataatatatcatgaacattgtgtcagacactgtgaaattgccataataaagtgttatttattgaagttgatgaattagtgttcatgtaggaaatactaaaataactgtagtaaaaaacagaaacaaacaaaaacatgaaatgcagaaaaaagatctaagtagggtattgttttattaaaggggtcaaactgcagctttttaaaaatgaaatgtacatatgtaaatgcacacatgtgcaagcatgtgtgtaacagagttgcttctatcaatattcctctattacacaatttttagaagctgttcaatagaccatattgtggatataatttggtaagacttgtaagtattataaatactgttaaaataaatacaaatatctgcactgttaactgtcttcctcatttaagtccctttcctatacgtttatttaaatataaaactccactagagaaacttgaattgtctcatatcagtataccacttaccaacatttgtagctgcttatattacaaatgctaattatgcccccccccaaaaaaaaaaaaactgtaaacacaagaaggtctacatgtaacttctggaaacctgcccccagttggctcgatcaataaattaaaatgccaacagccaatagctggggagcacagacagagaaaggattttaggatttcccaggcttaggactagggggaaatccaccatgtgggaatggtgtggaggagaggacagacacgttgcccaagaagaatgcagaacagataggcatagcagccatgtgaaggagctcggagaccctggcccagaggcctgctcaactgggcccagagcagccaagatggaaagtagaattagtgagtaataactaaggattaaccccatggaggtaaggcaatagcccagctattgagttgtttaaggcctattaaaataaaggtggtggcccttctggtccccagcaccaccagggtagcttgggcgcggagtctgcggacacccgcaaggtacccacaagaccctccatgggatcttaagacccctggtgagtgaaacacagctgctgctccaacccaattacgtgggacctgagactgcattaattagggaagcagaaaacccggcctgatcagggcacaagtccgttcaggtccctgccagcactggggtagcttgggcacagagtggatgctcacagtgagctattgggttcatcacagggcccccaatggaggagctagagaaagaacccaaggagctaaagggatctgcaaccctataggtggaacaacattatgaactaaccagtaccctggagctcttgactctagctgcatatgtatcaaaagatggcctagtcggccatcagtggaaagagaggcccattggacttgcaaactttatatgccccagtacctaaataaataaataaataaataaataaataaaggctgtgattgggtctttcaattgagaacagaaagcagtgaggtgagtaatgaaccatgtccccgggatttgttaattttttttctataaacactgaataattttgagtcttatactcccactgaagtatatcattacgatatcgtattttaatctttatcactactgagagtgaatttgagcttggaaggataaggatagggaaagctgggggtgggatgggtgggtatttggaaggacaggagccagcaggacaggaatggcagcacagccaatggctgcctaagaccctttcccctcccagctacaacctgcattttctagaattgcactagaaaccctgtttacaaagacatgtgctaaactacgtgtataccagcagcggtgcctggttttaccttgtcagattatctcgttcatggcatcttttgagccacctcaaggatctctcatagtaagagaaagagaaagaaacaaacacaacaacaaacctttttagtgactgtgctggctagtcttaggtcaacttgatacacaaactgagctctctgaaatgagagaacctcaattgagaaaaagccttcattagatctggctgcaaggcattttcttaattagttattgggagggatggaatgcttattttaaatctaaaactcagctctatttcaaggactcctgtgtcactacattgtttctcagctaaaaataagatgtgtccttttgctgtcattctctgataacagtgctggtgtgggagaaaataattaaggaaataaacaagaagaaaaatgaaaagcaaaacaaaacaccaattacaatgagtccaagccaaggacagtagtatgaaaatagctaaactcttgtcacagatgggtagatatttttttcccttactgcatgaagaaacaccagtataaatttgatcactaataaactatgttgctttttccctcagataattgatctgcttagaaggtttgagccattagtctatgtccctacaaatgtttatattttagctctctacaagtgttttttgttggcataggttaaaatcatagtttttatgtctatgcaataactgtaatttacatttttatttcaatgattatttcatgaaatacttacattaaaatgagtgaagcattgtattggcattgggaattattgtggatatagctcacatgcattaccacagttattcatatgtccatgttttctctctgtgaaatatagtttcataaagagaaatgtagtttaatcaaatctactagttttttgttttgttttgttttgttttgttttgttttgttttgtttttggctctgatacattcatgttcagtgtagcatagcattaggctttgccattaatacaagctatttgtttattcatttaatatagtataaaatatttgttaagtatttactttgtaaagaggtcaaattttgcctactagtgcaatacttcatagttacaaagtttataatttttataatggattagttttctgtaaatgaaaactataaagaaaaacatcagtcagcagggaaatacaattctattcaaatgcttctaccttgtctagctctcaaactggcagctcaaggagtaaagatttttttaaaatatttttaattaggtatttttctcatttacatttccaatgctatcccaaaagtcccccataccctccccccccccactcccctacccacccactcccactttttggccctggcgttcccctgtactggggcatataaagtttgcaagtccaatgggcctctctttccactgatggccgactaggccatcttttgatacatatgcagctagagtcaagagctccagggtactggttagttcataatgttgttccacctatagggttgcagatccctttagctccttgggtactttctctagctcctccattgggggcccaggagtaaagatttttgatcgatttggtgggaactaaaagaaatagtttgaatgcaggtctagcagtctgtggggcaatcttagcattccctcctgctgatcctgtttgtatttgtccatctctccctctgatggcccttaggcttcagatcctcagagatcacttcacctactcactctatgtcaacatctgccgctccctctttgaaaaggacaagctgctgttttccttttgtctcactgtgaatctgctgatacatgacaatgcggtcagtaagggtttagtctgtaggagcttagatgctgtagttactgggagagggtctgtggtatataccaagatactatccagtgtcaaagattctctgtgtcttttgaactcaaaagataactcgggaggattacagctctaggctcagttgtattacctgttagaggaggagataatagtaagtcattttctagtctttgcggcagattagaatatcatgtctctccctggtcagaggtagaaataggattcttataatcaggaggagtagctttcccagagtatgccccagcaaagcaccaaaacctccacaattttatgaggtaaaattgaaggtgggatctgaaggttaccatgtgtgtggagcccctgttcagtatcctcctagcctgatgatgcttagatcagtaacactatcatgatgtcatggatttatttactattccacatgggaacatatacatatactgattaaaaccagacaatgaaattaattagggcaaggcaagacaagactgaatttcagagtagttaatataaattaagaagagtatgttgcttaaacttttgtatattttagtttaaaagtctgtttctagagccttgtgtggtggcacctataatccctgcacttaggaagccagggcaagaggattatgagcctgagcagagctcagtctgaacagtgagtttgaggataaactcaatacaatgccccattcttaaaacaaacaaacaaacaaacaaacaaaaataccctatttgtctctattaaaatttacatgaccatgcagctaattttactaaataatttattatcacctttaagaactttgcaaattactgaggtctaaccatttggatttaaccatcttactcaaatgtaagctaacaaagaattctttttatctaaaagataggaagcacttacaaatgaaagagaagcatcatagtcttcttatacatctctgtatttaagacttgtaaaatctcatatgttaatatcttcatggaattaggaaaaatacttcttgtatttcatgcaaacacttcatagcgactcattatattttataaagaataaatgaaagcatggtggattgttgattttctacctttctatgacttttcagaactaatatttggtactgaaaacatacattttgaggaacatatattattgaagtagaatatatttaggcctcatgtttaagctagtaattcaaaagtagctatttataggcctttaaaaaaattgaccatgtttggtagttggattttttgcaactaagtagaaggtcctatcatctgagtactttcataagaatctgaaaggactgctacttttctacagtggctgtaactaactaggaacaccttctgtatgactctctatgatgtttgtttaccacagattaacaaaacagagtggagatttctactcactggtggcattgggctggataatccttataccaatccttgcacatggcttcctcaaaaatcctgggatgagatttgtcgactagatgacttacctgcctttaagaccattcgagaggagtttatgcgcttaaaggatggatggaaaaaagtatatgacagtatggtatgtcttcacccttttccttatgtcaaagtttttcagtggagaagattatgttaaatatgtatttaacatatttgtataaacatctttgtataaaagcaagattccataaataaatgaaaaaataaaaagaaatgaaaaaaaatgtggctgctcctaggtgtgggagaggagaaagtttattatagatgtggtggtttgaatatgcttggctcagggagtggtactgttaagaggtgtggccttgttggaggaagtctatcacgatggcggtgggctttgagtccctcttccaagttccctgaaagtcagtcttctcctggttgactttggatgaagatgtagaactctcggctcctccagctccaaatctgtctgaatgctgccatgcttcctgctatgatgatgagggactaaagctctgaaactgtaagccagccccaaataaatgttggcttttataagaatttccttggccatagtgtttcatcacagcagtaactaactaacagtaactaacagtttagtacccaaactaagacagaagttgataccagggactggggtactgctgtgatgggcctgaccatatttttgtttgcgggaatgtggatttggggccttgggatttggaaagcagtggaatgctttaagtagtgcttaatagaacatcctaataggaatttggaagacattggtactgagggcaatttgaactgtaggagcctggttctagaggtttcaaaaaataaaagtaattttggtatgttgcctggagatcattcttatgatttggtgaagaatgtggatgctttttggccttttctgaagagtttgcccaaggctaaggtaaagagattcatattaattgcattgacaaaggaagtctcagaaaagcccagcatagacttcctctggtttactctcatgaagaacattttgattaagcttaatcaggtttagaaaggaaaaatacaaaatttatggttcaagtaataaaagggtaccaagaagtacaatgtagctaaatcctgtgttagaggagattaagggagtggtgactttggggcaataagttaagcttattgcttatacgtttgtcattgaacaaggaaaagttatttagttattgttttcatttggacttttaatctggaatgaactacaattcagaaatgcaggaggcaagtttttgttccagatattgaggaatagtggccatgaaaagcataagtccaggcatggtaaattgtacatacctttaatcccaggagacagaggcaagcagatctctgagttcaaggccagcctggtatagagcaagttctaagtagagaaaagcttagatacctgctgaggaaagctgctaacagtgaatggaaacagcccaaaagatagatatttgttgaagtcaacaaagatgaaaggaattggagatatgaagaacacttttacatacatcagacatggagatgcagagtttggactttgcccagctgatttttggtcctgctttggtacagtatttcctcattatgacatttggaatagtaatgtataaatgtatatcctgtgatattggagatttgtggtctgcttttttattttgattttatagaggattacagttaagtgattggatgaatctcaaaagagactttgaactttgtacttttatcaatgttgagactgctatagactatggagactttagaagttgaactcaatgtattctatattatgctatggctaaattggccctcatagactcatatgcctgaacaagcctatgagggccagggagtagaatgtagtggtttgaatatgcttggcccagaaagtggcactattagaaagcatggccgtgttgaagtaagtgtggccttggagaaagtgtgtcactgtggagatcagctgtgagaccctcctcctggctgactagaagtccgtcttttcctggctacctttgaatcacaatgtagaactttaggctcctcaagccccacatctgcctagatgctgccgtgcttcctgcagagataataatgcactaaacatctcaaactgtgagccagcaccaattaaatgtttgcctttataagtgttgccttggttatggggtcacttcacagcaataaaaccctaagtaagacagtagtcctttttcagctttactttgacataaaggctaagaattttccagttcccagttattttctactctgtttctgctcttatgatttttactattcttgaacatgataagtagctgctctgtatagagacagctaggtctaactagagagggttaggtaggtggtaacccctgggtgctgacacctggccttacttgggtacctgtcatatatgataaagagaatgggttcaatcatttggaatgggtaatttgggtttcttcatgttgctaatggaaatgtttcctagaaacatcttctagggttttgtgtgtgtgtgtgtgtgtgtgtgtgtgtgtgtgtgtgtgtgtgtgtgtgtgtgtttgagtatttctttttagtttaaaattgcaattgcattcactgtgtggaaccaggagagagaagccaggtaacttgtttggaaacttcaaatgcttacatgaaacattgtaatgttgacattaatttcccccacagataaataaaataaaatttacacaaatgttctgatttcaggaatatgtcttctctaagtatatgcttatttgtaaaatattattacttttagaaataacctctaacattgacttatgtactataattttaggagccacaccatgagatgtttcccgaagattggggaaataaagcaaacgactttcagaggatgcttattatccgttgcttgaggcccgacaaggcaagtgcaggctttgttgagcagctctcatcccacccactctatgcacagcctagacaaactccatttcttcatagactcagggtggatggaggaatctacagaagtaacccaacgtccttctaatggatctcctaactgtgtctgcatctgggttaatagctaatagaatgtatttttggtgatgtgcttttatgattactctttatgatttttggttcctctgtgtcaaagacttctctctttgcctgctataatctcattttcattttaaactagtcaatggcattaacgtcaagtttatgtattagagtatctagaatgtcttctctaaatgtgcgtctatatttatacacaccacaccacagcattttaaagctttagtccctgttgaatagaaggcagtgttattaatgttattttaacttctttaaataataaatatacaaccagtaaagcagtacacatgtcctttcaatacttattaatgtcctcatttgtattacagtctagagaatatgaatttgcctacatttgttgacctatatcctcagagatgccagtataatgtgagcaggaggttattggggaactatggtaactgccattgttacaaacaaattaaagtttcacatagttacttcaaaactcacagtgtctacaatttgaatttgttttcaaaggaattgcgtacattccaactcttcccccttataaaagcagaatttaaatggtgaaagtaatatataatagacttttttatagatttcagggatgatctgagctagaggtgttcctttctcagagccatagttgcttccagctctcaggacctagccaaggcccaagcgtcaacatagaagtctgtccacatgttttaagcttttagtcagaatacagtccagcctctattagatttatctttatataaaacaattgtagaatatatatttaaggtttttattttggtttgttttttttccttgggttttttttgtttgtttgtttgttttgttttttgttttttgttgttttttcgagacagggtttctctgtgtagccctggctgtcctggcactcactctgtagaccaggctggcctcaaactcagaaatccacctgcctctgcctcctgagtgctgggattaaaggcatgcgccaccaatgcccagcatatttaagttttttaaatagagaaagtagcctacaaagtatccatggcctatgaaagtcacagttctgccctggcctctgttgctgtcgtaaatgaacactggtttgatgtttgtgaatcaaatgcaccctttgataacattgaaaagaatggcttttcatagacgcttcagtgggaagcttcagatgttcactttctattttaaggtggaaaaaatgaaatgctcacaaggttttgtgggcctttatcttagctgtgacaacttcatctgcatatatccttctgcaggtttatatttttgaaacttgacattttaatttgaaaatatattaaacttttaaatagatcaaatataactttccatattcattatgtttttgaaagtgggagttacataggctgaggtattttatgtgtagaggtctttttttctgttgactgatgttattctgtttgtttgaaatcacaattaaccttctgtttcatactgaactgtcccatacaacaatattccctacaatgttttctaatctattcctacgtttcccttttcaggatagaaaaattacaaaatgatatttagcaatatttcaatttttcttctcctttaattgcatctcaagtgatgatgatgggtacaggccggccttggctagttgataatatgtagctgccaagcgaggttttccaagaaacttctcccatcaaacctgtacatgtctgtgttgatctttaagtgccataagacttgatcattgtccacccctgaagagtgcctggatcacacataagtgcagatttgacagatgctcatatgtgttaagccactgtagtttataaatcacttataactagaaatatttttcatctatcctaaatgaaggaattaattggtcacaattttctataccaccatacccatgtatgttttcaatataaaaataattattagaatgccaatatattatccagaaacttcatgctctttacacttagtgttttcaggtactccaagttttagtggtgaattgactattttggaagctatatgctatgctctatggtgatatatgcctactctgcctttaaaatggtggtttcccagagtagaatggtattagcctagggaggagaacagcacattaagagactaacatttgagacagtagtatatacattttatttctgcactgtctctaggttataagataatgtgtgtgtgtgtgtgtgtgtgtgtgtgtgtgtgtatatatagctactaggaaaattaacaaaattcttttgggggagttttgagaggtgggtctcctttccattttgcatgttgtcctcttgaaaccctaccctaacacttgaatggtcagaatagcagttctcaacctgtggattgtgactccttgaagtggggtgtcatatgactctttcacaggggctacatacctgttttgctgtatatcagatattcatatttgtcctgaccagcaggacccagtttttcgtgggtacgaggggaaccgcaaacctgcaagagaaacgggctcgaaaagagagagagaccaaggagaattcctgtcaaggtctgagtttattaggctgaaaagccaggttataagcacacagtgaggggaaatagggaggggctgagggggaattaacaaagaacaaagaagtaggcatctgggggacatgaaggctgaattctgactgcaggcaagaggcaccctgagtcttatctcaggaatgtagattcctccttaacagcccggggtatcaagctgggctcagcacataactcaggtccttagaagtcttgggaatcaagaagagataaggaagaggggacaataattcaaacttttagggtcttaggtgccaggaaggggtagggaggaggaggtgactggttcctaacacaaggccatttggcttattagggtgggaaactgcgaaaggcttactttctcatggtatggtctccaacacatatttcaattcacaacagtagcaaagttacagttataaagtaacaacgaaataatgttatggttgggggtcaccacaacatgagaaactgaattaaagggctgcagcactaggaaggttgagaaccactgagtcagaaattggagtttgccaagctttccaatgctatagtttagagaaattggaaagattcttgctaagtcaccagtaggaaaatgagatgggctcatagtttcccttaaaatgtaatagttatagtatcttattgatggaagaaacatgtagggtagaaagtactaaggtatgcagtgttcagagtcatttgtaaaataaagagcttctggccacagttctatcattctgaactgtaaacaaagggcaaatccatcagctctcaataagaaacttgtcagatgccagttaatgagcgtctctgagctcaaataaatgttgtgggaatttgcactgattagaaaagcatgcatagaaaaaaaacacgggcttttctcctgcctttgagaagatggctgccataacgagtctgaaatctttgctactgacagatctcattttacaagcctaatgctggaatgatcagattgctagcactgataggtctatcatctggtgagcctgattgctggcacagtctgactttaccttgggagttctagtctcctgttgcgaagcaagtaagttttgctctgttatagtctgaaaagtgaaattgtggaatctagcttctcttctcttcgggagagatgctcatattcctaactggacctaccgtccagtgctaacagacagccatgtttacctgtgcaggtaaaccagcaggtccctcttccaaaaactgggccattcctatcacaaactagcttttaggaaacttcaagtctctaaatctgtcattttatttgcaggactataattttgtcatgaggttaaagctaacttggggaggaaaggtgctgttgaataagtgttgtgttttgctgttgttttaatctgatgagtgaagaaaatccctttgtgcaaagaatggtaatgagaaagacagtgatgaggcctagggtaggaaattaggatatttttaatatttctgcagtgagtgtgctatttgtaattattcaaaggagctgaagcatgaagtaattatctagaaatcaactgagtgtgtgtacatgtgtgcatgtgtatacatatgaatgtatgtatatgtgttcctgtgtgtgtgtgtgtgtgtgtgtgtgtgtatgaattcatcctttaatggtttgttgttgtcgtttagaatttctggaattaaactctataaaattttaatcttgagactttgtatttatgcattcaatagatgctaaaaaaaaaaaaaatgactcagtgactagtgacttgagttagagcccctgaacccacaagggaggaggagtgtagtccagcaagctgacctttaccttccactctctcggtactcatgttcactcactaccttgcaacacacacaaaacaaacaaacaaacaaatatataaataaaagtctaacttgaatctggatatttctccattggttcagcattcctagccacacacatgtgcaggagaacacatgtacctgagtttaaaaagcattatgatgtggtgatggttttattcacaaatcttgttcaaatagatgttactgagaacatataactggtgtttggaggaacttgtaactgtttccagaggatactatcttttttagatactgggcacttgtaaattgctcctgcagctgaagaatgttccaggcatgtggaattgctaccctgggttgggggcggggagtgtgatatatttgtacagtcccatccttctataatgacagccattctgctgatgactgtgaggtcctcacgagcgctttccattactccttcctctgaggtagcctgtgttctgtcctacagctggcatgtttgactcacaccttccttctatgctaactaagctgttatggagatgcccacagcattctgtgtggcaggactgattagcttgtgagaacaagataaagaaacagagagctactatttgtgccttcaaaatttgagcagaaatgtgtgtttcagagcagggttaaaagtgcatttggtcgttacttcttaagacataagctgaagttaggtaattagatagattatatgtatgatgttagtcatatgaacatctgtagctgtaacttgttatcaaagggaatgtgactttcaaaaactgcaagtgtgtgtgaaataaacatatgaatctttaaagaagctgtgttaatggaggctttgaaggagtctattggcatttcagtactgcagtgggccagtccttattctgcttggtattcctatattcaaaggagaaaattgaatatttagcagagtaaggcaaacaaaacaaatcaaaaaatgccctcaggggatctggtgctgtattagcccagtgttgggacttgtcacattcagtttcaagtgtatgcatgcagttcctatgaagtcaaaggggagacattgtccttgatcctatgcccacgcttgacatggaataccaaatttatctccttcattagtgtgacataaatctgaagaatattgtcataaatttaacccagcataaaacttgcttttacttacctagaaaaatgatttggtagctttgttctcacctgttgaaaaaaaatcatcttaagtgagcatcacaaacggatctctgcacaacgacggaggaagacctgtcgggaaatgagtacactggtatctgctgaactgtttgcctcgtttttccttcttcagatctaagctttgtaatgatgcctttcttctccaatgttttattaagaggaaaccatcagcactgacaaagtacaagcaagaagatggagtgtttgtagttgaagggagcgtctgtagtttgttgagattggaacaagagtcatgtcatgcatcctgtttaggtcacacctggatcacaattaactggcatgacaaccgagaaatgccaggtgtagcttctcactgggaaacaggggatggaacagacaaggctgactgtgtccttactatcgccacatatccgctcctgcatagacccccaagccatagagtttgcctttttcaaacaggccccaagaaaattgtcctgatagacaatctgccaattcagagtggcttgtttcttagtaaatagcttgtgatgttttttttacagagctctgcttcccccaaacattgatgggaatataattagtgttttaaaaccaaaaggtttcaaccctacataaagaactacagacaaataaggaatcataagagtgggagaaatggtctttgaatttggtgtctcctacaagtcactacttattattggaatcatctgtaattgtttttctgaaaggaatttatggacagcataacaccctggaactcccactgtttgcacctaatctatacaggggatcccagttcattttattttgagacaggatcttgcaatgcagcgcagcctgaccatgaactggtgagccggtagactccgcagtgctgaggccacatgcatatgctagcacacccactgacggttttgttttaaaactcctgaaagttgtaactattttgactattctttcaaatattcttgtcccttttaggttattccgatgctgcaggaattcataatcaagaagttggggcgctctttcattgagccacccccctttgacttggccaaggcatttggggacagtaactgttgtgcaccgttgatctttgtgctctcccctggagcagatcccatgaatgctcttctgaaattcgctgatgaccaggtacttcacagcagacggacactgtcacgttcctttataataattgatttttgctctaaccaatgtcttaaaagatgagagaaagctaaaacttgtcactcagctgtaagaagggcttggaattctgaaacatgacagagtcccaagaaaatgatactcagtggcagcacttacattaaagtggctccttgcacaacttgtgaagtagaattgggtatctttggttgttgtggcatgtgccattaggatttgctgaaggaggaagaggcagggagatcatgagtttgagaccaacctgtagtaaaattgggggttgaggaacatttgcttctttcaacatttacagcatctacgccagtacatggacttggttgatttagttcaggcaatagctccagcgtgaagcttctagtcacacccctcttcctagcctctaaaggacggcagccctctttgactctcagagcagctatacattataacctcactgccaggagagtatgctcaattgtctatacttgtaagagaatttaaaacatattcaaattaatttgctataagtgttcttatgccacactgtctagaagaagaaagtaatgaacaggtttttggatggttctgagttgatgttcctcattttggtataatctaaacaatttctggcagtttctaaaacatggaggttatgacctataatgaactttggtggattgaggtcatggcctacagtaaactttggtggtaaatgttattaatttttttctctttgaaactgtacagaagactttaaagtaaatggttacatctccatttcatagtgagggatattaaagcaaagagaggatagcttcctgaaagctacatgactttaaaattaaagtagtttctattgggccacttggcacttgaatagcctggattttatatgagtgctatgactgtctgatatagcattctgattgtttcagaagtgttgagatattgatgtcatgattaaagatagatactttaagaagcatgaccattcatttgtgaggtcatcccagttggactgtagaggattgacttgagtactgcaaaatggaagcaggccactagttccggcagggatatcgggaatgagataataaatgtagtggcagatctagagtggaagtagctccaagtgtctattatgcatggggcttatctctacaaatcaacattgcttcaaaatccttttgatctttgtttcctctgtgtgtctctttggtgttgggcaatgttgccattctcctgccctgtctgtcatccttctgcattgtctccagcctctatttctacattttttccccaccaagatgccttttttttttttctcacagagttagtgactgtgatagtttggatatgcttggcccaaggactatttggagtttggccttgttggagtaggtctggccttgttggaggaggtgtgtcactgtgagtgtgggcttaagaccctcatcctagctgcctggaagccagttttcttctagcagccttcagatgaaggtgtagaactctgagatcctcctgcaccatgcctgcctagacgctgccatgctcctaccttgatgataatagacttattaaccttttaacctataagccaggcccaattaaatgtccttataagagctgccttggtcatggtgtgtgttcacagcagtaaaatcctaaaacagtggctatatgctgccgcacacccttttggtccctgtctgcatagaaccagtctctggttgcaggtggacaaggagtcagcgaatgaatgacagacagaattacatgagagattgtgtagaatctgaatgtattttcacaaaatgtacaccagtcttatataatacagaaaacaaaggggtagcgtgtcacagcagacaaagtacattgaagttacctgacacaaaacaaaggaatgacttcaaaaggacttacaggaaccaggtaatatttacagtaaagataaaacagccctgcctagggtcagctaatgacaggtaaggatttcacaccctagtcacaatttgtgctactcctttgagccttgtgaaagctagcaccagggggttctgctgtagcagaccttctcatgaaaaatgcaataccacaacccccctatttcctaggccttgataaattcttgtatgaatgtaacttggctgttcttttaagtatctgtggtgaatctccatttgtcagaagaattcaccaacttgcttctaatatgcaatgtagcctgctatacctggctatagagaagatctgtgtctcagtgggattccctatctcttacatggtaaacccacctattagctaggccattatgtgttcccttgtttgggtgagactggctactgtcctaagtaatctatctgcagaccagccctgagctattccagctctgttctttgtaatacctaattagtttcactgtctctactagaagtaaatttgaatgttactgaataagtaacattcttactgaatttgtaatgaattccaagctcagcggcttcaagcattttctaggacgttggaacactggtggaggcttacctatgtcagaattcaatcttaaaaggcacttataataaaataatactaaaagagagcatgtggacccatacaccagactaacatggggatagggtatgagtatacaggttatgagaagcctggttccagaagattgagtttccttgaaactccctgcctcgtgagtgcttccaggcctctctgcctgccaaacagacttcactggagtgtgcagttggagatggaccaagacccattcttccactgcctctgtcaccaggggcctcttctaggaatctggggaccactacccctaaaatgaggaaatccaaaagccacaggtgagctggggaaacatccccacagcattgctgaaggaagttgctgactggcaggcagtggttaaagcttttgtgcttctaattttatgagtatctaaagcagctgacacttgctcaaggtgactgggcaagttcatcttccagctcatgttttccttcttagcttcatgttttcagggttgctaaatgacagctgtgtcctttaattttcacctttattagaaaggctttttaatatttttttttattttctatatcttatgtcaacagccaaagagccttcagaattttcctcttatcaccgcaatcatttctatactatttcatctaacttttgattagcacatgcttaggttatatctgtttggaccagtgtatgatgctaaaatgacatctttgttgttcttgtacacagggatatgggggctcaaaacttagctctctatctctgggccaaggccaagggcccattgctatgaagatgttagagaaagctgtcaaggatgggacctgggttgttcttcaaaactgtcaccttgccacttcttggatgccaactcttgagaaagtttgtgaggtaaaaatgcagatatatatttattagtgtgttacctccccagtctcattttcatatacatctcacccaagtgcttcatttttgttctttcatttggcaggcttcagattaaggttgtagctgggtcactataaacatgggtttatattaaacactttacctaaaaaaaacaaaaacaaaaacaaaaaaacaggcagacacacagtcaggccatagctgataccccttcacacagagtagtgcttatattgtatttcagaatgtctcagaggaacaggcctgagtagctattcctaggccttaacatcacagtactaatggagggctctatgacctctacggtttgctgtagaggtagtagtgataaatactgaggcttcaggatacactagctcttaccctttaaaacacccttctctcttaaacaaataattccagcttggagtgatattgatttgtcttcagtggccacttaattcccaaatctggctgcagcaagaggagggcgttagtcttaatctagctgtgggtcaagaattatttttgaaatatttcagaaacatcagtacaggcatgaaacccattaagaagactttagtctttgagccaatgctgaactacatagcacttgtgtaagctgtacaattatgtgaattaattttgtcagtggagtgacaacactctgggccttctcagtgaagcatggtgactcagcaaggaatgttgggcttctgcttaagttgcaacaattccatctctgtttagagatgtttctttccctttccagactgttccttacagacatggagatgattccttgagtcttactcacacttgtttgtgatttgttttctcacaggagttaagcgcagaatcaacacaccctgatttccgaatctggctgacgagttacccatctccaaatttccccgtgtcagtcctgcagaatggagtaaaaatgaccaacgaagcaccaaaaggattgcgggctaatatcatccgatcatacctcatggaccccatctctgaccctgaattctttggcagctgcaaaaagcctgttagtgatggctaagtcctgtcaccccagccctaagtcctgtcaccccagccctgtaaagcaattcaagttggccccttgtgatcagggatgtgtgcacagagtaaaactacaaattaaatagaccccctgctctgcagcacagttggttttcattactgattattgactgtgctgaagtcaattttattaatattttattttaattttaccaccagccccaatcctgctcagccgagatattatggagtatcattaataatgtaggtttctgttgagagagtcagctgtaagtcattcccagcgcaaatctgcaaggctggagaacctgttccaggatatgaactgagctctttgctatctggaaacatccctctaaattaaaacataaaaacatttccttcatataaccataatgagagccaaaatggttttcctcctcaattgatgggactcataagggtcttttctcgagccaccaggcaagcagggaaaacacccactgttttcatgattagaaatttgtctgagtgtctgtgacctaaaattgtttcatggtgttttgctgtaattaaaaattgaagggctcttttatatgaagggttatgaactttgataagttttgccattcgaaagctcatagttgtgagatctgaacattatttaagtgcacaacatgagaaaacactaaagtactttcattaagcaaaaatttgcacatgtgcacacacacacacacacacacacacacaaaagagaaaagaaaagaaaaaaagaaagaaatctacacacatacattcaaaaccatgtcaaccttgtcctgaacttccaggacctatgtgtatggctggcttttgtattgataaggcttggtgaaagctggtggttcccagttagtctatcatatggcattatctctccatatggtagactgaacagagccccctttgtaagtgtaacctaccttctctttcttttagattaaagggtctctcccatagtaataacattttagagttagaggtgtttatgaaacagttccaacccaagataaaatctcactaaattccattaacactttacaactttacattttaactttgtatttgagattgatttttatacttatagtaaaattgaaaatataaaaatagtataaggaacaatctatgtctttcttcatattcacctgctattaatttttataccatttggtttgttgttttgtgttcctctctatgtagccaaatatattaatatctgtgcatatacacattagtctctttgtgtctctgtgtatctttgtctttacatctatgtctctctctttccctgtctctccccactctgtgtgtgtgtgatctcttggcagctatagaggcttggttacagtctagagctttcctcagatactcaaaagcatagatgcttcagcctcatataaaatggtatggcattatttgcctataacttagacatatcctcctatatgctaatttaaataatgtataggtcacttatatcatagaatgttaatagtatgtaaatatttgtcaattttcttgtgcaaagagtaagaaatctatattcaacaccagcacaatcagaaaggttgattaaaatcatcaatgtagaacaagcaaaacacagaagggtttagtgtgtgtgtgtgtgtgtgtgtgtgtgtgtgtgtgtgtgtgtgtataataccagtcaaaagcaaactagatctatcatgaccccttatccttgaatactttcagaaatttctaagcctttgacatagagacatgatgctgatacctacaaagttcatacctgcaagccatgtagtgaagttacccaaaactctcagaatgtttaaacttttgttttaggtcacattcataggtattttggggtacatgggacctgcaggtcccacattagatgtatttatgtatgttttatgaatagggacattgacttaccttggtattgttcttactcattgtaaatgtaactgtcactctctcatgtggttcagtgttgtcagctactagcaacatttcgtcgtctatgtgagaattggtgtaaggttcagtgtcaagcttatttcttatgtctgttttaccttcttcatgctgtttatgcttcatccctgtggtgctggagcccaaacccaggcctgggcaggcttggcaagggctgtgcctctgagcttgcttccaggagtctgcttctttaacttggagcatttcctcggctcttcttgcctacaacactgtcctttctgaagaacgtacttcatgatactgtgttaacatgggattttcctcattcagaagctgtgtgacattctcctaacagttggattcaggcttttcttttcttttcttttcttttcttttttttttttaattcttagccaaatttttaggtaggtgatgctgtgtcccagtggatgaaactaattttgattatctaaagagacactgattaatttctccactgtttaataactgttttttctctttcatgttggggaggagaggtgttccaccttccattcatatttagtatctactgagcattctagcctcaattcttgccttaagtggttattccccagttgcagctcttggaactttcaacgcttggcacttactcctctaagcagtggctccttacaatcaatattggtatggacataaggtttactgattttctccccaaagatttgcaattcactgatcaagaattttatattcatacagaccaggcttagtaggccccccccaatccgtgggaactaggggttccggcaggtgggcatggagttggcgagaattgggtgacaaatgaacacagacctcacattattccaattttagtcaaaagatctccattaacctgttttctgtgtgtatttcagctttaggaattctatgttgttagcagctctcactttctaatgtaagataatccagactcatcatggaatcttcatgattctgtcacagagccagacatttttccaaagagctctgctttttctgagtggttaatggtgttggagaactcaatggatattagatgacttccttggtacttaaatataaacacagccaggaatagtgctgtacacctttaatcccagcactgtgtagaagcccacagatctttgtgagtttgaggtcaacctggtctggtctgtgtattgagttctaggacagtcagggctaaatggagagaccctatgtataaaacaacaacaacaacaacaacaacaacaacaaaaaattaaagaaaatctataggcatgcaaacatacaaatatatacgtacatgtcctacaggccctctaggcatgaagactacatgccagaattttcagtttcactgcatcttcctcattcattcttgtcttcacttcatgtttgtcttttcttttacattaagacatctagattcgaacaattaactattgacttgatcaatgattcaatatatgcaaaataattcagagtaatattggcatgtttagtcaatgtctttagtcatttatctctcttttagtctttacctcttttgtcagacctgtttcattctttctcatttcttttttggttgattttatatctccctgttttctattttccttttcgattttattctgtgaaggaaccttacgttgtgagataaaatttagtcttttctgtgatgtttctgggttttgttaaataataaaatatcatatagttacttccagttgcaagaagagcttgagtcagaaattggtagatatggcacaatatgttaattctacttcattgttattaaaaatgcaggctttggattctccacactctcacccagtgtccctggctggtgggtggcagcctatcaggggaagagaatgagctgccatcctccttctcatgacctgtgacacagctcgcagttgttggtaccattcacttcagagtagttttgaaacaggaagcggtagatattcttgattttagctgagaattttttgatctgggcatgggcttgaggtgatacgtcccctcaccccctccccaccgcacttctgatctagtctgtttcaggctctccagtgcacccttcagactggctctgactgggaggcttcctcgatccatggtacatgttgtctttaccagcatcccttcctcctctggattcccactaggatggcccactgcttggctgagtacctggtctttccctctgatcttctaacctctgctcctttttcacatctgagttttgcattttctcaaagtttccagctgttatgagcgtcaactctgatggcccattgatctcttcctatggaggatgactgcctcccatgcccttcaccagggaggaggggagcaagctgacttctagaatagcagtttcgatgtctgaagaagtcattctgcagtcctacctcaagctctgctgttagcattctgtattcttgatgtttgggacctgccaatttaggtcatatcatctcctttgaaattcttccacagtagtctgggactatacatagacttcataattcttgtgttgcattgcttcagttagaataaccccccctctcaaaaaaaaattcctgtaaaatttaaattagatggacttgttctgtttcctacaaacttagtattcacagccatgcggtctaattggacttgagggtgattgatcagatttttgcctgagacacctgtggaaaaacacttctgtattagggggcttttggggagaggggaggggagcagagaaaagagcctcatatcatttataagcaaaggaatataactatactaattcaaaaaccttgcaagtttgatgcaatgttcacagaaaaataatgtcatgggacaatttcttctcattacaggaggaattcaagaaactgctttatggcctctgtttctttcatgctttggtacaagagagacgaaaattcggaccccttgggtggaatattccttacgaattcaatgagacagatctaagaatcagtgtgcagcaactccacatgttcctggaccagtatgaggtactacagacatcacagcaagggcctcacctgttatgctctttatcatgttctaagtattggtgcagtgagcagggacttatgacttaattctgttcttatggaataaattgcaaggaagttcctaatagcctattcaatagtactttattataacaggaaattataactgctttaggagctagttaggatgttcgtttgtctcttaggagcctgtgttttatcatgtattttcacacacagccacctgtggaggtttaaacagtaatgatgttatatttatcatgaaaatagtataaatcagctgggttaggaagtggggtggggcagaaggatgaccagttttctcttctggagcggaaattcattttttgagaagtgaaatctttaattttgagcctggaaacaaactatgtaatacgatttaaaaagacaactagatcctggaaggaggcccgagagcccgatgtcacaaatgctctcttcattctgagactagttctctctggggcttgtattgcttggtttccgttttgagatatggtctctctctatagccctggctggcctggaattcacagaaattcttctgcctcagaatactggaattgagggcatgcatcaccaccccaatgtttttttttttttccttttcttttcccatgaggcaccatttgattccctacccagactagccttgaatttagtctgtaggccaggtaggccttgaacttgagatgttccacctcaacctctagggtacttttcacagtacccctcccctttcttccttctctcccagcctttcccctcccctccattctactggaatcctccttactctccctctttctctgtcttgccttcccattgtctcgggaacatcacacattgagcatgattacatgtcctctttactctttgctaactgggtacaaacaagtttgaaacttggaaaaactgttctgtaaatcactgcaaatgcccaggagagtagggagctctacctcttcccaccctggaaagcaagttgtctaaattttggcagaatcttattcaaattcagctggatatctttaattaaatctatcattggactatcaaacttgcaacttaggcttctatgtccataaaagcaaaagagaaaccaataaagatggagagttcaagtggcagaaacattcaaatgagtcacgagtgggatacattgtttccttgtagtcagacctccaggaaggaaaggaactaataataaagacaaaatagatgccagagggggaggtatctgagctaagataattatacagaaccagtgaggaatattggtagttagcaatttggatatctggagaatatattttaccttacaatataatctataatgaggagttaattaaaatgcgtataagtatgcaagtttggtttatcacttaaaaaattaaatcctttgtatcaacaggctaaagagaatttaaaacacaagatcctatcagtagttacagaaaaataaaattttggcacagcccatattcattagtgataaaaaatactctcagtaaagtaggcgtcaccatgaaaaggaatgttctcttagtcagtgttccattgctatagaaagacacaatgaccagggcaattcttatataagaaaacatttaattgggggcttgcttacagtttcagaggcttagtccattttcatcataatagagagcatgtatggagctggaacagaagctgagagctacatcctgatctgcaggccaacacacacacacacacacacacacacacacacacacacagagacacttggaaaacagctctgataagtaggaagtgtgatgaaattacactgtcatgaggcaacaaacgcctggagtcaccaaaagcccgaatgcctgtagcatcctcccaggtagacaacagcaaatctgctcccagccttggcctgaggttgtgctacaactcttctgattttaggcaccgaattgcagccacggaaaagtaatctatgagaccaggcaagcaactctaagaattgaacctcagtagggaacaaggcagaggtgtaatacctctggaagagaaaggagtgagatgatttagatattaaacagagaatagagaagggaaaccttgacttatgttagaacaaatgttgatgaaatatgcacaactaagaccctcaatagtagttttaaaatgttacaaattcaaattatatggttgatcattaaacaatcacagcagaataacaggagttttggtctgagcattggctgagaggtaaacaaaataaaataagagaaagatcatagggacatcagcaatgattagcaggaaggtatataaaaggaggtcacgtagttgccaactttgaggaagatgtttagtttaacggtggtagccaaatggggacacttttccatgccctgtgctactagtatctcactgcagttctcaattttaggaacttccttacgatgctctccgctacatgactggggaatgtaattatggaggccgggtgacagacgactgggatcggcgcacactgcgcagcattctcaacaaattcttctgcacagaattagttgaaaatccacaatacaaatttgactctagtggcatctattttgttcctccctctggtgatgtaagtaaagtcccctttaagagcagaaaaacatgacactcctaggaactgacaacatggtttttaatggtgatttcccatgcttttctaagctgtagatgaacagaccatacacagagagtcagagagcaaagggggttagagtttcctacttactgtgatgggagataattttcttggtgacctgagatgttaacactgtgagcttggtgtttgcataaaaataccttgtcacaattaaaatgactatgcacatgatggggatcataaaatgttagaagtaataagtaatattcataccacagttatttttagttagtcctaagtaatctcacagcagcatcaaattaacattgtatcattctttacaaacaaggaggcagattcactaaggttgatgggcctgacaaaggcagccaaagcagaaggcagagaagcagtgtggcccaaggcctgatctcttttgcttttccttccagccccaggtactgccttcagaataatacacatagttgctttcaaaggctttccattgtgctccagtcatttcccatttgatttccagggtcaaataacatgtgttaaggatgaacatgagaccacatgcacaagctccatgcaaaataacttgataacccaaacccatcacctagggctgatgctggggtaatgagaccaataatgagttgttgggagataaaaaacaaacaaacgccgggcagtggtggcacatggctttaatcccagtacttgggaggcagagaaaccttgtcttaaaaaaccaaaaccaaacaaagaagtgaagggacatgtatgtgacatgacctacatcataaaactattagtgtgtgattatatgggaattagtgaaaacattttttaagagtaagttctttattaagatttattccctgatatagctgcctcatgtgaggctaggccagtgcctagcaagtgcagaagtggatgctcacagccatctattggatggaacacagggcccccaatggaggagctagagaaagtaccaaaggagctgaaggggtctgcaaccctataggtggagcaacaatatgaactaaccagtacccccggagctcttgactctagctgcctaggtagcagaagatggcctagtcggccatcactgggaagaaaggccccttggtcttgcaaactttatatgccccagtacaggggaactccagggccaagaagtgggagtgggtgggtaggggaacagggcagggggagggcataggggacttttgggatagcatttgaaatgtaaatgaagaaaatatctaataaaaaaaccaacttaaaaaaaaaaacaaaacaagccaagaacttctgagatacaagaaacaaagaggcacatgcttcagttcactacaaacacaagtgtggccctttctgtttctttcctttttggactaccttgcagctttgttgtatattagtatttcgctgattgaattttcaaattacatttgccttgaaattatagaacaatatagaattttgtagatttgaagtttccaaagttggactaaaactagcttaagtcaaataaacccgtgttcatagttcctaacctatttctcatccaactttcctctcttaatttacccatggttgtttaatcattgtccctgctgaaaggaagggaaagcatgcagttttcagtcttgtaggctcattcactccaccactgaggactgaaaagcattgtatccaagccaagctcaacctcacagatgtgtctaacctcccaacttcttccactcatctttgcagcacaaaagctacatcgactacacaaagactctgccactgatcccagcaccagaagtctttgggatgaatgccaacgctgacatcactaaggaccagtcggagacgcagctgctgtttgataacattctccttacccaggtgtgtattgtgtgaggcttgtgtggctcctgagcagagccagcatagatgtgtctgccccaccatacagcagaggcttcttcaaaactgccagagtgaagaagctcacaaagcaaaagaaagaaaatccacacaatcccttattacagactcagcacagagagtgtgggcatcggccattttcttttcatcagtcttgttttgaaacaaaagcatctctttgagtctcttgcttcttgggattcctttttttttttttttttttttctttcatgcctaagccttgcccccaaaacagcatatgttctttctttcctttctcttaggtggaaaccatcattttttttaaaaaaaagatttatttattttatggcatttatttattttatgtatgggagtacactgtcactctttttaattggatcccactacagatggttgtgagccaccatgtggttgctgggaattgaactcagcacctctggaagagcagtcagtggtcttacctgctgagccatctctctagctcaaaaccatcattttaaagatacctgagaagcagtctggggaggatctgtgcagaactttacctgttttattttctaggttcctgctgatttaacagcatttgtttattttacgattcatctttatttactgtccaaggacattttacctactttgtataaaaagttcccttttcactagattttgtaacatttaagtatatgatagcaatattacaaaatgctttaaaagaaagagtttatgagtagaaggcacaggaaggcacagagccctgctgatggaccaagtatgcccatgtgggtagaagtgtacaatcttaaatgtgggcagcagttggtgagttaaacagttgttaatcctctctctctgtttagagggtaacctcactttttttttaatgctttggaagcaaattaatctagatgccacaagttcccatggaggttaaataaactaaggacacctaactgttcaatctggaagatgcaggtgaagcagggatggttcatgttgccacagtgctggcccctcaataacacgatgtagagacatgtctttgtggtaatagagcaacccaaggaatgagaggcctttaaaattcctgttttatagatagaaaactgagacacaagaggattaagtagtttgaccaaagttggggagtccagtttcaagtctacactcaaaccaagccatgtgaccctcaccagtttggctccagaacctgcgttctgagctgctgtccctcactcttcttctagattctgtggatgggtcagacctaagatgctgagaaggataagagtcaggaggatatgtggtgtgttataaatgtgtatgtctacaaagcctgtatgtctagcttctgtttgtatgcccatcaaagcctattttaatgttcatttcacacactgatggcatgaaaccctgttattgtcagagtacgcacaggggacatggacaaacatgaataagtcagtcctgaggagtattggctacttgtcatgtgtgatagcctgacagcaggcttagttcattgtctttgtcttcatttaaactcagtggtgtgtgccacattgcagaacccataaaacagtgggctcattccaacagaaaatgactcagaaccaaaccaataagctggaatacacaggtgtatttcctcagtgtgtgatcaaactgcctttttcataatccttggactcagattggcaagtgtgactctcagaatgggtagtcattggctcttgagtcacagctcagaggcagagaccaaaactgcagaactccatgaactaatgatgacaaaacttttatactaatgtccttagtcaaaacacgtcttggagaaaaacagaagaggcagatagcagagtcgagagtgtaatttttatcagtaatcttttgcttatgcttaatggttgcaccttatcttaagaagagaaattatacacccaaacattgaactgaagccagggacccctgtagttgaattagggaaaggctggaagaagttgagaaaagaggatggccccataggaagaccagcagtctcaactaacctggacccctcagacactgagccactaaccaggcagcatatacaagctggtctgaggctcatatatagaggacttcctggtctggccacagtgggagaatactcgcctaactctccagagacttgaggccctagggagtggggaggcgtggcaggtgaggtaagaaggatgtctgagatgaaatatttttctaacatttttggttggttagcttgtctcctctgtgtgtgtgtgtgatttttataggttttgtgttttagtgggaaagtatagctcttaatagaaaatgatagagagaatgatttctattacgtttatgcaaattatttgtaaatacagtaaaaagaaagatatttcatttagtctgggtccagcactcagtatcttttttcccttctactgtttgttttaaatattaactataaactaaataccataggaatgtaagaaataattatttatggcaatagtcctcctcctccttttcctccttctttttactaggaggcattgaaatttttctagcatttaattactttattgttagatttttaaaactcctctagtggtgtgtgacaggtaggtagaaatctaagttaaatgataatgttcacagaatagaatgtttaatattaatcataaagataccaagaagtgtaaaacaggaaggagactgaagtcagttttcttggactggaaaaatgtgagctaatcaactatattccaatagtgcttattctcccccaggaggtacacctcccccccaccttcctgagtgtatttgttctttgacttgtttaaaaaagtcattccagaaaatataaatgcatttatgagatgtcactataaatatgtgaaacacaaattacatcagatgctccttcctggcttctgaggggagtcactaatgccctccttctccctgtaactcctagccaccttgagggagtgagcttattttctttgctcacggacaaagctgcatctctgctcctggcaacaggtgtgcatcaattattggcaaatagattttgtggcaagctttctcaagacacacccacattccctcctcgtgggtgttgatgtttgtcattgcccagctgctcagttgagggcaccaggcattgggatgtacaaatgttccctaaggtcctgcttctctggatacattccatgttctccctcctcctgtctcacaatcatctctcaaaactccattccccgaggctcttacaatccttttgtgtgaagaattactatcaatctaacagatagattagttcttagatttacccaacagtttttccctctaagccgccctttgacttttatgaggatgtttgtaattgtttgaattcttcagtctcattcatcaggttctggaacaaagtcatcagatgaagtagtaaatgaggttgctggagatatcctgggtaaacttccaaacaactttgatgtggaggctgccatgaggagatacccaacaacctacactcagagcatgaacactgtccttgtccaagagatgggacgtttcaataagttgctgataaccataagagaatcatgcattaatattcaaaaagcagtcaaggtaaggtgaactgagtaaaaaaaatatctaagttaaaccttgcactttcatcaatttagcaaatatttactagtgtcagatactggaaagtactattcttgatctaaagtataagaaacaagtccctgaactttattagcttataggattctgaggataacagttaataaagagatatataagtacagagggtatgctagacaacacagtgtactgggaagagtgcatgatgaggagacattgtgccttaaagagaacaagcttacatgttagccatgtagataagcaaaacattaaacaaatatatacatgacagtcaaagatttattttattttcatttgtctgtgtatgtgtttgtgtgaatgtactcgcatgtgtgtgctcatgtgcatgtgtgcgtgtgtgctgatgtgtgtatgtgcgtgtgcatgtgtgtatattcaagatgcccatgaaggccagcagtgggtataggatttttcaaagttgaagttacagatgtttatgagccaccctgtgtggatgtgggagtccaaactcctgtcctttgccacagcagtaagcactcctaaccatcagccatctctctctaggcctggatataatttctaagtggtaagttccttagaaaagatgacaggatagtgagtacagcagtgagtgtggagcaggctgaggcaaacacttccaaggacagaggcctaaaggataccaaagaagaagcttgggactgttaagagaagatcattagggagatgactgcacaatggtaaaagccaacagcagtaccaatatggcttggaccagatgcaccaaggctgatggggctagaaacggtgtgtgtgtgtggggggggggagggtgtgtctctgtgtgtgtgtgtgtctgtgtgtgtgtgtggtatggtgtggtgtggtatgtgtgtgtgtctgtgtgtgtgtgtgtctgtgtgtgtgtgtgtgtgtgtgtgtgtgtgtgtgtgaccaggtacataatggccttgtcagccatggctagaatcttgaattttattttaaaatacaaaggcattgggagttttcaggcaatagtgatatttcacatatttgaaactcactcctactgtggccagggaggattgtaaggaagcagaatgatagagaacataggtgaggtgtcagagctgagtgtggcaggagcactgaggggaagagtaatggctgtctatatgccattaggacaactgaaaattgatgtaggcatgagcaagagaagatccagagacaacccccaagtgtttagcctgagcaagtagaaggtctaggaacggggctgtttgagggagaaagttaagaaatacaatcaggttacctttgaagtgtttcctagagtcaacggagagattgctattaattgcatgcattagagtccaaggggggagtcagggtgggtataacttccagtctgtaatattgtagtcagaaataaaattcacagatgacctcaggtactttggtagccctgatgagcataggctattttgaaatcaatctcccctgttcactccgtcccccttctgctgcgaatgtgcagcagtttcctttcttggaggcatctctaacctttctctaaatatttccctaatgtgataaaatgatccaaattgtaatgctaacttacaatggcctctctgaggtagcaatgtagccacattttacgcttttacctctttgtcttggcgaaatattccaaccaatataattgggtaaagttatacatcaaagttgatactatgtatatgttttctttaagattgttgccagaaaataatgctgaacttataaatcactgatacttcttcatagaaggcaaacacatacagaaacacacacacatataacttttttcaaaaaaaaattaaaattgtaaaaaaaaaaaagctaacaaaaattaaacacgtagaagaggactattattttgcttgaggtacaccagcaaacgatgcgtagtctgtgaacactactcatgctcactgttaatagaacgtcagtcatcagcactctcacatctctgaaatataaactggtacagcctctctgaggcacagcttggcaatatcagttaaaagtgaactatctttcatcctgatgtgtatttatacatgcactgagcgagcgggcacagcacaggagtgccaaaccctgcattattttaatagcaaaccatgtaaatcaagtaatatccaatagtgttataaaatgcacagggagatgtccactgaatgaggaagacagacagagctgctgacagcgacaggtgccaggatacactagtaaataacgctgaataactatgtatgtcattactcacttggtattatgctcagtaaggttgtatttgcctgaagttgacacagtctccctctcccactccctcctctctcttccttttctctttcatagacctgtacatataaatacttaataaattatttgaaattaacttgcttgcattctatagcttttctcttaacaactcatgacacacttcctaaacaacaaatatgtgattttaccacgtgcagtataattacctcatttaccattgtaaagaatgagcaggcaaagtcccagcactgtcagtggtccctacaatgtgatttttgggtccaggccccctacaatgtgattttcgggtccaggccccagcacaatcaggtttccacctgtgttcagggttctctcctcagcaacagttctcagcgttctctcactttagtgacatgtagtgtctctcttttaagaatctagtccctttttaaaaatgagatttcatattacagtattttcaaaggctgagtattaaatgaaagatttttttgtctgaattacagaatgcagttaacagtatacccaaggaaaatcatactacttttcttaggtttgatttgaaatcatcaaatgagatagattaaaaataagtaaattatttctcctaaacaaggaaaaggatgccttataaattcaatgccagaagaaaaaaatttaaaacctagggctgaagaggagaagaggtagcaagaagggaaaggatggggcatgagagaactgaacaacccatttataaaatgacacagtggtgttctgaacactgagtctgatgagagtgccatatattatccaagttcatatggaggatctggaagcatttaccatggaaaaatggcatagctctataagagagaaaaaaaggtattatcagggtacattctatgatcatagtgtaattaacttagaaatgaataacaaaaaactaatgtgcaatttccatatatttataagttcaatgcaacatactgcctagagaaaaaaaattagtgaaaatttaaatgcaaagaacccatcaattcaataccaaatggtcaccctaaaagcatacacacacaagtaacatcgtgcagacatgctgcttttgggaatatatatgtatataaatataagtatatacttgtaaccgcatataataaaaatgaggccatgaatttgaaagaggacaggtatataggagggttttgagagaggaaagagaagggagaaattatgccttaaattaaaaagcaaatattgaaaaattaaatataatttccattaaatcataatggaccaacaacagaacacatctatctatgtatctatctatgtatctatgtatttatctacctatctatctgaaaagcaaaaactacatgaatttagtgaaatacaaaataaacatctaatttttagatgtactaaaagtcaaagttattattttgaaaatccaacagaaatgaccaagaatatgggagaaagaacaagactcttaagttactgttcttatagctttagaatatctgatctgaagtgttccaaacttccaagttctacaactgcaaatgtggccctacacatggaaaattacatatttgcccttacactcaaaatgtaggatcactgaaaatgttatataaaggtatcttagctattatataaggcacatattgaatataaataatattttgtttagacttgagccttatccataacatcttattagatatgttcagaaatccccaaatctaaaatattttttaaaaaaatgtaggtaaggaaatctttacttgtagtgggtggtcaggaaagcacaataggtcttcggtctgtatcatgaatagtttatctcaatgagttaacaggagagattaccatgacgcaaggaatacatatctgtaaccttctttgtgtttaaaaactgagttctgagttgaagaccactgttgggagcctcctgtggcatgtttatatactgtgcataattgtcagctctccattgggaataggacatgtgcagaggacagtgtgatggcattatgacggttgatgatggtctcactgcagtgtgcccttggctggaggtgtttctccttgatgtagctctttctaattcttgcctagaagatcaaaacttgtaatggggaactaaaaggaaaagggggggcggtgtctctgctaccaagcattaatgtttggttccagtgtgataactgacctcaactacacatgctatccccattttcatgctagttggcatttgcttttttgttgttgttatttatttgttgggatttccaggttatattaaaggctgagggtaggcaaccttgaggaagacacctaagaaaaaactaggttttaaatttcttttcttttagcacagccatcttccctgacttttagaagcatctagagtggtggaggacatatagagtggcatagcacttgcttagcatatttaaacctgaggtttgagttaaagtactgcaaaactccaaacgctgtattggctattaggggttgcttttgatctcccatgctctgtggtcatgactcttttctctatttctgactttctgggcttatgccttaaaacaggcagagtcctgaatctctgctctttcgggggttatggggaggacatcaaagaggcaagtgaaatatggtcatttagtctagtgaatttacgctaaaaacttcaagttagttcaatttatttatttatttatttatagcagaaatgacaaataaaatgtctaaattcaagatcaaataaataaataaatgttaatttgaaaattaaactttattggtaacaaaaaatgttatctctctctctctctctctctctctctgactgattcttttcagttcttgttaagtttactaaggcaagaatttgaagaggctctgggcttcagcatccacacaaggggttattcaaagcataacaagggcaactggactcaggttgaatttcagactgctttgagttcctagagtacttcatgatatgctttctaattttatatctgtcactgtggctttaagaagctaggctagaagacctacactaacttgactttaataagcaggtaagttgaatgaaaagtagactgtgatccagtagctactaaatagcaatgtattggttaagattttccactaaaatttggctagagaaaccattactatttttctaaggaaggtttgaaaagctctatgccttcctcacaaattcaaacaaaccttccttttgttaacaaagacaatgtttaccgtctctcatgttttctgttgtgttccagggacttgtcgtgatgtctacagagctggaggaagtggtgagcagcatcctgaatgtcaaaatcccagcaatgtggatgggtaaatcctaccccagcctgaagccacttggcagctatgtgaatgacttccttgagagactaaaattcctgcaggtgattttattcatatgcatactgctgcctaaattaacttcctctggcttcactttcctcatcagaatgctgagtgagcagggaatggcactacacagtcctgtgtattcaaggcgcaaatggcctctattcaataacatcagatagatagatagatagatagatagatagatagatagatagatagatagatagatagatacctgtggcgacatgaagtgggttcctgagtgggaggccagagctgtaaaggagggaaccgtgagagaagaagcgagaccaagtcagatttctgatcaaggcccaatgtttactagcagtctgtacaaaggggtaaagcccatcttctgccatgccaggcttcttgatgcttttttgctaagttgttagcactagtctgtcagagctgttagcattaggtagccaattccacaggttgtcagctatctcagaaatatctcaggaagacaagttcagcctctcagcctctctagcagagtcttggagcagagcagagtcttggagcagagcagcagcaggtgacagaacaatagaaccatctaggtggaaggctctaccccagatggtctcattcacagtagcagaaaggtctgaatcagcctgctcaaggctgggggagaagatacacacacacacacacacacacacacacacacacacacaccatgcatatgcacacacatatatacatatatttatatatatgaattatatatagagactggacatattctatattctgcatcttaagtaggaaattttgtgaagtttgacattcaagtaaatgacagtctttggagagagaaacttctagcatgttgactctcaatagcattaagtagaacccagtagcagagcatcttagaaagccagacaagcttctaaagagaggaactctttcttcactgcccagaaaccttctagctctgccatcctagtccaaaacagccatgacctacctcaatggttattttcttgggtatgttgagtgggtagaatcctcgctcctggtcatctgccaattgacacttcactgtacagaaaaagcaattaattatatagatactgtgtatatgacatgaacctatggggaagtctgacatggtggctcacatgtgaaacttaccacctgaggcaggaagatcaccctcaagttaaagaccaacctatgttactatctggggtctacaatgaatttcaggccatgtataatctttaaacaaacaaaacaaaaacattgagcaatttcctacaggcataagatgagccactcccctttcatagtacagtccctctgatgtaccaccagagtcagatactaaaggaccaggatgactcttggaaagtaaggttgaactgtgagctcttcttgaataaaggattttaattcatttcttcagaaaggcttctataatttgctattcagtcacttgttattcaacagctcatcatcaaaacctatgaaataaatatagaattaaagggtcattaaatttctaaatgccataaacattcaccaccctgcttttttgtgttcttgatagtatggcacttctgtaatagtatgttggattccatggtattttagtaaagtaggaagaaaaacttccaagaaaatattctacttggtagtaatggctaattagaaaaaaatggtgtgattattaccatgtgaccagactttgtggagatctattcatcaatataacatgacatgctttcaaacaatgagtttgtagtatgttcacagtgataagtaggatttctggagaaaccactggatgagtataaaacagatatctatttttcatgtatttcatgcattgtaatttccaagctagtgtaacagagataatgttgagtcagaagcaaatactattttcaaacttgttatgtgccttgatgttctttgaatcccatttgctagcttttaaaagtaataatcatgtttggagatacatttcattgatattgcattggaaacttttaactattgctatatcatttttgtctggatccactatagcaatggtatgaggttggtccccctccagtcttctggctttctggcttcttcttcacacaagccttcctgactggtgcgcagcagaactatgcgagaaaattcacaattccaattgatcttcttgggtttgactatgaagtgatggatgacaaggaatataaaaaggctccagaggatggtaagtgcagcagcagagtgggctgggtcctgtctgttcactggacaaaagctgagcacttttgcttatcttcttagctgtcaaaaagcaatcatgtacataataccctgaaacacagcatgaagcaaatagagaacaacatgcatagatgcatttggataaaaggtacacttctctgaacctccaaaactgagtaaattagaaatcatgtgtccttagttaaaagaattatcatatgtcaaattagtagtacacaggctaatcatctatgaccttgggcaaccaagaggaaagaatctccctaaagaccataccttttcaaatccttgatatctgtatcctgtactgttatatattttactctgatacttacagctattaataatgtatatgtgaaagggagaaacagggaaacacagagagagagagagagacagacagacagagacagacagagacagacagagacagacagagacagagagagagacagagagacagacagagacagagagacagagagaggagggtatatgagattgtggtataagcacatatctgtgtgaaaatacatctgaaggccagaggatgatggatgtcctattttcattctctaccttatttctttgagacaggttctctcactgaacctccagtgaactctagggatctgtttgcctccacccaccacagtgctaaagttattgggtgtgcacaggaaccatgcccagctttttcatggatgctggtatctgaacataagtctaggcttaagcagcagtcactcttgcctgcaaaatgaggccctagaaatgcttgaagattaggcgggtggttataaagaaacattctgatttctgattggttgtgttttgaatactttgtggcatctgcgatgttttagtttaaatttagtgggagccagcaagatgactccttgagaaaggagactttctgccaagcctgagaacttaacttctattcccaggatcctcatggtggaaaaagagaactgaatccccacaagctctcctctgacctacacacgtgtctcagcatgcacccacgtgctcatgtacatagggaaaataaaatgcaataaacattaacaaaggcagcgtaaataaactgtagatgcagtagacaaggttactactttaaataaacattacttttctttttttttaaagcaataaagctaaaatgtactaaaccttaccagaagagtgatgactttgaatgaatggcatctgtctttcggtgactgttaatatatgccatgtcacaggcagctctccttccttagttatcactggcccaccctggtaggcattgaagacaatgaagcaacatcttaggctcttgcttcctccaccagtttatgcccaagtgagagacacaacagagtctgatcattgccttaccttattgtggatgctatcaactgggtgtctttctaccttgcatcctcagcaccccatagaagcctttctcatcagagttactgacagtttccctgttgatggatctcctctggccttcatcttaacttcttggcaatttctcctgatgtgtttatcttcctagacacagtttcctccctttgtcttgaagacgttatctcctggttttggttgtttttatatttccttattgtccatatttatgcttcttgctggcttattcttcagctattggagtctccaaggataaagtccttgaacaatttctgttactgtattcatcctctccctaggtgaactcatccatttttatatctttgaagacctccttgttagatgctttctctgtgacccagaaggctgtatccagaactgccaacatgctatctctacgttagtatctctagatagaacttataatttatttcagtaaataaccagcagctgccagccagaatcctatgactttttcctcctcctcctctgtcaccaccacgatttgtcaggcctctgtgccgagccagtttgttatcttgccttcctgctctcatccagtcttcttatgaagttggcaatattagtccactcaacagtgagtcacattgtcttagtcagggtttctattcctgcacaagcatcatgaccaagaagcaagttggggaggaaagggcttattcagcttacacttccacactgctgttcatcaccaaaggaagtcaggactggaactcaagcagatcagaaagcaggagctgatgcagatgccatggagggatgttctttactggcttgcctcccctggcttgctcagcctgctctcttatagaacccaagactaccagcccagggatggcaacacccacaaggggcctttcccccttgatcactaattgagaaaatgccttacagttggagctcatggaggcatttcctcaactgaaactcctttctctgtgaaaacgccagctgttttcacaagttgacacaaaattagccagtacaattgaccccttgtcaacttgacacacaaacacatcactagtaagcctcaacccttacattcttattcatccccaaggtctaaataactttaaacatcccacagtctttacatattcttaaaatttcaatctctttaaaatataaatctcttaaaaatccaaagtctttttacaattaaaagtttcttaactgtgggctccactaaactagtttcttccttcaagaaggaaaatatcagagcacagtcacaatcaaaagcaaaaatcaatctccaaccatccaatgtctgggatccaactcacgatcttctgggctcctccaagggcttgggtcacttctccagccatgccctttgtagcacacacatcgtcctctaggctccagatgcctgtattccactgctgctgctgctcttggtggtcatctcatggtactggcatctccaaaacactgcatgaccccttcagtcctgggccatcaattgcaactgaggctggactttcaccaatggccttccatggcctctcacagtgccaagcctcagctgctctgcatgaccccttcatgccttcaaaaccagtaccacctgggtgacccttacacattaccaagtcctgctgcagcaggagtacaaccttggctatctctggaacacagcctctttgtgctttcagaaaacacttcccagaagatgtctcctcaatgatgctggtctcttcttaatcaccgctaatttcttagctccagctaaccagcatcaatagtcccagtaatgcaaagttttttgctttagtagttctggtatcttgttaatcacagctgattcttcagccccagctaaccagaactacagaatcttcacaatcaaaacagcaatggctctgaaaagagtctttaattttccctctgaaatttcacaaaccagacctccatcttctgaagtgttctcaacattatcttccaagctcctacacaacatccaacagagctcttaacaacggatggatcttcaagcccaaagttccaaagtccttccacagtcctccccaaaatatggtcaggttgtcacaggaataccccactatgctggtaccaatttgtcttagtcagggtttctattcctgcacaaacatcatgaccaagaagcaagttggggaggaaagggcttattcagcttacacttccacactgctgttcatcaccaaaggaagtcaggactgaaactcaagcaggtcagaaagcaggagctgatacagatgccatggagggatgttctttactggcttgcctcccctggcttgctcagcctgctctcttatagaacccaagactaccagcccagggatggcaacacccacaaggggcctttcccccttgatcactaattgagaaaatgccttacagttggagctcaaggaggcatttcctcaactgaaactcctttctctgtgataacgccagctgtgtcaagttgacacaaaattagccagtacacacgtattttctttggttgtctcttttctgtgacaatacagatgcaaaactgtccatcttacctgacttcatccttcctttctcagtctctaagcagtacctggacctcaactgttgtagtggaagtacaccacagaactgaaactcactacaggtttatggaagttagcccaagatttcacaccacctttattcctatacttaactgcagaaacatatttagggacaataagcacacaggaaggcagagactctgggacacatgccatgttaccactaattgtactttctccaacagaagatgcctaaggcatcattctctgaccatttactcagagtccctgttatcaatgcatttggaatgtgcacactgctgagactcaagcttaacaaccctcagctaccttgtttattattccttttattatgtacacctataaaatcccttcttcacataggttgctatgcacaactgtttccttcccagcctaccatgctcaagacttcatgaaggagtttgaaaacaatgcattctcatgaaaggtgtcttgatgaaactatggttacttccgtattcaggactttatccctcctaacttttctcagtgtccttctgacataggaaaaaattggcattcctgttgacatctgacatctgagtggaagtgatgacactatacaatttttggacccagctaaaatgtttaagttatgaaaacattgcataaagtttttaaagtggttaattacccatactcaacctgtggaattgcatgcactgagcctagagattatacagacttctttgttttccttttaaccagtctgcatctacctgttacctcaggaagcaggttttcaggcactaaaactccagcattatcttgagagtggtgaagtagcacatgaaacaggatttattgaatgattagtatagatgacttggtataccaaaattgctcagtaatgagcttagctgagtggccttcagctaagcaaaccactttactaaatatcagtgtgtctacccggagtaatatcattgaggacagatgtttgttaaattattaattttattttatatgcacacaaacatacttgtacatttttttttgccagaagaaaaatgtatgcttactccatcttacttcatcaattacttgaacaaaaatgagaatccatagaatgatctggaaagttaggattttcctaaaggaattcctttctcaatgggacccctggagtgggggagggggggtcacagacaccatctgagtttcccccaacccctgcctttctccttttatatactttaatgtgtgtctgcttccagttctctggccttacaagtcaagcttgccctgtttactaagagtgaagtggtgtccagtgtgttgaatgacatgaaacactagtacttaggaagctgagacaggggtattgagagcttacagcctgtctgggtcccttgaaaccttatctccacagataaggaagtaaattgataactaaatgtcacagggaattgaggaagccactgacagtttatttacggtttagtgttggtgattccaggcgtattacccacagttcttattatctgaattgctagttacatctaggaggagtcagtaatttattgtacggactgtggaaggggaggtagagaggaagagaacctgagaagctctccccagacaggaatctcagatgcagggctcagtcacctatcatttttgagtgctaacttctttctttgttatttaggtgtttacattcatggattgtttttggatggagcttcctgggacaggaagaccaagaaacttgcagaatcacatcctaaagttctgtatgacacagtccccgtggttagtatttactaagggttacatgcacgtgtgtgcggatatggatatatgcacatccagtctgttcttgttgttcatggtaactttgctctataaagctgttcccaatgctgcactactagatatatttgctcttaatgggcttctgaatttagtttctatggtatctgcatttctgttagttgattgatacataccgttgtactgtttctgtttaaagaaaacttgtttagtatacattatctcgcagtcagtagcactgtgactctcactgaattaagctcatcccttggccttcttgcacataggaacactggactggactgcagcttttggcctgtaagttatgttaaacaatggaatgccaacaaagcaaggaatgttaacaactgagcacaaaatagaccatgaaaagtacagttgtttatagttataagagctgaaaataagaaatcaggataacccatggtccagctatagacatgtggttgtgagataaagacaactcaaattccatgttagttaatgactgtaaacacagtgtcagggttgattataggatgaggggtgaattttgatttttcatgaaataaagaattaatgagcggtgaggagcaatgtcatataattgtttctgtgtgtaactacatcataacaaaatatatttttatataatccggagggcacatccaggatggtatgataaaacaaagactattagagtcacatgaattatagaattctgtgagaagcttaaagacaggtgaaaactcatcatagcagccataaagggagagtctagtcgaaacctagaaagatcctcttttctacataccatgatgctctgggcagagaagggttaggataggagaccccaaaattgaaacaaacatttgccatttcaggagctggctgggttacaattcgtttcctttctgaggacatcctcaattagcttgcagggaacagaaggcgggagtacatctacaaagggataatttttcttcaacaaagaagtcagtgaggaatagaaattcttatgagtgaaatccattctttgcttaaagtgaagtgcattgttcatttaagtttaagttgaaagtgtttttgagagttatgttgctgttaagctacagcatgtccatcccccacaacaagggtcctacagtgacctgggaggaatggatacccctgggtcttagtcactgactccttcatgtggttgtatttgacctaagaaccctaaaggtctactcattactatgagataaattaatttggtcaaaccctaaaagattcttgttgttttagtttgctctttgccttcataagtcaaaggccagctgacttttaaatcttgttctaaagactggccatattctacaataaattacatgggtaatattctggaaacttgcttaaatgactaaaaataatgtggtgtagtgtagctaaaagaggaatggaactatgttatatttttatcaaagttggaaaactatgtgttacacaaccactttaataacttggctggcggaaaattgtaattaatagcacacatcatgcagacattaggattcactgtgatatgtccatacatttatacattgtgctttgatgtgtccatgtgcttctcttctactctggttccctttcccagtggcactctctctgatctctactcaactcttctactgtctgtctttcagtttcctttctgtttcttaagcttctgcatatgatagagtatacaccagtttctctctctttctctctctctctctgtgtgtctctgtctgtctgtctctctccatctggatgatttcatttaacttgatattctctggttccagcaaatagtttgatgtgaatgattttagtttgtttgttttttgtttgtttttttgtttttggttggttggttggctggttggtttttcaagacagggtttctctgtgtagtcctggctgtcctggaactcactctgtagaccaggctggcctcgaactcagaaattctcctgcctctgcctcccaagtgctgggattaaaggtgtgtgccaccactgatggctttgattttgttatttttatgacatctgtattatatgtatgtatgtatgtatgtatgtatgtacatacatatatgtatgcatgtctatcaattatctatcaacatactgttgcaacaaacttaggtattcaattttttttcatgttgacatcatttactttggatatatacctaagagtagtggactagctggatcatatggtagccctattttacttcttttgtgaaacctctactattttatagagactgcactaacttatgttaagaaaatggtctttctgaagaagctgtctttctttgagatatagtttgatgctttggtcaggttagttggcagcacaggaatgggtacctctatgggttttccattctgttttcatgcgctgtgccatccgtatgtaaacaccatgatgctttccttagcgtgcttttggagcattattcccaaatgggaattgggagactttagacttgctgcttttgcttcaggtttcattggctattctgggtcatctgggttcccacagtaataggatgtttctagttccatgaagaattaacagcagtatatcagtgaactttatgtttgattgacagatcccatttcagaaaataaaatgaaattgtaattgagattccagacattaacctcaggcataaacacatgtgcagacacatgtgtccctgtagatacatgtgtgcccacacacatgtgaacaagtattggacaaaatatatagcacacatgagaagaacagggaagaaagcactccctaacaatatacaaaagtgaagaaaaattttaagttagaattcctgatcacttgggctcaggtacttgagacagcaataaatggctcagggagagtctttcttttcagtggtgtagccactgataagttgcccccttttcattaagtgatttactactcatgctcatataagcaaccacaaactcagtgggtggaaaagtatgagcatataggaggaggggctggttggaaagaaaggcttcaacagaggaaagtgcagagagatgagaatgggcactggaggggagtggaggggcataaataccaaactcagtatacaatgtattaaatcatcaaggactttaaaaatagaaaagaaacataaagaggaaatgaaagaacaaagaccaaggtgtaattaaaagctaaggggaacaggggtaaggcaaagaaataattgattgttgtgcactaaattagatgggagcaaaaaagttgtgtagtaacactacacagatacacatcgagtggcctttcatatttctagagtgtttaggtgcaatgtactgtaagtaaagaatccatttacctgccatgtggattaactttgatcattctgtgtatatgcatcatttggatgacaagttcattggtggacatgcagtactgacatcccctgctattgttatattggagcccattctccatttcgtctagtagcattgtttcataaaattaataactgatatcacatgcataagtatttataaacaatatatcttcttgatgaattgattccttgattgatatgcagtgatctttgtctcttcttattttcttagtcttaaagtctactttgttatatgtaactactcattcttggggttggattccatttgtttgggatatcatgttccaccctttcattccagtctgtgtgtctctgtggttgagctgagtttcttgtgggcagcatactttgggtctgttttttaattcatctaaaaatttgtatcaattaactgaagaattaagggcatgctcattccaagttatgaaaggtatagtatgcctgtcatggtttctgttttcttctgtttaaagcattgattagttcgtgttgcctaatttatatttatctctgtggtttgattgtatcgatacctttgttgttttagctttcttgctgtatacctactctttctgtggaacttatactttatgtgctcatgatgatagtttctgtttgtttacttctggatatggagttctcgtaaaagcatctttagtaaggttggttttgtggtcataaatggaatttattttttatttatcttggaagatcttaattcttgtttagtgctctagtggtagtgggaccagggagaatggagctaataaattaggtggactaaaatcttatgcaacaggcaactttattcagagcatcagacaatttatactctgaggcttaagaagaataatactagtaaagtttacaatcacaagggcaagctccacatggcaaaaacatgtttacccgtagaggcatataaacaaataacaattcttgtcttattttcttggtgtttttttcacaagcactcttcttacaggactccatccttggactgtgttctgataattctataggacagctttgctggatataggtagcttgagtagcagtcattttttttccaaactcaaatatgttatcccatgtcctggtctgtagggtttctgctgagaacttgtaggtatctaccagggctgcccttcagtgtgatttggtgctttccctcttgaaagttttaaaactatctctggacgatgagacggcttcatgggtaagctgtgatagcaagaaaacccaagtttacatatgattacctatgaaaagccacaggcacagcacacacctgcaaccatgttaggagatggagacagacagatcctggagcttgctggccagccatcactgagcttcaaggtcaaatgacagactttgtttcaaaagccagggtagaacatgataaaggaagatgtctcacatccttttgacacctctgggcatgcatagatgagtacatgaagtgtataacacatgtcctgcccacatacatactttgtactgtacttttgtgtgttgactgtaatgtgtagtatgcaatgtctgaatctaagacctcccatctctacacacatctgctcttattctatggaacagatttttctctgtccatagaaaaagtcttttttttttccttcaagtatgtcaattatgcagacatttgatcttttactagtgctacaaagagctgtagtcttttcattctgccatgatttctctcttttttttcttctgtttttccctcttccctttctcccactcactctgggaccctgctcactctggcacataggatttttttatttgtttctcattacagatggatgtgagccaccatgtggttgctgggatttgaactcatgacctccagaaaaacagtcagtgctcttaacagatgagccatctcaccagcccaaaaatcaatattcttagtataactgcttaagctagtctgatttggagacttgcacctacattttctttgactttcaagagagactcttactgtgtagcccaggctggccttgaactcacagcaatctttctttctgtgtttgataagttcctcattcatatctgtattgtcttcctaattgtgtgtgtgtgtgtgtgtgtgtgtgtgtgtgtgtgtgtgtgtgtgtgtattcttgaatttcatttgttactaagattttctttgtgtgatatagggtttcatacagctcaagctgaacttgaactccatgctgagggtgatcttgaattcctgagtctcctacctccatcatccaaatgttagagttacaggtctattgctaccaagcctggctttgtgtggtattgaggattgaacccagggctttatgcatgctaagaaaacactgtaccaactctcctaaaccccacccctaaccccagacatatcactaagcttttcaacaaccattcttttgaatctatcaggtatttcatcaaccccagtatctttagaatctgtcactagggagttattttttaggagattattattttaaaatatttgaaatttcttgtgtatatgttgaactctgtgtatgtagtgaagtggattgtctcttatatgggatagacttcttagaatatgactttcttttaaagatgtgtatcagggtgttagttcactatgctatgctgaattcactttccactgtgtattgcagttcaatgttacagtatccttgtagcttcaatgactgtagttattaagttttggcagagcacgtactttcaagagagtcagaccttctgtctatggtttacccatgagagggacactaacagtttggcattaatgcagtaagtagcagagtgatagagtgctccctatatggttcctctggtaatgagaatactggttttcatccagtggtggggcttctcagatactgttgatactggctgttatttgaatgagctctagttttggctgcttcaacaacagtgaagggtctaagcactcttttgattagacactcttcaagtacagttgcttcacagggagtgaaaggagtcagaattcctcctcccccctgtagtagtcacctttccttgtgagcagtgtgtgaccaggtaagtgtgaggcaactgatgcaggggcccaagacaggtgcagtggggtagtttattttttgctactagtttgggtatgtctactcagtagctatctctcagtaggtccctgcctgtgcattcctggggacagatgaaatatttctgtggctcctggagcttttcttccagattgttctagcaacagtaatatgtaatactattatgtatatatgtaatagataaaatgtgtgatggcaatagcagcaataattgagtgtcagtaggtcatggccaaggtcaggcaaaacccctctcccagggttctccccagaaggacagcagggatatgtgtctgatagttcttagctatacttttggctatgtacactgagggctgctgtaggtacattattctttccatttcatttgaactgtcattgtagctctgacttgtttcttgagacttgccaggacaatgcctctgggacaaggctacagccaaaggggtattgtttggcagacacaatataggctggaggcggaggaatatttcttacccttgctttgaggtatcatgtgacatcggggatcctatcacaggcaggctcctttatatcctggttcttgtggagggcacctttggttccctctacattgcacctgttcatcaccatatagtagtaatctcagcctgttgagcacatcttctgctaagccaggatggtagagaatggctgcaagatttgagatgagactgtgtgaagatgtttgacccttagaacaatccagtcagtcaggcctcttcttagggtgactactgactatagtaccttagagatctgctagaggggtgaagccaacctatatggactgaattcaggcaggccttacctcttaggctgtacacttggaagtactgggtaacttcacagtgtatgtacagaacatttgctggaagttagcccctcccagagctatgaaactgggtggcaggtgggcagcttctcttgccttgctgccgtcccaggtctgtattctacaatggttttgtatcctaataactgaattctaatgtttcccaaagccattcaactctacagacttggtttagttcttgtagaggagcaggtaaattgctaggtgcctctattgaacccccttgcctggctcacagctgttaaacacagcacttatacatactatccatccacaatggggaggtgattcaagtaaaataacttgccagaatgtattggttttaaataaataaatgattccgagtataaatagtagcatctctcttttgaaaatatatagaattttgttttgttactaaaagcaccagaaattacccccagggaagaggtgatgaacagttgggtaatatgtttttaaacaattagtctttattttggcacaatacagtattttataagttaactgttcactgtaaaaacattttgcatacaacctgttaagaaaccactactaagtatgagttataattaagttcactaagaatactttctttgtagaaaaagagtaaaaatcgtaacatttccaaggctagtccaattagaccaaataatatcgaatgcatacatgagtgggcagtatgtttctaacagagacaaactgttttctctttgtatactggttctgagatagttaggcatctttatattcaaacaatcatttatttcactgacaaaaaatacaatctatgtagggcataggttttagacataaccttactctggaactatcacggtagctaaagtacatgatggttaatggctctgacttagcggtgtttgtgctttcttccagatgtggctaaagccatgcaaaaagtcagacatacccagacgaccaagttacgttgctccactgtataagacaagcgagaggaggggcacactctccaccactggccactccacaaatttcgtgattgccatgattcttccctctgtccaccccaaggaacactggattggacggggtgtggcactgctgtgtcaactaaactcataatctgaaggtggcatcatctcttgcaacttcttgttagactgaataaaacacattttaccgtttaaattttgctttggcttaaataaacttaatgttcttaattatgactttattctggcctctttaaagtaccaatgaagattcagtgttctgagacaatgaaaacacaccacacactttctgaataactttattttgggagagttccgtaagcattaggaacatatataaaatgacacaccactgttgacaatgaaaaaacagcatttcatcacttccagctttataaattaaaaaaaaaaatgattcagtcacaacaacaaaaatgtttagatattttaacaagtatcatcttgcaggaccataatcacattgaagccactgacttactgttaatggaaaaggttcacactgcatctagttactatagtatttctaagcacaatcacaactgattgaatgcaatgtggtatacagcaaaatccttatagatgtcaaatggtgacagtacaagtaacattggtgacctccaacaagcatgttaaaattaggctagtcaagctaagtggaatgttggagccaaacagaaatgtagtggaattaggattgtctagtgaaacctaaaactatacactagaatgatgtaaaaactaaatactggtggaacactatcaaaatactagcagcaactgttaaagccccacccccaaaatgactaagaaaatctagcaaataaagataataccatttgtttgagaatat

SEQ ID NO: 111 - DNA, 7641 bp, Mus Musculus
gctagcaaagaatattctcttgaaaaggccatggataagatgatgactgaatgggactccatggagtttgtcattcttccctacagagaaagtgggacatacattttgtcctcagttgatgacattcagatgttgttggatgaccacattatcaaaacacaaactatgcgaggatctcctttcatcaagccttatgaaaagcagatgagggaatgggagggcaagctgctgctgctacaggagatcctggatgagtggctcaaggtacaagccacctggctctatctggagcccattttcagctctcgggacattatgtctcaaatgccagaagaaggcagacgattcacagctgtggataaaacctggagggatgtgatgaaaacggttgtacaagtagtcctggcagtcgtgactatcgagcggatgctggagaggctgaaaaagtccaacgaactcttggagctcattcttaaagggctgaacgagtacttggaaaagaagcgcctcttcttccccaggttcttcttcctgtccaacgatgagctcctcgagatcctgtctgagaccaaggatttagaaacaaagatgatcaatgctggtttgcgatatggctatgaatatctgggaaattcccctagactagtcataaccccactcacagaccgctgttacaggaccttatttggagcccttcatctgcaccttggaggagcacctgagggcccagctggcaccggaaagacagaaacaaccaaggatttagcaaaagcggttgccaaacagtgtgtcgttttcaactgctccgatgggctggattatttggccttaggaaaattctttaagggactgttatcctgtggagcctgggcttgctttgatgagtttaacagaattgatttggaagtactttctgtggttgctcaacaaatccttaccatccagagaggcattaatgcaggtaccgatctcctagtgtttgaaggaacagaactaaaacttgaccccacatgcgctgtcttcataacaatgaaccctgggtatgctgggcggtcagagctgccagacaatctgaaggctctgttccggacagtggccatgatggtgcctgactatgccatgattgccgagatcgtgctgtactcttgtggctttgtcactgcgcggccgctgtccataaagattgtggcgacataccgcttgtgctcagagcaactgtcctcccagcatcactatgactacgggatgcgagctgtgaagtctgtgctcacagctgctggcaatctgaaggtagaactgagagctgtgactcacttcatttctattcttaaatctcaggagcaactgaaatatccaaacgaaaatgaagaaattttgctacttagatctattattgatgtaaatctgccgaagtttttatcccatgatttgccactctttgagggaattacctcagatttgtttcctggggtgaaattaccaaagccagattacaatgatctgctggccgccatcagagacaactgccacagcatgaatttgcaaatgaccgacttcttctctgagaagatccttcagatctatgagatgatgattgtgcgtcacggtttcatgattgttggagagccatttggagggaagaccagtgcatatcgtgttctagctggagcattaaatgacatttaaaacaaggttcaaataactgttttaaatcccaagtctgtcaccatgggccagctttatgggcagtttgacttggtttcccatgagtggtctgatggggtcctggctgttagctttagagcgttcgcagcttcctcggtaagagtctgtcttcttacatacaggaagtggttaatctttgatgggccagttgatgccgtgtggattgagaacatgaacactgtgctggatgacaacaagaagctgtgtctgatgagtggggagattattcaaatgtcaccacaaatgaacctgatttttgaaccgatggatctggaagtcgcctctccagccactgtaggaagatgggataaatggataaaggatttggcagatactcctccaattcccaaagatgtacagtttaatgagatcattgtgccaactctagatacgatccgttactctgctctaatgaatttactgaccactcatcaaaagccttcaatatttgtaggaccaacaggaactggaaagagtgttatagtctttgtagatgatgtgaatatgcctgcccgcgaggtctatggggctcagcctcccattgaattacttagacagtggttagatcattggaattggtacgacctcaaagattgctctgtgattaaactagtggacatccagatcatgtgcgctatgggccctccaggtggtggccgaaatccaataacccctcgttacatgagacatttcaatattgtaaccatcaatctcgtcttgttccgatttgccatagaacacataagcagaatttctcgaatcttgaagcagccacggagccacgcccttctggtgggggtgggcgggagcggaaggcagtcagtcaccagacttgctgcgcacatggctgattattcacttttccaggtggaaatctccaagggctatggtagccatgagtggcatgaagatctgaaagtgatcttaagaaaatgcgcagagagtgacatgcagggtgtcttcctgttcacagatacacaaataaaaagagagtcgtttctagaagatgtcaacaatctcctaaacgccggggaggttccaaacctctttgctttagatgagaagcaagaaatatgtgaaaagatgcgtcagatagatcgccagcgggataaaagcaaacagacagatgggagccccatagctcttttcaacatgtttattgactgctgccgcaaccagctgcatgtggtcctggccatgagtcccattggagacgcatttcggattcgtcttcggaaattccctgctcttgttaactgctgtaccattgactggtttcagtcatggccagaagatgctctggaagcggttgcttctcggttcctggaagacattgagatgtcagaggaaatccgagaaggctgtattgacatgtgtaaaaggttccacacttctactatcaacttatcaacatccttccacaatgaacttcaaagatataattacgtgactcccacctcctacctggaattgatctctaccttcaaactgttgttagaaaagaaaagaaatgaagtgatgaaaatgaaaaggagatacgaggtgggtttggataagctggactcggcatcatcccaggtggcaaccatgcagagtgagctggaggcgctgcatccgcagttaaaagttgccagtagagaggttgacgaaatgatgataataattgagagagagtcaatggaggtggccaaaactgagaaaatcgtgaaagctgatgaaacagtagcgaacgatcaagccatggcagccaaagccatcaaagatgaatgcgatgccgacttggctggagccctacccatcctggagtctgcactggctgcccttgataccctgaccgcgcaggatatcactgttgtgaagtccatgaagagtccccctgctggcgtcaaacttgtcatggaggctgtttgcatattgaaagggatcaaagctgacaaaatccctgacccaacaggttcagggaagaaaactgaggatttctggggccctgctaagagacttctcggtgacataaggtttctgcagtcacttcatgagtacgacaaggacaatattcctcctgcttatatgaatatcataaggaagagttatatccccaacccagactttgttccagagaagatccggaatgcttcaacagctgctgagggtctgtgtaagtgggtcatcgcaatggactcctatgacaaagtggcaaaaattgtagctcccaaaaagataaagctggctgcagccgaagggaagctgaaggttgctatggaaggccttagaaagaagcaagctgccctgcatgaggttcaggacaagttggccaaactccaagacacacttgagttgaataagcagaagaaagcagacttggaacaccaggtagaacgcgcagagcagctgatcgggggcctgggaggtgagaaaacccgatggagcaactccgcgctggagcttgggcatctgtacatcaacctgacgggagatatcctcatctcctcaggggttgtcgcctacctgggagcctttacatctaactacagacagaatcaaaccaagcagtggtcacagtcatgtaaagaaagagacatcccctgctccgatgactactctcttatgggtacactgggagaagccgtgacgattcgagcttggaatatcgctgggttaccctctgactctttctccattgataatgggatcattataatgaatgcaagaaggtggcctctgatgatagaccctcaaggtcaggctaataagtggatcaagaacatggagaaaaccaatagccttcagctcatcaaactaagtgacccttcctatgtcaggactctggaaaactgtatccagtttggaactcctgtgttgctagaaaatgtgggagaagaactggacccaattctagagcctcttttgttgaagcagaccttcaagcagggtgggagcacatgcattcggcttggagactccacaattgagtattctcctgactttcgcttctacatcacgaccaagctgaggaacccgcactatctcccagagacgtcagtgaccttgttaaacttcatgataactcctgagggaatgcaggatcagcttttgggaatcgtagtggcacgggaaaggccagacctcgaagaagaaaagcaagccttgatactacaaggagctgacaataaaaggcagttaaaggaaatagaagacaagattttagaagttctctcattatcagaaggcaatatattagaagatgagactgcgattaaaatattatcttcctccaagtctttggctaatgagatttctcagaagcaggaagtggctgaggagacagagaaaaagattgacattacccgcatgggctatcggcccattgctatccattcttccatcctgttcttctccatcgctgatctagctaacatcgagcccatgtaccagtattctctgacctggtttattaacctgttctcaaaacttagctctctatctctgggccaaggccaagggcccattgctatgaagatgttagagaaagctgtcaaggatgggacctgggttgttcttcaaaactgtcaccttgccacttcttggatgccaactcttgagaaagagttaagcgcagaatcaacacaccctgatttccgaatctggctgacgagttacccatctccaaatttccccgtgtcagtcctgcagaatggagtaaaaatgaccaacgaagcaccaaaaggattgcgggctaatatcatccgatcatacctcatggaccccatctctgaccctgaattctttggcagctgcaaaaagcctgaggaattcaagaaactgctttatggcctctgtttctttcatgctttggtacaagagagacgaaaattcggaccccttgggtggaatattccttacgaattcaatgagacagatctaagaatcagtgtgcagcaactccacatgttcctggacgaacttccttacgatgctctccgctacatgactggggaatgtaattatggaggccgggtgacagacgactgggatcggcgcacactgcgcagcattctcaacaaattcttctgcacagaattagttgaaaatccacaatacaaatttgactctagtggcatctattttgttcctccctctggtgatcacaaaagctacatcgactacacaaagactctgccactgatcccagcaccagaagtctttgggatgaatgccaacgctgacatcactaaggaccagtcggagacgcagctgctgtttgataacattctccttacccagtctcattcatcaggttctggaacaaagtcatcagatgaagtagtaaatgaggttgctggagatatcctgggtaaacttccaaacaactttgatgtggaggctgccatgaggagatacccaacaacctacactcagagcatgaacactgtccttgtccaagagatgggacgtttcaataagttgctgataaccataagagaatcatgcattaatattcaaaaagcagtcaagggacttgtcgtgatgtctacagagctggaggaagtggtgagcagcatcctgaatgtcaaaatcccagcaatgtggatgggtaaatcctaccccagcctgaagccacttggcagctatgtgaatgacttccttgagagactaaaattcctgcagcaatggtatgaggttggtccccctccagtcttctggctttctggcttcttcttcacacaagccttcctgactggtgcgcagcagaactatgcgagaaaattcacaattccaattgatcttcttgggtttgactatgaagtgatggatgacaaggaatataaaaaggctccagaggatggtgtttacattcatggattgtttttggatggagcttcctgggacaggaagaccaagaaacttgcagaatcacatcctaaagttctgtatgacacagtccccgtgatgtggctaaagccatgcaaaaagtcagacatacccagacgaccaagttacgttgctccactgtataagacaagcgagaggaggggcacactctccaccactggccactccacaaatttcgtgattgccatgattcttccctctgtccaccccaaggaacactggattggacggggtgtggcactgctgtgtcaactaaactcataatctgaaggtggcatcatctcttgcaacttcttgttagactgaataaaacacattttaccgtttaaattttgctttggcttaaataaacttaatgttcttaattatgactttattctggcctctttaaagtaccaatgaagattcagtgttctgagacaatgaaaacacaccacacactttctgaataactttattttgggagagttccgtaagcattaggaacatatataaaatgacacaccactgttgacaatgaaaaaacagcatttcatcacttccagctttataaattaaaaaaaaaaatgattcagtcacaacaacaaaaatgtttagatattttaacaagtatcatcttgcaggaccataatcacattgaagccactgacttactgttaatggaaaaggttcacactgcatctagttactatagtatttctaagcacaatcacaactgattgaatgcaatgtggtatacagcaaaatccttatagatgtcaaatggtgacagtacaagtaacattggtgacctccaacaagcatgttaaaattaggctagtcaagctaagtggaatgttggagccaaacagaaatgtagtggaattaggattgtctagtgaaacctaaaactatacactagaatgatgtaaaaactaaatactggtggaacactatcaaaatactagcagcaactgttaaagccccacccccaaaatgactaagaaaatctagcaaataaagataataccatttgtttgagaatat

SEQ ID NO: 112 - protein, 1716 aa, Mus Musculus
MGQLYGQFDLVSHEWSDGVLAVSFRAFAASSVRVCLLTYRKWLIFDGPVDAVWIENMNTVLDDNKKLCLMSGEIIQMSPQMNLIFEPMDLEVASPATVGRWDKWIKDLADTPPIPKDVQFNEIIVPTLDTIRYSALMNLLTTHQKPSIFVGPTGTGKSVIVFVDDVNMPAREVYGAQPPIELLRQWLDHWNWYDLKDCSVIKLVDIQIMCAMGPPGGGRNPITPRYMRHFNIVTINLVLFRFAIEHISRISRILKQPRSHALLVGVGGSGRQSVTRLAAHMADYSLFQVEISKGYGSHEWHEDLKVILRKCAESDMQGVFLFTDTQIKRESFLEDVNNLLNAGEVPNLFALDEKQEICEKMRQIDRQRDKSKQTDGSPIALFNMFIDCCRNQLHVVLAMSPIGDAFRIRLRKFPALVNCCTIDWFQSWPEDALEAVASRFLEDIEMSEEIREGCIDMCKRFHTSTINLSTSFHNELQRYNYVTPTSYLELISTFKLLLEKKRNEVMKMKRRYEVGLDKLDSASSQVATMQSELEALHPQLKVASREVDEMMIIIERESMEVAKTEKIVKADETVANDQAMAAKAIKDECDADLAGALPILESALAALDTLTAQDITVVKSMKSPPAGVKLVMEAVCILKGIKADKIPDPTGSGKKTEDFWGPAKRLLGDIRFLQSLHEYDKDNIPPAYMNIIRKSYIPNPDFVPEKIRNASTAAEGLCKWVIAMDSYDKVAKIVAPKKIKLAAAEGKLKVAMEGLRKKQAALHEVQDKLAKLQDTLELNKQKKADLEHQVERAEQLIGGLGGEKTRWSNSALELGHLYINLTGDILISSGVVAYLGAFTSNYRQNQTKQWSQSCKERDIPCSDDYSLMGTLGEAVTIRAWNIAGLPSDSFSIDNGIIIMNARRWPLMIDPQGQANKWIKNMEKTNSLQLIKLSDPSYVRTLENCIQFGTPVLLENVGEELDPILEPLLLKQTFKQGGSTCIRLGDSTIEYSPDFRFYITTKLRNPHYLPETSVTLLNFMITPEGMQDQLLGIVVARERPDLEEEKQALILQGADNKRQLKEIEDKILEVLSLSEGNILEDETAIKILSSSKSLANEISQKQEVAEETEKKIDITRMGYRPIAIHSSILFFSIADLANIEPMYQYSLTWFINLFSKLSSLSLGQGQGPIAMKMLEKAVKDGTWVVLQNCHLATSWMPTLEKELSAESTHPDFRIWLTSYPSPNFPVSVLQNGVKMTNEAPKGLRANIIRSYLMDPISDPEFFGSCKKPEEFKKLLYGLCFFHALVQERRKFGPLGWNIPYEFNETDLRISVQQLHMFLDELPYDALRYMTGECNYGGRVTDDWDRRTLRSILNKFFCTELVENPQYKFDSSGIYFVPPSGDHKSYIDYTKTLPLIPAPEVFGMNANADITKDQSETQLLFDNILLTQSHSSGSGTKSSDEVVNEVAGDILGKLPNNFDVEAAMRRYPTTYTQSMNTVLVQEMGRFNKLLITIRESCINIQKAVKGLVVMSTELEEVVSSILNVKIPAMWMGKSYPSLKPLGSYVNDFLERLKFLQQWYEVGPPPVFWLSGFFFTQAFLTGAQQNYARKFTIPIDLLGFDYEVMDDKEYKKAPEDGVYIHGLFLDGASWDRKTKKLAESHPKVLYDTVPVMWLKPCKKSDIPRRPSYVAPLYKTSERRGTLSTTGHSTNFVIAMILPSVHPKEHWIGRGVALLCQLNS

SEQ ID NO: 113 - DNA, 8970 bp, Mus Musculus
tatcctcaacgtaaaaagatccaggacgctttgaacccttatctccatctctatgaaactgctgtggagtttagtaccaaacacagagggtggactgaaggaccataccacaaggtgaacccagatcaagtagaagcagatgttgggaattactggagagggctgtataagctagagaaggtcttccatgattctccaaatgcgctggcaatgaccaagaaagtgcactcaatggttgaggagttcaagcagtacatccctctcatccaagtattctgtaatcctggtctgcgccccaggcactgggaggccatgtctaccatcgttggctaccctctgcagccctcggatgactctacagtcttctctttcatagacatgaacctggagccatttttagacagatttggaagcatcagtgaagcagctagcaaagaatattctcttgaaaaggccatggataagatgatgactgaatgggactccatggagtttgtcattcttccctacagagaaagtgggacatacattttgtcctcagttgatgacattcagatgttgttggatgaccacattatcaaaacacaaactatgcgaggatctcctttcatcaagccttatgaaaagcagatgagggaatgggagggcaagctgctgctgctacaggagatcctggatgagtggctcaaggtacaagccacctggctctatctggagcccattttcagctctcgggacattatgtctcaaatgccagaagaaggcagacgattcacagctgtggataaaacctggagggatgtgatgaaaacggttgtacaagtagtcgtgactatcgagcggatgctggagaggctgaaaaagtccaacgaactcttggagctcattcttaaagggctgaacgagtacttggaaaagaagcgcctcttcttccccaggttcttcttcctgtccaacgatgagctcctcgagatcctgtctgagaccaaggatcccattagagatgcaattgttgcctataccaaaacttcacggattagttgggtaagagattggcctggacagactgttctctgtgtatctcaaaccttttggacggtagaagtccaaatcgctatacctgaggggcaccgggcccttgaaggctacttggcaaaatgcaaccatcaaattgatgatattgtcacattggttcgtggcaaattgtccaagcagaaccgtgttactctgggagcccttgtggtactggatgttcacgctagagatgtgcttgccagccttgtagataaaaagatcagtgatgactcggacttccagtggttaagtcagcttagatactactggcaagaaaataatttagaaacaaagatgatcaatgctggtttgcgatatggctatgaatatctgggaaattcccctagactagtcataaccccactcacagaccgctgttacaggaccttatttggagcccttcatctgcaccttggaggagcacctgagggcccagctggcaccggaaagacagaaacaaccaaggatttagcaaaagcggttgccaaacagtgtgtcgttttcaactgctccgatgggctggattatttggccttaggaaaattctttaagggactgttatcctgtggagcctgggcttgctttgatgagtttaacagaattgatttggaagtactttctgtggttgctcaacaaatccttaccatccagagaggcattaatgcaggtaccgatctcctagtgtttgaaggaacagaactaaaacttgaccccacatgcgctgtcttcataacaatgaaccctgggtatgctgggcggtcagagctgccagacaatctgaaggctctgttccggacagtggccatgatggtgcctgactatgccatgattgccgagatcgtgctgtactcttgtggctttgtcactgcgcggccgctgtccataaagattgtggcgacataccgcttgtgctcagagcaactgtcctcccagcatcactatgactacgggatgcgagctgtgaagtctgtgctcacagctgctggcaatctgaagctgaaatatccaaacgaaaatgaagaaattttgctacttagatctattattgatgtaaatctgccgaagtttttatcccatgatttgccactctttgagggaattacctcagatttgtttcctggggtgaaattaccaaagccagattacaatgatctgctggccgccatcagagacaactgccacagcatgaatttgcaaatgaccgacttcttctctgagaagatccttcagatctatgagatgatgattgtgcgtcacggtttcatgattgttggagagccatttggagggaagaccagtgcatatcgtgttctagctggagcattaaatgacatttgtgaaaagggactaatggaagaaaacaaggttcaaataactgttttaaatcccaagtctgtcaccatgggccagctttatgggcagtttgacttggtttcccatgagtggtctgatggggtcctggctgttagctttagagcgttcgcagcttcctcgactccagacaggaagtggttaatctttgatgggccagttgatgccgtgtggattgagaacatgaacactgtgctggatgacaacaagaagctgtgtctgatgagtggggagattattcaaatgtcaccacaaatgaacctgatttttgaaccgatggatctggaagtcgcctctccagccactgtttcccggtgtggcatgatctacatggagcctcacatgctaggctggagaccactgatggtgtcctggataaacacgttaccacagtcagtcagtatcattcagaaggaatttatagaaggcttgtttgatagaatggtccctctctctgttgaattcatcagaatagtctttgtagatgatgtgaatatgcctgcccgcgaggtctatggggctcagcctcccattgaattacttagacagtggttagatcattggaattggtacgacctcaaagattgctctgtgattaaactagtggacatccagatcatgtgcgctatgggccctccaggtggtggccgaaatccaataacccctcgttacatgagacatttcaatattgtaaccatcaatgagtttagtaacaagtcaatgttcacaatcttctccagaatcctggcctggcatctaagaatagtgaatggtacaatggccctgtacaaagatgccatgaagaatctcttacctactccagctaaatctcactatttgttcaaccttcgcgatttctcccgagtcatacaaggtgtttgtttgtcaagaccagaaacagcagaaaacaaagaggccattaaacgcctgtgggttcatgaggtcctcagagtctattatgatcgccttgtggataatgctgacagaagctggcttattaactacatacaagaaattctgaaaaattacatgcaggaagattttcatgacctatttaaaaacttggattttaatcatgatggcactgtagaagaagatgatttaagaagtttaatgttttgtgatttccatgatcctaagagggaagattttggctacagagaaattgcaaatgtggatgctctcaggatgattgttgaaggccatctagatgaatataacaacatgagcaaaaagcccatgaacctcgtcttgttccgatttgccatagaacacataagcagaatttctcgaatcttgaagcagccacggagccacgcccttctggtgggggtgggcgggagcggaaggcagtcagtcaccagacttgctgcgcacatggctgattattcacttttccaggtggaaatctccaagggctatggtagccatgagtggcatgaagatctgaaagtgatcttaagaaaatgcgcagagagtgacatgcagggtgtcttcctgttcacagatacacaaataaaaagagagtcgtttctagaagatgtcaacaatctcctaaacgccggggaggttccaaacctctttgctttagatgagaagcaagaaatatgtgaaaagatgcgtcagatagatcgccagcgggataaaagcaaacagacagatgggagccccatagctcttttcaacatgtttattgactgctgccgcaaccagctgcatgtggtcctggccatgagtcccattggagacgcatttcggattcgtcttcggaaattccctgctcttgttaactgctgtaccattgactggtttcagtcatggccagaagatgctctggaagcggttgcttctcggttcctggaagacattgagatgtcagaggaaatccgagaaggctgtattgacatgtgtaaaaggttccacacttctactatcaacttatcaacatccttccacaatgaacttcaaagatataattacgtgactcccacctcctacctggaattgatctctaccttcaaactgttgttagaaaagaaaagaaatgaagtgatgaaaatgaaaaggagatacgaggtgggtttggataagctggactcggcatcatcccaggtggcaaccatgcagagtgagctggaggcgctgcatccgcagttaaaagttgccagtagagaggttgacgaaatgatgataataattgagagagagtcaatggaggtggccaaaactgagaaaatcgtgaaagctgatgaaacagtagcgaacgatcaagccatggcagccaaagccatcaaagatgaatgcgatgccgacttggctggagccctacccatcctggagtctgcactggctgcccttgataccctgaccgcgcaggatatcactgttgtgaagtccatgaagagtccccctgctggcgtcaaacttgtcatggaggctgtttgcatattgaaagggatcaaagctgacaaaatccctgacccaacaggttcagggaagaaaactgaggatttctggggccctgctaagagacttctcggtgacataaggtttctgcagtcacttcatgagtacgacaaggacaatattcctcctgcttatatgaatatcataaggaagagttatatccccaacccagactttgttccagagaagatccggaatgcttcaacagctgctgagggtctgtgtaagtgggtcatcgcaatggactcctatgacaaagtggcaaaaattgtagctcccaaaaagataaagctggctgcagccgaagggaagctgaaggttgctatggaaggccttagaaagaagcaagctgccctgcatgaggttcaggacaagttggccaaactccaagacacacttgagttgaataagcagaagaaagcagacttggaacaccaggttgacttgtgcagcaaaaagctagaacgcgcagagcagctgatcgggggcctgggaggtgagaaaacccgatggagcaactccgcgctggagcttgggcatctgtacatcaacctgacgggagatatcctcatctcctcaggggttgtcgcctacctgggagcctttacatctaactacagacagtggtcacagtcatgtaaagaaagagacatcccctgctccgatgactactctcttatgggtacactgggagaagccgtgacgattcgagcttggaatatcgctgggttaccctctgactctttctccattgataatgggatcattataatgaatgcaagaaggtggcctctgatgatagaccctcaaggtcaggctaataagtggatcaagaacatggagaaaaccaatagccttcagctcatcaaactaagtgacccttcctatgtcaggactctggaaaactgtatccagtttggatttctgcctttagtgttgctagaaaatgtgggagaagaactggacccaattctagagcctcttttgttgaagcagaccttcaagcagggtgggagcacatgcattcggcttggagactccacaattgagtattctcctgactttcgcttctacatcacgaccaagctgaggaacccgcactatctcccagagacgtcagtgaccttgttaaacttcatgataactcctgagggaatgcaggatcagcttttgggaatcgtagtggcacgggaaaggccagacctcgaagaagaaaagcaagccttgatactacaaggagctgacaataaaaggcagttaaaggaaatagaagacaagattttagaagttctctcattatcagaaggcaatatattagaagatgagactgcgattaaaatattatcttcctccaagtctttggctaatgagatttctcagaagcaggaagtggctgaggagacagagaaaaagattgacattacccgcatgggctatcggcccattgctatccattcttccatcctgttcttctccatcgctgatctagctaacatcgagcccatgtaccagtattctctgacctggtttattaacctgttcatcctgtccattgaaaattcggagaaatcagacatcttatcaaaaaggaaacttagctctctatctctgggccaaggccaagggcccattgctatgaagatgttagagaaagctgtcaaggatgggacctgggttgttcttcaaaactgtcaccttgccacttcttggatgccaactcttgagaaagtttgtgaggagttaagcgcagaatcaacacaccctgatttccgaatctggctgacgagttacccatctccaaatttccccgtgtcagtcctgcagaatggagtaaaaatgaccaacgaagcaccaaaaggattgcgggctaatatcatccgatcatacctcatggaccccatctctgaccctgaattctttggcagctgcaaaaagcctgaggaattcaagaaactgctttatggcctctgtttctttcatgctttggtacaagagagacgaaaattcggaccccttgggtggaatattccttacgaattcaatgagacagatctaagaatcagtgtgcagcaactccacatgttcctggaccagtatgaggaacttccttacgatgctctccgctacatgactggggaatgtaattatggaggccgggtgacagacgactgggatcggcgcacactgcgcagcattctcaacaaattcttctgcacagaattagttgaaaatccacaatacaaatttgactctagtggcatctattttgttcctccctctggtgatcacaaaagctacatcgactacacaaagactctgccactgatcccagcaccagaagtctttgggatgaatgccaacgctgacatcactaaggaccagtcggagacgcagctgctgtttgataacattctccttacccagtctcattcatcaggttctggaacaaagtcatcagatgaagtagtaaatgaggttgctggagatatcctgggtaaacttccaaacaactttgatgtggaggctgccatgaggagatacccaacaacctacactcagagcatgaacactgtccttgtccaagagatgggacgtttcaataagttgctgataaccataagagaatcatgcattaatattcaaaaagcagtcaagggacttgtcgtgatgtctacagagctggaggaagtggtgagcagcatcctgaatgtcaaaatcccagcaatgtggatgggtaaatcctaccccagcctgaagccacttggcagctatgtgaatgacttccttgagagactaaaattcctgcagcaatggtatgaggttggtccccctccagtcttctggctttctggcttcttcttcacacaagccttcctgactggtgcgcagcagaactatgcgagaaaattcacaattccaattgatcttcttgggtttgactatgaagtgatggatgacaaggaatataaaaaggctccagaggatggtgtttacattcatggattgtttttggatggagcttcctgggacaggaagaccaagaaacttgcagaatcacatcctaaagttctgtatgacacagtccccgtgatgtggctaaagccatgcaaaaagtcagacatacccagacgaccaagttacgttgctccactgtataagacaagcgagaggaggggcacactctccaccactggccactccacaaatttcgtgattgccatgattcttccctctgtccaccccaaggaacactggattggacggggtgtggcactgctgtgtcaactaaactcataatctgaaggtggcatcatctcttgcaacttcttgttagactgaataaaacacattttaccgtttaaattttgctttggcttaaataaacttaatgttcttaattatgactttattctggcctctttaaagtaccaatgaagattcagtgttctgagacaatgaaaacacaccacacactttctgaataactttattttgggagagttccgtaagcattaggaacatatataaaatgacacaccactgttgacaatgaaaaaacagcatttcatcacttccagctttataaattaaaaaaaaaaatgattcagtcacaacaacaaaaatgtttagatattttaacaagtatcatcttgcaggaccataatcacattgaagccactgacttactgttaatggaaaaggttcacactgcatctagttactatagtatttctaagcacaatcacaactgattgaatgcaatgtggtatacagcaaaatccttatagatgtcaaatggtgacagtacaagtaacattggtgacctccaacaagcatgttaaaattaggctagtcaagctaagtggaatgttggagccaaacagaaatgtagtggaattaggattgtctagtgaaacctaaaactatacactagaatgatgtaaaaactaaatactggtggaacactatcaaaatactagcagcaactgttaaagccccacccccaaaatgactaagaaaatctagcaaataaagataataccatttgtttgagaatat

SEQ ID NO: 114 - protein, 1910 aa, Mus Musculus
MGQLYGQFDLVSHEWSDGVLAVSFRAFAASSTPDRKWLIFDGPVDAVWIENMNTVLDDNKKLCLMSGEIIQMSPQMNLIFEPMDLEVASPATVSRCGMIYMEPHMLGWRPLMVSWINTLPQSVSIIQKEFIEGLFDRMVPLSVEFIRIVFVDDVNMPAREVYGAQPPIELLRQWLDHWNWYDLKDCSVIKLVDIQIMCAMGPPGGGRNPITPRYMRHFNIVTINEFSNKSMFTIFSRILAWHLRIVNGTMALYKDAMKNLLPTPAKSHYLFNLRDFSRVIQGVCLSRPETAENKEAIKRLWVHEVLRVYYDRLVDNADRSWLINYIQEILKNYMQEDFHDLFKNLDFNHDGTVEEDDLRSLMFCDFHDPKREDFGYREIANVDALRMIVEGHLDEYNNMSKKPMNLVLFRFAIEHISRISRILKQPRSHALLVGVGGSGRQSVTRLAAHMADYSLFQVEISKGYGSHEWHEDLKVILRKCAESDMQGVFLFTDTQIKRESFLEDVNNLLNAGEVPNLFALDEKQEICEKMRQIDRQRDKSKQTDGSPIALFNMFIDCCRNQLHVVLAMSPIGDAFRIRLRKFPALVNCCTIDWFQSWPEDALEAVASRFLEDIEMSEEIREGCIDMCKRFHTSTINLSTSFHNELQRYNYVTPTSYLELISTFKLLLEKKRNEVMKMKRRYEVGLDKLDSASSQVATMQSELEALHPQLKVASREVDEMMIIIERESMEVAKTEKIVKADETVANDQAMAAKAIKDECDADLAGALPILESALAALDTLTAQDITVVKSMKSPPAGVKLVMEAVCILKGIKADKIPDPTGSGKKTEDFWGPAKRLLGDIRFLQSLHEYDKDNIPPAYMNIIRKSYIPNPDFVPEKIRNASTAAEGLCKWVIAMDSYDKVAKIVAPKKIKLAAAEGKLKVAMEGLRKKQAALHEVQDKLAKLQDTLELNKQKKADLEHQVDLCSKKLERAEQLIGGLGGEKTRWSNSALELGHLYINLTGDILISSGVVAYLGAFTSNYRQWSQSCKERDIPCSDDYSLMGTLGEAVTIRAWNIAGLPSDSFSIDNGIIIMNARRWPLMIDPQGQANKWIKNMEKTNSLQLIKLSDPSYVRTLENCIQFGFLPLVLLENVGEELDPILEPLLLKQTFKQGGSTCIRLGDSTIEYSPDFRFYITTKLRNPHYLPETSVTLLNFMITPEGMQDQLLGIVVARERPDLEEEKQALILQGADNKRQLKEIEDKILEVLSLSEGNILEDETAIKILSSSKSLANEISQKQEVAEETEKKIDITRMGYRPIAIHSSILFFSIADLANIEPMYQYSLTWFINLFILSIENSEKSDILSKRKLSSLSLGQGQGPIAMKMLEKAVKDGTWVVLQNCHLATSWMPTLEKVCEELSAESTHPDFRIWLTSYPSPNFPVSVLQNGVKMTNEAPKGLRANIIRSYLMDPISDPEFFGSCKKPEEFKKLLYGLCFFHALVQERRKFGPLGWNIPYEFNETDLRISVQQLHMFLDQYEELPYDALRYMTGECNYGGRVTDDWDRRTLRSILNKFFCTELVENPQYKFDSSGIYFVPPSGDHKSYIDYTKTLPLIPAPEVFGMNANADITKDQSETQLLFDNILLTQSHSSGSGTKSSDEVVNEVAGDILGKLPNNFDVEAAMRRYPTTYTQSMNTVLVQEMGRFNKLLITIRESCINIQKAVKGLVVMSTELEEVVSSILNVKIPAMWMGKSYPSLKPLGSYVNDFLERLKFLQQWYEVGPPPVFWLSGFFFTQAFLTGAQQNYARKFTIPIDLLGFDYEVMDDKEYKKAPEDGVYIHGLFLDGASWDRKTKKLAESHPKVLYDTVPVMWLKPCKKSDIPRRPSYVAPLYKTSERRGTLSTTGHSTNFVIAMILPSVHPKEHWIGRGVALLCQLNS

SEQ ID NO: 115 - DNA, 11067 bp, Mus Musculus
tcacagaggtattactactacattcgccaaggacttgatactgatcacgttgccccaatggaagactcttggctggagcacgtattacaattggttccagagcatctgaaagtcctgactaatagcatcaaggtcttgtcagatgagataagagaagattatcttcttagtgtaaagaaatccatagttgactttgttttaaaagatcccagagaaaaagatgatgatggcaagataactgaactcccacctcaccgtgctgaaatggaagtcttgccaaagccatggaggaggtctttcctatctgcatgcagttacattagggatcacttgaatgcaatgaacccaatgatgctggccgtgctagatctgtggcatagcacttttaagaaattacgtttagttgacatagaagagtttcacagctgccaggatgcattagagctgtcagaatttcagaacattgtcattaaacacatggaatctgccaaggagacgctacttaaaacgtggtttccagaagtgcagaatatttttaaccaaggcaataaaaaaaagcaattgccaactggcaagagcactgccaaattggactcttttttcaactgcgctgctacactcatgaccttacagctgcaggacctcattcttgtctccatgcaagacttcacagacctcatcgcccaacctctgtatcctcaacgtaaaaagatccaggacgctttgaacccttatctccatctctatgaaactgctgtggagtttagtaccaaacacagagggtggactgaaggaccataccacaaggtgaacccagatcaagtagaagcagatgttgggaattactggagagggctgtataagctagagaaggtcttccatgattctccaaatgcgctggcaatgaccaagaaagtgcactcaatggttgaggagttcaagcagtacatccctctcatccaagtattctgtaatcctggtctgcgccccaggcactgggaggccatgtctaccatcgttggctaccctctgcagccctcggatgactctacagtcttctctttcatagacatgaacctggagccatttttagacagatttggaagcatcagtgaagcagctagcaaagaatattctcttgaaaaggccatggataagatgatgactgaatgggactccatggagtttgtcattcttccctacagagaaagtgggacatacattttgtcctcagttgatgacattcagatgttgttggatgaccacattatcaaaacacaaactatgcgaggatctcctttcatcaagccttatgaaaagcagatgagggaatgggagggcaagctgctgctgctacaggagatcctggatgagtggctcaaggtacaagccacctggctctatctggagcccattttcagctctcgggacattatgtctcaaatgccagaagaaggcagacgattcacagctgtggataaaacctggagggatgtgatgaaaacggttgtacaagtagtcgtgactatcgagcggatgctggagaggctgaaaaagtccaacgaactcttggagctcattcttaaagggctgaacgagtacttggaaaagaagcgcctcttcttccccaggttcttcttcctgtccaacgatgagctcctcgagatcctgtctgagaccaaggatcccattagagatgcaattgttgcctataccaaaacttcacggattagttgggtaagagattggcctggacagactgttctctgtgtatctcaaaccttttggacggtagaagtccaaatcgctatacctgaggggcaccgggcccttgaaggctacttggcaaaatgcaaccatcaaattgatgatattgtcacattggttcgtggcaaattgtccaagcagaaccgtgttactctgggagcccttgtggtactggatgttcacgctagagatgtgcttgccagccttgtagataaaaagatcagtgatgactcggacttccagtggttaagtcagcttagatactactggcaagaaaataatttagaaacaaagatgatcaatgctggtttgcgatatggctatgaatatctgggaaattcccctagactagtcataaccccactcacagaccgctgttacaggaccttatttggagcccttcatctgcaccttggaggagcacctgagggcccagctggcaccggaaagacagaaacaaccaaggatttagcaaaagcggttgccaaacagtgtgtcgttttcaactgctccgatgggctggattatttggccttaggaaaattctttaagggactgttatcctgtggagcctgggcttgctttgatgagtttaacagaattgatttggaagtactttctgtggttgctcaacaaatccttaccatccagagaggcattaatgcaggtaccgatctcctagtgtttgaaggaacagaactaaaacttgaccccacatgcgctgtcttcataacaatgaaccctgggtatgctgggcggtcagagctgccagacaatctgaaggctctgttccggacagtggccatgatggtgcctgactatgccatgattgccgagatcgtgctgtactcttgtggctttgtcactgcgcggccgctgtccataaagattgtggcgacataccgcttgtgctcagagcaactgtcctcccagcatcactatgactacgggatgcgagctgtgaagtctgtgctcacagctgctggcaatctgaagctgaaatatccaaacgaaaatgaagaaattttgctacttagatctattattgatgtaaatctgccgaagtttttatcccatgatttgccactctttgagggaattacctcagatttgtttcctggggtgaaattaccaaagccagattacaatgatctgctggccgccatcagagacaactgccacagcatgaatttgcaaatgaccgacttcttctctgagaagatccttcagatctatgagatgatgattgtgcgtcacggtttcatgattgttggagagccatttggagggaagaccagtgcatatcgtgttctagctggagcattaaatgacatttgtgaaaagggactaatggaagaaaacaaggttcaaataactgttttaaatcccaagtctgtcaccatgggccagctttatgggcagtttgacttggtttcccatgagtggtctgatggggtcctggctgttagctttagagcgttcgcagcttcctcgactccagacaggaagtggttaatctttgatgggccagttgatgccgtgtggattgagaacatgaacactgtgctggatgacaacaagaagctgtgtctgatgagtggggagattattcaaatgtcaccacaaatgaacctgatttttgaaccgatggatctggaagtcgcctctccagccactgtttcccggtgtggcatgatctacatggagcctcacatgctaggctggagaccactgatggtgtcctggataaacacgttaccacagtcagtcagtatcattcagaaggaatttatagaaggcttgtttgatagaatggtccctctctctgttgaattcatcagaaggcatacaaaggagctctctcctacttcagatacaaacttggtccgatccttaatgaatctcatagactgttttatggatgactttgctgatgaaaacaaacaaaaggaaagaaatgaccgagaaagtttctctttgctggagggcatttttctgttttcattgatctggtctgttggtgcaacttgtacagatgatgatcgtctgaaattcgataagatcctccgagagcttctggaaggtccaatttcaaacctaactcgaaataagtttaagttactgagtggtactgagcaaacatcctcaaaggtgtttatagtgccatttcctgagaagggaacaatctatgattatcagtttatcccagagggcttaggaagatgggataaatggataaaggatttggcagatactcctccaattcccaaagatgtacagtttaatgagatcattgtgccaactctagatacgatccgttactctgctctaatgaatttactgaccactcatcaaaagccttcaatatttgtaggaccaacaggaactggaaagagtgtttatatcattaattttcttttaaatcaactcaataaggacatctacaaacctcttatagttaacttctcagcccaaactacagcagcccaaactcagaatatcatcatgtcgaaactggacaaaagaagaaaaggagtttttggccctcctttaggcaagagaatgatagtctttgtagatgatgtgaatatgcctgcccgcgaggtctatggggctcagcctcccattgaattacttagacagtggttagatcattggaattggtacgacctcaaagattgctctgtgattaaactagtggacatccagatcatgtgcgctatgggccctccaggtggtggccgaaatccaataacccctcgttacatgagacatttcaatattgtaaccatcaatgagtttagtaacaagtcaatgttcacaatcttctccagaatcctggcctggcatctaagaacctgttataagtttccagatgattttctagacttgactacacaaatagtgaatggtacaatggccctgtacaaagatgccatgaagaatctcttacctactccagctaaatctcactatttgttcaaccttcgcgatttctcccgagtcatacaaggtgtttgtttgtcaagaccagaaacagcagaaaacaaagaggccattaaacgcctgtgggttcatgaggtcctcagagtctattatgatcgccttgtggataatgctgacagaagctggcttattaactacatacaagaaattctgaaaaattacatgcaggaagattttcatgacctatttaaaaacttggattttaatcatgatggcactgtagaagaagatgatttaagaagtttaatgttttgtgatttccatgatcctaagagggaagattttggctacagagaaattgcaaatgtggatgctctcaggatgattgttgaaggccatctagatgaatataacaacatgagcaaaaagcccatgaacctcgtcttgttccgatttgccatagaacacataagcagaatttctcgaatcttgaagcagccacggagccacgcccttctggtgggggtgggcgggagcggaaggcagtcagtcaccagacttgctgcgcacatggctgattattcacttttccaggtggaaatctccaagggctatggtagccatgagtggcatgaagatctgaaagtgatcttaagaaaatgcgcagagagtgacatgcagggtgtcttcctgttcacagatacacaaataaaaagagagtcgtttctagaagatgtcaacaatctcctaaacgccggggaggttccaaacctctttgctttagatgagaagcaagaaatatgtgaaaagatgcgtcagatagatcgccagcgggataaaagcaaacagacagatgggagccccatagctcttttcaacatgtttattgactgctgccgcaaccagctgcatgtggtcctggccatgagtcccattggagacgcatttcggattcgtcttcggaaattccctgctcttgttaactgctgtaccattgactggtttcagtcatggccagaagatgctctggaagcggttgcttctcggttcctggaagacattgagatgtcagaggaaatccgagaaggctgtattgacatgtgtaaaaggttccacacttctactatcaacttatcaacatccttccacaatgaacttcaaagatataattacgtgactcccacctcctacctggaattgatctctaccttcaaactgttgttagaaaagaaaagaaatgaagtgatgaaaatgaaaaggagatacgaggtgggtttggataagctggactcggcatcatcccaggtggcaaccatgcagagtgagctggaggcgctgcatccgcagttaaaagttgccagtagagaggttgacgaaatgatgataataattgagagagagtcaatggaggtggccaaaactgagaaaatcgtgaaagctgatgaaacagtagcgaacgatcaagccatggcagccaaagccatcaaagatgaatgcgatgccgacttggctggagccctacccatcctggagtctgcactggctgcccttgataccctgaccgcgcaggatatcactgttgtgaagtccatgaagagtccccctgctggcgtcaaacttgtcatggaggctgtttgcatattgaaagggatcaaagctgacaaaatccctgacccaacaggttcagggaagaaaactgaggatttctggggccctgctaagagacttctcggtgacataaggtttctgcagtcacttcatgagtacgacaaggacaatattcctcctgcttatatgaatatcataaggaagagttatatccccaacccagactttgttccagagaagatccggaatgcttcaacagctgctgagggtctgtgtaagtgggtcatcgcaatggactcctatgacaaagtggcaaaaattgtagctcccaaaaagataaagctggctgcagccgaagggaagctgaaggttgctatggaaggccttagaaagaagcaagctgccctgcatgaggttcaggacaagttggccaaactccaagacacacttgagttgaataagcagaagaaagcagacttggaacaccaggttgacttgtgcagcaaaaagctagaacgcgcagagcagctgatcgggggcctgggaggtgagaaaacccgatggagcaactccgcgctggagcttgggcatctgtacatcaacctgacgggagatatcctcatctcctcaggggttgtcgcctacctgggagcctttacatctaactacagacagaatcaaaccaagcagtggtcacagtcatgtaaagaaagagacatcccctgctccgatgactactctcttatgggtacactgggagaagccgtgacgattcgagcttggaatatcgctgggttaccctctgactctttctccattgataatgggatcattataatgaatgcaagaaggtggcctctgatgatagaccctcaaggtcaggctaataagtggatcaagaacatggagaaaaccaatagccttcagctcatcaaactaagtgacccttcctatgtcaggactctggaaaactgtatccagtttggaactcctgtgttgctagaaaatgtgggagaagaactggacccaattctagagcctcttttgttgaagcagaccttcaagcagggtgggagcacatgcattcggcttggagactccacaattgagtattctcctgactttcgcttctacatcacgaccaagctgaggaacccgcactatctcccagagacgtcagtgaaggtgaccttgttaaacttcatgataactcctgagggaatgcaggatcagcttttgggaatcgtagtggcacgggaaaggccagacctcgaagaagaaaagcaagccttgatactacaaggagctgacaataaaaggcagttaaaggaaatagaagacaagattttagaagttctctcattatcagaaggcaatatattagaagatgagactgcgattaaaatattatcttcctccaagtctttggctaatgagatttctcagaagcaggaagtggctgaggagacagagaaaaagattgacattacccgcatgggctatcggcccattgctatccattcttccatcctgttcttctccatcgctgatctagctaacatcgagcccatgtaccagtattctctgacctggtttattaacctgttcatcctgtccattgaaaattcggagaaatcagacatcttatcaaaaaggcttcagatcctcagagatcacttcacctactcactctatgtcaacatctgccgctccctctttgaaaaggacaagctgctgttttccttttgtctcactgtgaatctgctgatacatgacaatgcgattaacaaaacagagtggagatttctactcactggtggcattgggctggataatccttataccaatccttgcacatggcttcctcaaaaatcctgggatgagatttgtcgactagatgacttacctgcctttaagaccattcgagaggagtttatgcgcttaaaggatggatggaaaaaagtatatgacagtatggagccacaccatgagatgtttcccgaagattggggaaataaagcaaacgactttcagaggatgcttattatccgttgcttgaggcccgacaaggcaagtgcaggctttgttattccgatgctgcaggaattcataatcaagaagttggggcgctctttcattgagccacccccctttgacttggccaaggcatttggggacagtaactgttgtgcaccgttgatctttgtgctctcccctggagcagatcccatgaatgctcttctgaaattcgctgatgaccagggatatgggggctcaaaacttagctctctatctctgggccaaggccaagggcccattgctatgaagatgttagagaaagctgtcaaggatgggacctgggttgttcttcaaaactgtcaccttgccacttcttggatgccaactcttgagaaagtttgtgaggagttaagcgcagaatcaacacaccctgatttccgaatctggctgacgagttacccatctccaaatttccccgtgtcagtcctgcagaatggagtaaaaatgaccaacgaagcaccaaaaggattgcgggctaatatcatccgatcatacctcatggaccccatctctgaccctgaattctttggcagctgcaaaaagcctgaggaattcaagaaactgctttatggcctctgtttctttcatgctttggtacaagagagacgaaaattcggaccccttgggtggaatattccttacgaattcaatgagacagatctaagaatcagtgtgcagcaactccacatgttcctggaccagtatgaggaacttccttacgatgctctccgctacatgactggggaatgtaattatggaggccgggtgacagacgactgggatcggcgcacactgcgcagcattctcaacaaattcttctgcacagaattagttgaaaatccacaatacaaatttgactctagtggcatctattttgttcctccctctggtgatcacaaaagctacatcgactacacaaagactctgccactgatcccagcaccagaagtctttgggatgaatgccaacgctgacatcactaaggaccagtcggagacgcagctgctgtttgataacattctccttacccagtctcattcatcaggttctggaacaaagtcatcagatgaagtagtaaatgaggttgctggagatatcctgggtaaacttccaaacaactttgatgtggaggctgccatgaggagatacccaacaacctacactcagagcatgaacactgtccttgtccaagagatgggacgtttcaataagttgctgataaccataagagaatcatgcattaatattcaaaaagcagtcaagggacttgtcgtgatgtctacagagctggaggaagtggtgagcagcatcctgaatgtcaaaatcccagcaatgtggatgggtaaatcctaccccagcctgaagccacttggcagctatgtgaatgacttccttgagagactaaaattcctgcagcaatggtatgaggttggtccccctccagtcttctggctttctggcttcttcttcacacaagccttcctgactggtgcgcagcagaactatgcgagaaaattcacaattccaattgatcttcttgggtttgactatgaagtgatggatgacaaggaatataaaaaggctccagaggatggtgtttacattcatggattgtttttggatggagcttcctgggacaggaagaccaagaaacttgcagaatcacatcctaaagttctgtatgacacagtccccgtgatgtggctaaagccatgcaaaaagtcagacatacccagacgaccaagttacgttgctccactgtataagacaagcgagaggaggggcacactctccaccactggccactccacaaatttcgtgattgccatgattcttccctctgtccaccccaaggaacactggattggacggggtgtggcactgctgtgtcaactaaactcataatctgaaggtggcatcatctcttgcaacttcttgttagactgaataaaacacattttaccgtttaaattttgctttggcttaaataaacttaatgttcttaattatgactttattctggcctctttaaagtaccaatgaagattcagtgttctgagacaatgaaaacacaccacacactttctgaataactttattttgggagagttccgtaagcattaggaacatatataaaatgacacaccactgttgacaatgaaaaaacagcatttcatcacttccagctttataaattaaaaaaaaaaatgattcagtcacaacaacaaaaatgtttagatattttaacaagtatcatcttgcaggaccataatcacattgaagccactgacttactgttaatggaaaaggttcacactgcatctagttactatagtatttctaagcacaatcacaactgattgaatgcaatgtggtatacagcaaaatccttatagatgtcaaatggtgacagtacaagtaacattggtgacctccaacaagcatgttaaaattaggctagtcaagctaagtggaatgttggagccaaacagaaatgtagtggaattaggattgtctagtgaaacctaaaactatacactagaatgatgtaaaaactaaatactggtggaacactatcaaaatactagcagcaactgttaaagccccacccccaaaatgactaagaaaatctagcaaataaagataataccatttgtttgagaatat

SEQ ID NO: 116 - protein, 3415 aa, Mus Musculus
MEDSWLEHVLQLVPEHLKVLTNSIKVLSDEIREDYLLSVKKSIVDFVLKDPREKDDDGKITELPPHRAEMEVLPKPWRRSFLSACSYIRDHLNAMNPMMLAVLDLWHSTFKKLRLVDIEEFHSCQDALELSEFQNIVIKHMESAKETLLKTWFPEVQNIFNQGNKKKQLPTGKSTAKLDSFFNCAATLMTLQLQDLILVSMQDFTDLIAQPLYPQRKKIQDALNPYLHLYETAVEFSTKHRGWTEGPYHKVNPDQVEADVGNYWRGLYKLEKVFHDSPNALAMTKKVHSMVEEFKQYIPLIQVFCNPGLRPRHWEAMSTIVGYPLQPSDDSTVFSFIDMNLEPFLDRFGSISEAASKEYSLEKAMDKMMTEWDSMEFVILPYRESGTYILSSVDDIQMLLDDHIIKTQTMRGSPFIKPYEKQMREWEGKLLLLQEILDEWLKVQATWLYLEPIFSSRDIMSQMPEEGRRFTAVDKTWRDVMKTVVQVVVTIERMLERLKKSNELLELILKGLNEYLEKKRLFFPRFFFLSNDELLEILSETKDPIRDAIVAYTKTSRISWVRDWPGQTVLCVSQTFWTVEVQIAIPEGHRALEGYLAKCNHQIDDIVTLVRGKLSKQNRVTLGALVVLDVHARDVLASLVDKKISDDSDFQWLSQLRYYWQENNLETKMINAGLRYGYEYLGNSPRLVITPLTDRCYRTLFGALHLHLGGAPEGPAGTGKTETTKDLAKAVAKQCVVFNCSDGLDYLALGKFFKGLLSCGAWACFDEFNRIDLEVLSVVAQQILTIQRGINAGTDLLVFEGTELKLDPTCAVFITMNPGYAGRSELPDNLKALFRTVAMMVPDYAMIAEIVLYSCGFVTARPLSIKIVATYRLCSEQLSSQHHYDYGMRAVKSVLTAAGNLKLKYPNENEEILLLRSIIDVNLPKFLSHDLPLFEGITSDLFPGVKLPKPDYNDLLAAIRDNCHSMNLQMTDFFSEKILQIYEMMIVRHGFMIVGEPFGGKTSAYRVLAGALNDICEKGLMEENKVQITVLNPKSVTMGQLYGQFDLVSHEWSDGVLAVSFRAFAASSTPDRKWLIFDGPVDAVWIENMNTVLDDNKKLCLMSGEIIQMSPQMNLIFEPMDLEVASPATVSRCGMIYMEPHMLGWRPLMVSWINTLPQSVSIIQKEFIEGLFDRMVPLSVEFIRRHTKELSPTSDTNLVRSLMNLIDCFMDDFADENKQKERNDRESFSLLEGIFLFSLIWSVGATCTDDDRLKFDKILRELLEGPISNLTRNKFKLLSGTEQTSSKVFIVPFPEKGTIYDYQFIPEGLGRWDKWIKDLADTPPIPKDVQFNEIIVPTLDTIRYSALMNLLTTHQKPSIFVGPTGTGKSVYIINFLLNQLNKDIYKPLIVNFSAQTTAAQTQNIIMSKLDKRRKGVFGPPLGKRMIVFVDDVNMPAREVYGAQPPIELLRQWLDHWNWYDLKDCSVIKLVDIQIMCAMGPPGGGRNPITPRYMRHFNIVTINEFSNKSMFTIFSRILAWHLRTCYKFPDDFLDLTTQIVNGTMALYKDAMKNLLPTPAKSHYLFNLRDFSRVIQGVCLSRPETAENKEAIKRLWVHEVLRVYYDRLVDNADRSWLINYIQEILKNYMQEDFHDLFKNLDFNHDGTVEEDDLRSLMFCDFHDPKREDFGYREIANVDALRMIVEGHLDEYNNMSKKPMNLVLFRFAIEHISRISRILKQPRSHALLVGVGGSGRQSVTRLAAHMADYSLFQVEISKGYGSHEWHEDLKVILRKCAESDMQGVFLFTDTQIKRESFLEDVNNLLNAGEVPNLFALDEKQEICEKMRQIDRQRDKSKQTDGSPIALFNMFIDCCRNQLHVVLAMSPIGDAFRIRLRKFPALVNCCTIDWFQSWPEDALEAVASRFLEDIEMSEEIREGCIDMCKRFHTSTINLSTSFHNELQRYNYVTPTSYLELISTFKLLLEKKRNEVMKMKRRYEVGLDKLDSASSQVATMQSELEALHPQLKVASREVDEMMIIIERESMEVAKTEKIVKADETVANDQAMAAKAIKDECDADLAGALPILESALAALDTLTAQDITVVKSMKSPPAGVKLVMEAVCILKGIKADKIPDPTGSGKKTEDFWGPAKRLLGDIRFLQSLHEYDKDNIPPAYMNIIRKSYIPNPDFVPEKIRNASTAAEGLCKWVIAMDSYDKVAKIVAPKKIKLAAAEGKLKVAMEGLRKKQAALHEVQDKLAKLQDTLELNKQKKADLEHQVDLCSKKLERAEQLIGGLGGEKTRWSNSALELGHLYINLTGDILISSGVVAYLGAFTSNYRQNQTKQWSQSCKERDIPCSDDYSLMGTLGEAVTIRAWNIAGLPSDSFSIDNGIIIMNARRWPLMIDPQGQANKWIKNMEKTNSLQLIKLSDPSYVRTLENCIQFGTPVLLENVGEELDPILEPLLLKQTFKQGGSTCIRLGDSTIEYSPDFRFYITTKLRNPHYLPETSVKVTLLNFMITPEGMQDQLLGIVVARERPDLEEEKQALILQGADNKRQLKEIEDKILEVLSLSEGNILEDETAIKILSSSKSLANEISQKQEVAEETEKKIDITRMGYRPIAIHSSILFFSIADLANIEPMYQYSLTWFINLFILSIENSEKSDILSKRLQILRDHFTYSLYVNICRSLFEKDKLLFSFCLTVNLLIHDNAINKTEWRFLLTGGIGLDNPYTNPCTWLPQKSWDEICRLDDLPAFKTIREEFMRLKDGWKKVYDSMEPHHEMFPEDWGNKANDFQRMLIIRCLRPDKASAGFVIPMLQEFIIKKLGRSFIEPPPFDLAKAFGDSNCCAPLIFVLSPGADPMNALLKFADDQGYGGSKLSSLSLGQGQGPIAMKMLEKAVKDGTWVVLQNCHLATSWMPTLEKVCEELSAESTHPDFRIWLTSYPSPNFPVSVLQNGVKMTNEAPKGLRANIIRSYLMDPISDPEFFGSCKKPEEFKKLLYGLCFFHALVQERRKFGPLGWNIPYEFNETDLRISVQQLHMFLDQYEELPYDALRYMTGECNYGGRVTDDWDRRTLRSILNKFFCTELVENPQYKFDSSGIYFVPPSGDHKSYIDYTKTLPLIPAPEVFGMNANADITKDQSETQLLFDNILLTQSHSSGSGTKSSDEVVNEVAGDILGKLPNNFDVEAAMRRYPTTYTQSMNTVLVQEMGRFNKLLITIRESCINIQKAVKGLVVMSTELEEVVSSILNVKIPAMWMGKSYPSLKPLGSYVNDFLERLKFLQQWYEVGPPPVFWLSGFFFTQAFLTGAQQNYARKFTIPIDLLGFDYEVMDDKEYKKAPEDGVYIHGLFLDGASWDRKTKKLAESHPKVLYDTVPVMWLKPCKKSDIPRRPSYVAPLYKTSERRGTLSTTGHSTNFVIAMILPSVHPKEHWIGRGVALLCQLNS

SEQ ID NO: 117 - DNA, 29693 bp, Mus Musculus
cagacgcggctgcacttttcaaacctcaactgtaagaagcgtcggtcagcgtctgtgcggtcgccgccgggagtcgcctcacaggggcctggctgacggcgaccagccgttgtggggaagagtgcgaggtgagcccgtgtagccgtggcccggtcggagggagggcagaacccgcgacggcgcggagctgcggcggagcggtcggtgtgggggcgcggggaccctgcggcgagcccgaaggccagagccggcgtccctgagcgcggccatgcccgatagcctccgcggcgtctcgacgtggtcctccgggtggctccggggctcgcgtgctgtgggcgcgggacgccttcacgtcggggcgggtggacgcgtccggccagcagcctgggagaaactttgcggtcatcgcgtgggccgctgtcagtcccggcgtggggagccacagctgtttccgtgactttttggctttaaagcagtgggaattcttctgtacttgtgacccatcctcagactagacagccacatcatggccacggtctggatctttatcccgactcggccttaccgtgggaaaagcgcttaatttggcttcactctcgggatatagatgagtggagacaaagttgaaagaaacttcacggccggccggctggtggctagtggccgtggctgtgctgggactagagaagcgctggcttcagcttgcaagttggaattaagaaatacttctgaaagcctaggaatttcaaccataatcattagcttgcagtgtgacattcactgagggtttggctgacgtcatgtttacatacatggtaccgataacaccgaacctcgccggcaggtttgataccgtgtggactttttaagtgttcaagactgggagagaggctgtgccttgagcagcaaggtctgcagaggtaacgaggcaagtggaggcatatgtaacatggaatttagaactccaggagcacagttttattatggagagatataaactcctttctcattggtacagtcttcacagtgagatgcccagaaatggttttcaacaacttcataaaaattgaatcacagtgccttaaaattgtgtatattaaaaaacactagtccatggaaatcgtgaccaaattttagacctgtcttttcacctaatctttttgatattaatttaattttttggtagttttaatatttcaagtaattggtttttttgagatacacatacattttagataattttctggaatgaaggtttactattaaagtaaatttacttacatgacagtatgcttaagttagagaagtaatatttctgtgatttcaaaattttttgtatgtggatagattggtaatagtttttcttggatttttttttttttttttttttaaagtaagaatttagtttcaggagatggctctgctgggaaaggttcttgacaccaactcaaatgtccttatccccagggcctacatggtagaaagagaaaacctacacttacagcttgtcctctgacctctaaacttgcatgtaataaaatattaagaaaaaaattacattttggttaaggtagaagtggcattttagtagaaacttcataaatcaacagtctaccatttatatctaaattaatgtctatagacaatgtaggcatttaatggcagacacttctaatttcatttttcagtgtgtattgacagtgaacagtttgtcattggggttaagtgaacgtataaccatgttttcattggtttgttttgtagctgcttgacaattataaggaagaatttctgtgtcaaaatctcccagttttttagagactcagtttaaaactaaattttctcaagatatgatatattataatgcttatttcctgtgtctaaaattcttacctcctgcatcttgacatttactctacacttgagtcttgcttgccagttttaaaggctttttgtcttttgagacagggtctcactttatagacttagctggctttgaactcaagagatctgcctggctctgccttccaagttctgaaattaaaggcccgcactatcagctcaattttgattatttgtctacttatatggcactgttggggactgaacctatgccttgtgcatgcaagttggtactctgccaaaagagctatatatgcaactacacatagtttatattatctataccagactattttgaaaaggatgtgtttttgaactgagttcaagacagagaaatattctttttaattatcttgtgcatgtaaatgaaccccttttttgaatttatatttatacatgatatattttgattgatcactttgctttttccaactagtgcaaaagaggatgtactttaagcattgagaaattttaattgtaaaatggtagttgtttttttaaccctttaagaattagattccagtttacattgtaacagttactgaacaaacattatttcagaggtgttattagtaaagggtacggtaatttattttacaacagaaatccaattttccatctgatgagtgatgagcccgccattatttccggttttcaacatcttctcaccctacttcacaattacaggatctatttctttttctgaaggtgggtggggatggcatcaggccttactgtcttggcccagtgtcaggctgaggttccttgcctgggacgtaaccccgctgtaatctatactctagtggttggactagagtcagttggcttcccattgtaattttcagggaattaaattactggattttgcttgctgttcagtgtttaaaaacaaacataacagtacagtgctgtgagtagagtacatagaacatagaaatcgtctgtcaacactaatgctgtcttccagtccctggccaactaaaacacatccttgaacgaacagaaagttcttatttcttctagatgctagataagtaaaccttcagtttatctgtttcctagacacagctcagtcttgttggtgcccatgtggtatagagaagttgcttggctgccatagtcattcacatttacttcatgaaggtctatggataggacaagtatgtggctttcaggatgttcttagctaacataagcatttacatgaaaacaagtggtcgcctagtctggaacagttagagcagactaaatggtttttgttttttgtttttgttttttgtttttaaatcttacattataataggtgataaaataattttatttgatttctgagttatgtggcttccttgttttgaaaaagaagttctgtacgagcagttttaaatattttgtatttaaccaactactaaagtaagcagagactgttttgaaggctccgatactgcaatttcaagatgagtctcagttccgcgtaatccctttggatgtaccttatcatttatagcattttgttcaaacagtttttaattcttaccaggtaccccattcggagttgcttaaactcaagtaaaaggttattgtcctttgacagaaaatatgattgcactctaatgttaaattttcaggtaaattggtatgtccagagttctcgtgtttgaagcataaagaaaagacatttaagtcaacctgtgggtttgaggcaaggcttcctggggcagagcatgaatacaaagtagccatttaaggaaaggtagaaaggatgtttcaggcagagaggcaaagcacagaagtggaggtaaaacatgagactgacttgtggcaggaaatgaagctggtgtgtactcagcttctggggtctttgtgtaccatgctacaaaggattttaaggtttagtttctggggctagcaaaggaatcaaagcagacaacttacttctaaatgctttctgtattgcattctgtaatttctattttataagccttctcatttgataacctcgaaacgaataacttttgaatggcactgctagagatttagaaagatgcttatttagttagtgatcatacttgcgctctccattcaaaggtacagatcaaatgtaagatgtcgttctcttccttcctttattgatccgtatctgaattcttattgtaataataggaattaatgaaaaaattggaaaaggtatggcatatactagtgtaagattgaaatcttgtttcttctatcatgcatttatgccttctatcagtgtgtctataattgtttacaaacccaaattcattaagtttcttaagatatttttattggtataatctgataaaatatgaagcaatttcaaattaagtaagatacatttgtaatttgtgaatttagaataaggtatattctttagaattggttataactatgaattatagaagagaagatcggcagattgtttattagaagcaagagaattagtagtaattttaaggcatacaaggagagacagagaactgactgttagccctcatgtatacccatgtatcgtaaatgacaggcaacccgtttgtaaagactttggtggacagaggtgacatttgggctccattatatagaaaattgaccagaggaggagaattgagaaaatacctagactgacaattcatttacgtgtagtaaatagataaaggcaaacaacaaagctgtatggatccttaaatagcatctgatgcaggtatattagcagcaggtagatgtgcctaaggttagttttcttgaaatgtcttcttttaaggcaaagtttgtatttggagatgcagagccataatgaaatgagttgtaacatcaaaactcatttttgtgtttaaatatatttgaaaaatttgcaatttcttaacattgtttttggatacatctattgtcatacaaatacctgtggtatattcatccataataatagccatcagttcatatgagtgttagagaatttgttagggtatgacgttaatacatgctaacaccccaaggaaagccctctaatgagctgataaataactggattagactatcattatgcatttcactaacttttttttttttaaaaaaaagttccttttctctccatataactaaataacaggctttgccaaacttaattctaattaatatacctgtatatcacactttagactcttttggaaggtcccagtacaaatctgggcttttctcaacattcactacatacatacatacatacattcatatatagatacatacatagttattctttgaaaatttcacacatgcatgcaatgtatcttaatcatattcactgcctactctctccctctgtcttttcttagaagtctatcacatttccctcctaacttcttgcccttgtttatttaaccacacagagtccacatagtgctgctcatatgtactacttttctatgtaactgtaaacaatgtactgattttaacagtatatagcctgaagttgtacatggtctctgcatgagatctgacctacataacatactgctactacatactgcaaagaaaattttgaggccttgaaaaaatctaaccaatgatggctcttgaacttcaggcaaagtaaattctgcaaagtaacgtatatagactgacacctttgctcttgcaaagaaaaagaggttgcatttttctggccacatattcacagccatttcctatcataaggaagactttattagtcattttattgtatattcatattagttaggtttaaagtatttagccttaggagatgacatgacagcaatcacagctgtttttattgattattgaagtataatgttttaagtttagataagctaataataagaaattctaattaccataatctcactggggatgactactgctaatattttgctgcaattttccaatcttctgttgacttttatagtctaccctctgatttatcatattgcttataagcttttatgtctttactttcatatttaatgagttaatctttgaaagtgcaactttcttgagtatgctaatatgttggattttagagtttatacactcaacaggttcttggagtgtttttaaatgtataaatcatacttaattaaacataaatatttgatgccaaaaaggatcatattgcctcttgaaaattgagagtagaaaatgcttatttataaaatgtttactagttccagtttctctgagaggcaaacatcctagcacctaaaatctatatgaagaaaaatttaagactcatgaacttgtctctaatcaattacagtgttctttgttgatgaaaactgttgggaagatagcccagttgtatcagtgattaggcctgtcccttctatttgtagaaatgagaatagtgcaagtgtaatcataagtgtaggtactaaattctaaaatccaaaggtgcagaagaggctttgcctagctgactgaatgtaggaatcgatattcatattgatttttcagacaatactatatgacatattaaaaatgttatttaataattttagtaacagtgtcttcagaactaagaaggtatgaaaagttaacggaccacagggtgatgctataggcctataatcctagcgctcgctcgggagataaggattataacgagttcaaggtcagtctggattacacagttctaggactgaactgcatactgagacccttaaaaaatgcagacagctattgaaaatgtttggctattttttgccaatgttttcacatgtctttcatgtgtttttatgtctctcttttcttataagaacaccagtcatagtggattagcgccctaccttaatggtctgtttttaacttagtcaccaccttaaaagcccttatctgaaaaagaagttacattgtgaggtactgggtttaatatttcacctaacagatagaaggaagatgtagtttggcctataatagtagctgttaggatttgaatatattttgtcctccagacttgtgttgcattcccattttgaggtgctttgctatgtagtcctggcagacctcgtatgcattctgtatttcaggctggcctcacactcttagcagtcctgccttacgtcttcagattgctttagctttctggatcttggaatttataggtgtatgtgccaccacatccagcctttgtgagctgttaagagcgtgaggacctcaagtctgtggtttaagccactaggaagtgattaggattaagtaaggttcttaggttagaatccctgtgttgatgaagcatcctagtggctttatgaaaggatggtaaggaaccagacatgtgcacagtctccttgtctcttgtcatgtgataattgtgatattctccagcaagaaggccaccatcatttgaggctccttgtccttgtccttccagaactgtgagccaaaataagcacattttctttattaatagcctactttggggatttcaatatagtaacagaaaccagactgatacagtagggaacttaaaactctgtatatggtctcctggctgtaatgaatgtaaatggaattcacacccaggggcatttcagctcaattctttcccccacctcccagcattggtattctcagactccaagagatgtatccccagctacctagagaagtgtttgcctcaggaccaaaggttatatagaaataatttacaaatttgaaaactaaacaaaatataggacagaaaacactgcctgtttcctaagtagaagatactagttggcaattgaatgtggcaaagttttaaaaaacaaacaaacaaaaaacagttgttctcagcaggaggtgaggagggtgatgtagcaacagcaacagacactagaggggtattatgggagagtcctagcagaataactcctgatctttcatagatagacgtggctgagagtctaccataattacacagatttggttaatatcaaatagtaatttgatactaaaagtaccaaaagtttcagactatgaacttcagatatggatttgactctgggttggtaatttatttatgatcagtcattgacccagcaaaatagagttttcagtactgggttgtgccaagggtagaactgttaaggtctaggggggtggttctagatttagttttggaaagtagccaatccatgagcaagttctgtttcttgatttatgtgggacagaaatataatgcacaaaatgtgaatttgctaccaagtttgtggacatgttaagttaaaacaaatattcattacattactatattaaattccacaggtgagtggaagccatggatttaaagaatagcaattcacagtcaatactaatgatacctccttccacctgcatcataaccatttctcactatttttatagcagtttctttttaaatgaagtcagtagctgtgcttagttaccattcaatttatgtctatgtgtgcttctggcgttttccgcttgtgaatagaataagctcctgaaatcagcatatctatgttgttctatcttaatactatatttggagctgtgtaagtaatgcacatcctgcctgagataatgtctctgtttttcagttacatttaagttccatcttctctcttcctgtctcttcttttaactaggtaaaagtctgcctagagaagcaggtctggcagtcatcaacatgtctcggaggagattcgattgccgaagtgtctcaggcttgctaactacaacccctcaaacgccgattaaaacagagaattttaataatttctatactcttaccccaaaagaacttgggaggtaaggaaactttgatatctttgatatgtgtgctggctaaattcagtgttttatttgttataaaacttagaactgttatcagtgattagaaagaaaagctttcatctctattttcttagctgaacagaaaattaaatctgtggaggagttcatatcaaatatcccacctagctccagatctcatttctttttgcttctgtgtctgtgaatgggaagggacagctcaggctgccaagtcctcatctgggctctgccattgattacctgtgtgacttcagttaaattacaacacctctcactgccatctgaaaaagagataaggataattgtatttatttgtgtagattttttagggttaaattacttaatatttgtaaagggctaatacagtgttatatgttttggttcaatacattttgatttttccattcctagctactgtgtctgtctaaaatagaaagagatacttccttactccatatgtacataccctcataaattaagaatatttaactcatatctaatatcacagttttatattacaaagaattggtcttctgtattagtagaagcctgtctaaattcttggcttaatcaagtatgcacttcttatggccaagcgtgcccttgacattgagtactacagtaactttttagtatgtactaggaaacctgtgccaagtcactcatctgttgtgtgtcttcttaggtttaaagtaagcatggttatgaagagttagatcatattgttttttgtgtacgtgtgtttgtatggaggtaaatgtttggcttatgctacagtggtttacaaagtgttttctattgatgggtagacaaaaaaccagtctgatctcagtgtggaatctcaagttgcctggactaggaaaggtaattctttgcttgtgtcttttatgttttaggtagaggcaagtcctggcctttctccttttttcagatgtttcataaagcccctttttcataacatagagatgagaccatctcacagacatagaatattttgcttcttgctctactaatctctccttcataaatagacatggtttccttttggtagctacattcagtatatacttgaccgtctttcaaatatttaaacaaagctggacatcattagtttccctaagtatgtatcgtgtggcacactatccagacggacttcctttgttcaatttccctcttctgggacactttctgcttttgattgtttctgttaaaacgaagggcctagtattagacacagtattgttcacagtcttactttgtgagaagactgctgaagccattagatgcccgtgtgtctccttccacattttgttcctctctctttcctccttgtccccctttcttcttatccatttttattactagggatgcccggtctgtgtcatatagcatcatattattctgactaagctagttacttgagcttcctttgctctggatcaaaatttgtgatcagtgatcctcttagttgagtattatctccttttacttagttgagaagatagactaaatatgttcaagttgccttttattgtaaaacaactggaaattgctctgaacagatacttagacaaagacttgagcattcttacctgtttttctaggttactatttggatgagtaactttattaggttaacttcaaaataataggcatcgaggctaaagagagctttttccctttaactttgtagaggacttgcgtggggtcactgttaactttacactgtctgcaggtgaagggatggcataaggaaccagcctgagctggactaagtttgcttttaaagcaaaagctcgttataggttatggttaaaacaaaagtcagattcctagtgtcccagaatcagatagcttcatggaagagacttaaatcacatctttaaattgctttgggctagtgactcatgtgataaatattgttatatttaattttcagcgttggcaattaaaaattctaatttttaaagccttccataaatcttaaaaatctgtcaagctcttaaccagacttagtgagcttgtttgatgaagtgaagttggggttcattcttttctttcctctaggaggtttgcatattttgtaatttagaaacataattctagcatatagaaaactacaagttatctgtccataccagccgtgtttaaaaattaattttaaatgtcctttaagcaacacaaagggaaatatataacgtaagtctaagttcatttttcactaaactgcattgttcctgttttttaccatgttgggtaagttttttccacccctcccccagctgaggcaaagtttcatcggccttgtggttagaagggggaggcagattcagaaataaaacgtcagcttcctttgtggcttaccctccccatcccttggtgttttattgtgtgttttagaatgccgtgggtaacagctagacctttttcattgctgggaaatctagtcagccttgccctttatgttattattaaggttttacattctcttgacggcttctcttcagtttggtataggaacatagtttaaagattactgttagacgtcttaaactacaactggcatctaaggatagaaagtaggtacttgttcttttcgcctaaagcctctgataataatggtaaaatatttatcttgcttcacagtatttatatgaatatatgcatatgaaattgtataagtatgttgatgtaactttctcaaatgtttaaaaatgcaaatgtgagccaggcagtggtggtgcacacctttatttagtcccagcactctggaggcagaggcaactgtggatctctgagtgggaggccagcttggtccagaatggccagggctacagtcccaaaaaaccaaagaaagaagaagatgatgaagaagaggaggaggagaagtggggagggggagacagaagaggaagaagaggaggaggaagaagaggaggaggaagaagggggaggaggagtaggaagaagaggaggagcaaatgtggatttaaaaacagcacaatgtgtggtgttacagtagatattcagactctagcatttgctcagaaacatttcaggtgatattaagtgttagttagctaagtatagatttttttaatagatttgattaattagattagacacgttccctgtcctcatagagtgttcccttagcagtgaacactgtcaaaagaaccatcacccatgacatttgcgcaactttgtcctgagctcatgaatgtaagagtagtttaagagagtcttaggaagccgaaatagtgaggtaaaaatagatgaaacttgttaatcttgctacttgtttttgaagcaattctagttcatagataccttcaggtaactggagagtagtgacgtcatcacaactgtaaatgccctgtctttcagatatgtaatgtccttggtttcctagcttggttcctaaattttacaaggtgagggtttttctaaaacctcaactcccttttctgttttagacaagtttttgcttctgtatctaagtaagacttggtaattgttaaacttaataaacaaatccattttaaggggagaaattgttccatagttgtgagacaagaaagctagaaattcttggcactgaacagtaaaggatcaggtttgtataggcagtttatttcattgaggtatgtaggcttcatattatagactgtatactttatttttaattattagctacatgttttagattgacactgatttttgaggtatttggaaaataatgaggaggaaactgttgttctggttcttgtgagtaacaaataaaatgcaggcaagcaatttcttctcctaactcccacacagggggttaaaccacttaggttaaatggttgaccctgctatcagctgaccatctatgtttagaagtatatttttgagagtagctgcagcaatggagttaaaataccagtttctggagatttacttgtacccaagttagtaccagaaactagaatgtggtttattcttagttattaaattgggatcttttagagtagagcctagcaggtttatgataggcttcaatctgaaaaccctctgggattgaatgtaaacctccctgtctaaggtcatgttgcctctttttggagtgtgcaaatcaatagtttgttagttcttagactaatcttaggttcagaatagctttatatctttgaaaaactaaatgcttataataataatatatgcatataccaggagaaataatctttgtgcttttaagtttgggtaagatgctaagtacttctattaaagagataaaaacatatataatttcctaaaatgacagatgtgacattaccgggtgtttttataccaaactgttgatcatccttaatttcttacatgatcccaaaatacatttgaataccctccataggatccatatcccttgtgtatctgttagaggcatagtgttgttaggcacatgatattatcaggtacactgaaatgtattatactgatagtaaaaacaatagtttattctgctatgataattgcctacacttacacagtaacattgtagacttaataaaagagcacatagtatttgtgtcagcttgtacaaaaaagaaaatttcctaatggcacagatacgtgaaagacttcaccttaagttggagttatgaagtttccctattctttctttctagaggaaaatttgctgtggttagacaatgtatatcaaaatcaactggacaagagtatgctgccaaatccctgaaaaagaggagaagagggcaggattgccgggcggaaattctgcatgagatagctgtgctggagctggccaggtcttgtccccacgtgattaatctgcatgaggtctacgaaaatgcaacggaaatcattttggtgttagaatagtaagtatgtgcttcatacatttaaggtgtttattgtaattggtggaatacgatgcagaatgtcagatgacaacagtatgacaacattgactattgataaaatattagagagacatagtttatatttgtacattttttttccaaggctaaatatgtagcctcaaacatctaggccaaaattcatttacagcaggcaacaaacatagtcaacccaacaatttgggaatatagttgcaataatttaattccatattaatagtttataacttgagggttttgtctagaaataatctaataacaaataaaatagaagccatgttttatgttttgctaatctgtttagtaaaacatgtccaaagaaatgatgcaagaagagggcttgtaaaagatgtctactacattgttatgccatttatagtacataggatttaaaaagcaatgtcagcaactgtagccaaaagaaaaaaatccgtctggttagtgaacaattgcaaacactaaagcactcagtaatggatgaagtgttatgagtgtcagactgttaagatccccatggctggctaaccaagttcagcatcaaatacacttactagtttttgaagatggacaatatatgaaagagaatagtaaattaatactgagttcaccacctgttttgataggctttagtaaagtaaatctacttcagcacaaactaaaaaaggaaagtactgttttagagaaaataatgctacaaactagaggaattctttttaccagtcaatgtatacaatgcatcgccctttgaatgtgacagtgtatttgtcctattttactttatttgtatgtgtatatatgtacatggagtgtgagtgatgcacgtttggtgtgtgtgtggtatgcacaagcatgtgcaagcatgtggaactcagagatagattttaggtgtcttctcaattgatcttcatcttatacattgagactgggtgggtccttgagtaaacctggagtgtgccctttctgccagtctggttggcctgcttgctccttagatgctctgtcgctatctcctatgcattagggttgtaggcaggccaccacacctgctttgtgatcagaacctgggcctcatgctttctgagttcccaccccatctcctgtgagcttcgttttaggattcatattgtaaggaagtagagatttgttcatatgggtttttttttaagtcaattgttttatgtaagaaaatagatttgactaaaataatttgtgaatgaaaattattttttaaaaagatttatttatttatttaatgtatatgagtacattgcagctatcttcagacacatcaaaagaggacatcagatcccattacagaccgttgtgagccactatgtggttgctaggaattgaactcaggacctctggaagagcagtcagtactcttaacctctgagccatcgctctagcccggaaatgatgatttttaaaaggttaaactgacatgtagtttactgaacaatgagtagtatatacatttctcagaacaagatacataaaagtatattctagaagcttcagagtaaattagcatagcaggaaatactaggatactaccaatgccatttcatttttcatgcattttatgatgatttttgtcaaaagttcttcagctgcctttgctctagttcttttcctataaattatgggaaaagcataaacattagaaaaacagctaataaaatactaggtatagagatgaatacaagacattgactgtgttaataaaatcctgtttggagatcgtctgaagagctacaacaaaattccttagaatcatgatgtattttatgcataggtcatgttcacaatctgaaaatggatctaggaaccctatccaacaaatttaataggactgactgtgatctaaatacctctctctggctgagatagaactagccctcagcaagtgtagtggtagattagtgtatttaatctcttaaagtaactttaagactaaaggtaattgctaggattggggctcaagcgtgtctgtcactttctggatggcagtgttacactgggcattctcatttaatcctaacaatttggccagacagattttgaatctaggaatacttgaaaaaataatccggttgacacgtgtatattcttcacttcagttcatcagttgacatttgatgtctttgctgaaccatttgaagattgtatatgcaatttctgttttgcatcctgcaggatttgttctaaggagtgaggtgttctacacaaccaacataagtatcagacgtaaagtcagcatacatgaagtcgaatcatccaatagcccacatgtaaatttctttactgtctccatattttttttttttgagacagggtttctctgtgtagccctagctgttctggaactcaccctgtagaccaggttggcctggaactcagagagctacctgcctctgcctctcagcctctgaggttaaggcatgtgctaccactgcccgacatcatcagctggttgtgaaaatttggagatgagtatatcttcaatataaaggaacaaccctttgtagttaataacaaatctgagtggtcacctagtaaatgcccttctctttgacagattccctccagaaatttctgtaaccattgacatacttgcacaaattagcagctacagtgaatagcagaaaatgattctttctaattccattatttattctacatttattgaactggtgttcttctgataaaagtgtttttcttttttctcccattttactatcactttgtattcatggttttgttaaactgttgaatagaattaattaaaaacaacctattatgatcaaattagtagaccctaatcattttttccattatgtttctttcatgccaaatttgtcccgaatttatcaaaggttaaaatttgtcaagtaggttttaaagctccaatctgtatccttctgatgttgttgaattagtgtttgcagacttcctggctctgcacaccaaggtctccatgaatcttccctggctgaacctggttagccggctctacatgacactctggtttcagtggggtggtatctgtcagttctgcttaaacctgctaatactacacctggcagcaagcaacacgttttccctagcccctttttctttccttccttcctcctcctctctctttctttctttctttctttctttctttctttctttctttctttctttctttctttctttctttctttcttccttccttccttccttccttccttccttccttcctttctttctttctttctttctttcttttttccttcttccttcttattctttcttcttccttcttctttcttcttcttttctttgctattcttttaagccaaagtatggcccactatgacatttagtcagagtcagagatacagaggaaggtcaaatccgtttgcttctgtttatattcagggttgggatttcatcttataaaactctttaaaaatattttttaattacaaaacaaggtttgcataatttagaactcaaagacacataaaaagtttggtgtgtgtgtgtgtctgtgtgtgtgtgttatagaaattgaacccagaccctagttcattataagcatataagcatacatgctgtatcactgccatatccatagacccatatatggctaaattccaaagaactccattgtatggctttttttttaattattttttttttattcagcctatgatacaaaggtggagcttcagggcaaatttttggatgttattgcgagctcacagaataaatgtgtccaactatatatagtatctgaatctgttttgagttactgcgtttgctagctttgtaaatacctgtaaactttatttagtaattaatatttctaggagttttgatagttctattgtgtttttgtattttcctgttttgcctcaatttaaacttttttaaagtcaaattatttacttttataaattaaactgaagtccttgtaatcaccttgtacaaagatcttttatttttatcaaaatatatagcccacataaaagtatttcattccaattatagcataaccgtgactattttagccctttctttgactatttgaataaataaatgttactttctagaaggtggtatggttgcatctttttataaattgaggagagatgttgagactagtctagtcactgtcactctgtgatgtgaagaccttgttcctgctaagtgatttggagacatatgcaggaattaaggaaaacacctaaaaatccaatcaaagagaatgtgttttctaaataggcatatgaagtttttaataatgctgaattttgagcaaactaaaattaattatggcttacactctttagctttttgaagactatatagcaaaagcttcccttgaaacagaatagcttggaaggggaacttgcctataattaacaagtggcaactttgcctttgtaagatacccttttttgttaggaaattacaaagttctttcgattaaatatgtcattgtagaagacattttaaaagtccatgtgatagctaatttaacagcagccagaatgaattcttgatttctgtgacacaactgtgagcatcctggtgacctgtgtcttgctttgtatgattttctcagttcatggtgtattctataccttgtaaagtgcctagcaaacaagtttctgaaaacctagcgtgtcatcttttcatttcttactttcttagaattgtattcgcagtattataatagtggcaccattgcaggaatatagtaggccaatctatttttgagtgggatttttagttacagtaaacggttttaactaaaaagggaggggtgaaggtatattgccagcctacactatggacttccactccttcttcaagacacaccagggaaggatgtgggaggtaaacactgatgcacagataaagtggccagtatattaaatattcatgaagataaatttatttctttttcagattgcacgtttcctatcttgccttcctatgcctgattttgtagtctactaatataaatgcaataactactaatataaatacaacagtggtgtgaaatttctgatacttagactgccttatcatgatacctcaagtcagataataaagttagtttcatgaattttcatgttttgaatgagtggaataggattgaagtgaagtgtatgtcattggtgccttcagacatgttccttaccagctgatagtgtttcctatgttgtcatgaaacagtgccagcagcaaatccttcccttggaacgctgcgtacagattaatcagtgacagcttacagctgcattggtgcttggaacattcaacttggaactgaagtttgagagcactgaatcctatttacaacatgtttcttagtcttgacagacagagatggtatacctgacatttacatggctgtgtggttttcacttaataggtatacagtatttaaaggttatttttaggtaaatgattttaaaaggttccattttaattttctttcagtgctgcgggtggagaaattttcaacctgtgtttacctgagttagccgaaatggtatctgaaaatgatgttatcagactcattaaacaaatccttgaaggagttcattatctacatcagaataacattgttcaccttgatttaaaggtatgttaatgtgatttaaactaacacaacattagtgttccttctgtgttcttggaggttcagtgctagggtgctgttgatacaagcaagttgtgttgtggtcctctagactacagtgggtgccctctgctgtgtgagctgtgttaactgtgagttgtgtgtgagctgtgagctttgtattgcagacaggaaaagctgcatgtgggataagcttgagttaaaacccatcatccttatactagttcctgctcccccctactcctagaggccgacccagacctttcctagcaccgcctccctttgaagagattggtgctgatggctgtctaatgtgctctctttgctccttattgctctgctccagatctcactcatcttctctaaagcgtgatggcctttgtcttgtgcagattagtcagaggccttaccctagtccccagaaccactcgatgctttctggtaatgctgttctttcttgtctttctccacaactactcacagactttaaagtctgaaggaacctgtcttgtgtttattaaacaatggcctccactctgcctatagagtttgtctgtatgagcctttgggttcctttgccactttcataacataattccaaaatcactgcatgccatagcccaggcttatctctgatttccaaatcttttcccaactgtggtttcaatttgaatccatttgaaagttctgtaaatactttaaaatgtacaatgtccagctgtctcttctatcccttaggaaaacaaccaaaaccgaaaccaaacacacaaaaagccagcaacaacaaaaaaccagcaccatctgcatttgtccctcgtggagaggaaggaaaattttccagtccagcctccccactggctcttctgtaatgacataaatgggaaaggggcaacagagtaggtagctgggtgattatcaatgaccagcaaatttttggtctttgtcctgatcaaggcaaagtgactcatacagcacttgaagtaggggtagcctgtaaacctggtttttaataccataaccatgaagctggcaacagaggtgacttgtctcttctagtagtctcttgtcacccagttaagactgttaggattttttgtgcacagactttgagcagcacttctacacttacagtgggctctgataggactttgtcatagtctgcacctgcaacaagaaagtcaaatcatatgtctctaggagacagtggaggatacatacatcttaatgtctaagctataaaccttgggacagtcaggcccagctcatctagagccatcacatgattcagaatcactttctactctggatgggatatgtatgctaattctttcatgcttactctgctatcagtcaggcctttttaatttcctataagacttggcttgagcatcatctctactgcaaagacttcatgtgcttggctctctctctctctctctctctctctctctctctctgtgtgtgtgtgtgtgtgtgtatgtgtacacgtgtgcttgccacttcaacttttcatggacagaatttggtacatcttaaaaactaaaagtccgtgtctgtgaatttcctcatcatgaaatatgtactcttcctaattgggagttcagtggatattgggataaagtatctaagaaacgtgtaagttctaagcaacaggttctactcaatttatctttaatctaggataataggataagtaccctccttcattgtctattgctcatcaccttttatgtgctttatttagccacagaatatacttttgagcagtatatacccactcggggacataaaaattgtagattttggaatgtctcgaaaaattgggaatgcaagtgagcttcgggaaatcatgggaacacctgaatacttaggtaagaattccatcttattttttatatcattttgaattctttaacagtatgttttatgatagaggtatagctcatgaggtagagtgcttgcttagtgccaaaaataaaccggaaagccctcacctattttagattacacaataccaggactcacttgattcagaagttgaatgcattcaaatttgtttatgactcattagatgagttatagtgaaatcaggaatatgtaagcatttggaacaactcacaggacatgggctaagtataaacgtatgtacgtgtttatactggctttgtatgtaaggagaagaggaaagcataagagggaaatcagtagcaaattggtaaaagatagcgatgagagaaacagagccaagcagtccgagagcctctgaggtcgctgcaatggctcttacatctgcttctgtctgctcctggccagagcgagctgtgtacagtgcagcctttggtttcacaggggccgctcagtgtttgtcgctgttgttttcaaatgtgagggtttctaataggactgttaagaggcttctgggcaaaaagataccagaaaagatgatgagataatctaggatgatgtactaaattaacaaatttgattattcatacaacaaactcttaagatgtgtgaaaagcatataagcatcaaatattttgagatagctatcttttttttttttaccttctgttattgttcagatgaatatttccattgaaaagataatggcaaacagaacaggtctcatgagctaggcagttatatcccagaaatgaaaatcgctaactcttgaatgctaatatggctatagtgtcctgtactacagagttatagttaataataacatagttcacaaaaatatacaaaaaggtcatgtgtagcttgggaacactgaacatatataattcaaaggtatgaatcatgagaatgttagaggtgagaaagttctttttggagagatgaaaacatgttaagaacatgatctgttttacccttaagagataagcttacatgaagccaacaagataatataagttagtaaaaagcaataaaactatacttgtaaagattgtgctcctgccttttcatttcttcctaacacttttcctgaggtcatctgggatgcactggctctcctactgcagagcctcaagctcctctaggacagcactggcttggtccactgcccacttcttcatgagattttcaaatattaaatatgtcttaatgtctaatttcaaagtaattaaaaccctactaaatctctactgagtttatattactctgccttttatgacaaatcaagttctttctaatttaatgtgaggtgataatcatgttttaaagtttgcctatgctgagccttaattttctctttcagctccagaaatcctcaactatgatcccattaccacagcaacagatatgtggtaagactactggtgacctaagtaaccatttttcaaaattgaataatatatacttaggttatagaaaacagctttaatatttttatggattctttgtgaatttcacatcacttacccctgtctcactcatctccacatcccctcatctctacccatcgtccttataacctcctcccctaaaataaaacacatacatacaaacagacaaacaaagcatagaaaacatctcattgtgggagctgtagtgtgtcacagtgtgtcccacagtagatccctctgtctgcatatatgttcattgcaatgagtcattggtctggtttgaggtctctggcttccaacaatattggatcctcactgcgacacctcttggttatcttgttgttgccctgtgtcatggaaatcctgcagtgttgggacagcaggactgaccctttcaggctttccagccattcacagatgatacagattttggggtgggccaattcagatagctgacttggctagcccactgactctcctaaggctttctttcaaaaattttattcaaaagataccattgaagaatttttacctacttctcagtaagctcttgagccagagacatagaaatagaaactccctcccattgatcatctcagttgagtaagagtgaaccagcctgtatcagtgacacacactctgtagtcaagtaaattgctcaggaagctaggatgacacatcagtcaaaacatgaggccctgcctaactatgccagtctagaagagttaagtatttgctgaacagaatgaggtcagaagcacacagatgcttaagtttttaagggttcacctgtagggaataatggggtttgcagccatctcagagagaccttcacagggggcagcacaggtattggcactggaacttctgttgagaccaactgacttcgtagtccaagtgaagagtttagccttattgtctttgaagctaatgggtttgtagtggcacaaaaggtctgatggctaagtccacgtgtaaagcatactgtgctgatttgttctggttcctggccgccttgctcttgacatatttacagctttgagaagttctacccagccagctttgtgctttgtcagacttgtagcctttttcacagaaccctggctctcatggggcagaccaacaagtgtctgtactgaaggctgtagataaaatgatattttcaatggattatgtttaagttatatgtaacatatctgtggactccctgttctcttggtgaggcaaatgtaacacaactatttttgtttctgtggtacagtaatctctagaagtcattttaagtattttttaaactttgccagacttgtggactattaattgtactgcctataaatactgttaaattgatgcattttaagtttccttctccctcctttgtttttcaggaatattggcataatagcgtatatgttgttaactcatacatcaccatttgtaggagaagataatcaagaaacatatctgaatatttctcaagtgaatgtagattattcagaagaaatgttttcatcagtttcacagctggccacagacttcatccagagccttctagtaaagaacccagagtaagcaatggccttatttaaattattaaattattaattaaattattacaaaccaaataatgtgtgcctgctaaagacgcattctacccaaaatgtcacttatggctcttttatcctgtgtttggaaactgttgcgagattctcaggaagttgaagggaactactaggaaagcaggtggggctatggggaagcagcggggagggtgtctcagtaacaaagcctattatgtgcatgtatagaattatttcagtgaaacctatttaaaaaattaaaaaatgacagtaaaagaaaattactgttaaagtcacaagaaaggtacattttaaggttatataaaattatacattgataaaacgtaaataaagttgatataaaagtccattaaatagcaaatatgtatctataagcaaaaaaaaaaaaaaaaagccataacttacaacaggaagtttagaatgaaggtaagatttgaagtaaatgttttctcaaccaactgctaatccatggcttactacaatgggatgtcagtgtgaatgatttctagttaaattggtctgttacataacaggcagaatttactgaacaccagatcttaaaggaataaatgtatactcatgagtggcttcattttatatgtaaaaatgttcaaactttgattgcttaaaaaaagcagacatcctggaagtagagagtctctttcaccctggcatgcactaaacatgcagtgcatcgtagaattaacggaagagagtactggaccctcgctccagacccttgattattggcagttttgaggcaataaaagcacagctcttgtttaagaagccctagagctgcagcctgcaggccagtggtctcactttctagacttctcgtttgacagatgctctcctagaggactcagtttctttacctgcaagataaaaaaataggtttctaaatattttattggattactttaattccagacaactctttcaaggtatatattaggcataaatacttattttatatagagtaatatggtttctgtttataagccatttttgttttcttaaatagtctttgcctatgttctaaattttctataataaacacagtactactttaattataaaaaaaaactatatacagaaacaaaagattagaaatatctatctaccaagtgattactgtttaatctttgaatttataaatgtttttccttcttttgaatagcagaaagtaatcttaaaattcaaagtattggctaaatatcattgaagactaccttttcaagatttttttttttttttggtttttcaagacagggtttctctgtatagccctggctgtcctggaactcactttgtagaccaggatggcctcgaactcagaaatccgcctgcctctgcctcccgagtgctgggattaaaggtgtgcgtcaccacgcctggctccttttcaggatttaagttgcagttttaaagcataaatgctgaaaaattagttatcgatttatagttcctccaaaggttttccaaattgaaagaatttgaaaataatgcaagtctttattctataatacaggaatctaaaaatctagagcagctagacaggcagtcattgtcattggctagtgttttccaagttgtacttccaagaaggtatctatgggaatagttattttttctgtctcaccttactcagcatggattctatgggctgagggtgaagccaaatggtagagtttccttcacttgtgtgaagccctaggatcgatccctagcactgaaaactagttcgtataacaaagattaaggaagaaaagtcaaaatttaaaaggtacatcctgaatactataaaaacttaattattttctataatcttctagaaggtcctggtatttttgtatattagaggtaattaggaggagacctaaaacaatgtttcaaaataaaaaaataagtttatactttggagatggtcaactaattacctagaaagcctttccttagtgttcattaattaggtcattgtttataacatcaagattttggaagcaccaataggtatctgcttagacagattgtggtatacgaggatggaagagtgataaaatacctttaattctgtattcatgtaaaaaggtaattaaggtgtattatctactttgagctaccacctcaccaatcagagctgctatcatcaagaaatcagatagcccatgttggaaaggatgtagggatagaggaatccttatttgctgcttgtgagagtgcaaattaatattgtggaagtcaacttgtaggttttttaaattcaaaattaaatagtatatgactcggctatgtcttagctggacataggcccaaaggaactctatatcctaccatagaaatatttgtgtatctgtgattactggtgttttatttatagtagaaaggaaatagaaccaatagaaatgtttatcaataggtgaatggttaatgaaagtgtggtacatatgcagaatgaaatattattcagttgtaaagaaaaatcatgaaatttgcaggaaaatgggtgaacttagaaagtagaacattgagtgaggtgcctcaaactaaagggaaagacccatatgttctgcctcatatgcagatcttagattataatatatacatgtatgtatatatgtgcagagctcaaagtgtatgtatggtctaacatctagaaaggagagcaagaaagggtgctactgagtggtgaggaagggtggaatgcaggctaaagacatgagtcatgaaagaggacataaggttaactgtctatctagtttcaaccctgtcacagttttctctttcctttccatgtgtgtctgtgcacatgtgatggataagtgcataaaaatgtagctgacagtgaaagtgtaaaccctagatgaagccccatgacttcagcatgccattctaactatgcagagagatgagtagtttgtgactgggcaaatgtttgttagaatggctacttaatctacctgcatgatgtctttatttgtgaactcattacaataattagaagcatgtgaaatagccctgccgtatacataagcatttaataagttagctgtatctctcattctgcttgggctttactgtacgtgctgtcttcatgctgatttttaagtgttcttggaagacatgctcagcttaccttgagcactcacctttccttctctgctttctgccaaaggaaaagaccaacagcagaatcctgcctatcccactcatggctgcagcagtgggactttggaagcttgtttcatcctgaggaaacttcaggctcctctcaaattcaggatctgactctcaggtcctctgaagagaagacctccaagtcctcctgtaatgggagctgtggagcccgggaggacaaggagaacatccctgaagatggcagcttagtttctaaaagatttcgattcgatgactccttgcccagcccccatgaacttgttccagatttgttctgttagcatttttctctgtgactcatctggactgactcggaaatttgaaatctctggtgtgagattgtgtttgtagcttcatatattatgtttatattataaatgcacttctgcttagaagaacttaaggaacagtttaaatgctaggcttctgttggctagcatatcatttcttgtcctgaaattgttttgcagaggaaaatatttaagtatatgacaaaaaatgtaaattgtgtttaagagaacacatgcaactgaaagaactcaagttcagtcagacttataaaatgggttatattatggttagtaaaagttgaaaaaaaatgaaaacaggaatttagtaggttctaaggtaagccctataccataactctattacagagaatctgtttggggaaatgctgtcaagggtaaaccacaacatatactgctttataaatactccagagagagtttatagttgaaagtatttcccagttaccaataatagcttgaaactgtaagattttctttgtgtgccatgtgctcggtgagaggacacagtcaaccagagcagggttgatccaggctgtttctctgcaaaccgagtcaaaactcgacatcatttccagctcatgtattttgtacgtgcatcatatatcagatctaataagatctggaagatggatatgcaaataagaggcctttgtcttctagaatgattagagtagaggagaattggatagtacagaatatgctctagtttcagtcagacatattcataaagggaaatgttaagttctggcagctgacttagtgttggatgtctcctaagtctcaggatagaagcccatcattagagcataggcacttcaggaattcttgtgtgaaattctagtgagtgaggaggtgtgacatgcagctatctttgggctccttttgtgtgtgttctgctggacacaacacatgggagtgttcagtgttgtccgtggtcaatatctatgttcagtcctgatgggaggggcctagggactgctttggagatttcccactggtgtccattttaaggtctgtaataatgtcatgttaagataacagatctcataaatatgctactctatcagactccgttgccaaaacaaattaaaagcctgtgtattgaagtgggtgttagtctaacaacctgtaaattcttgaaattgttactaaaattccaaattctttagataactttaaactatttaaattgagcattgctgtctttgtttgattaaaggttgagttcctttatatctgttatttttaaaggaaaagttgtttgccttttgtatatgtgtgtgcatatgtgtatgtgtacaggtatatgtatatatgtattgatagataaaatacagcctttaaacaacttcatgttagatattctttccttgtgtattatgttcaactcaggtgccaaaagagccctcttatctgaataataagtatgcccatacattctttaagaagtagtctgttggtccaagaagccaaacactaaagatgctaaatttaactcttgtgtttctgaaattgagaagctgttggtaaattattacttgtatactttccatcagtgttaattcaggtaatgtcattagtctgtcattaggaaatgtggttactttcccaaacagtgatattttattgtaaaactttaaaaagtattatgccactcaccaaaagtaagcatttgaaaatttaattttaagtcatttgtttaaaaccactttttattgtctatatatatacattttttccccctgaggaatcctgagatagtttgtgtgttccccttcgttaattggctaccaggttgtaaactcccatacctttccttgggacattgcttattgtaaaagagtagctagtggttgcacacaataaaaaagcagtctttccataaaagcaaatttacaaatttcccatgttgaagtgtggcaataaatgtcttctgagagagttaatct

SEQ ID NO: 118 - DNA, 3343 bp, Mus Musculus
cagacgcggctgcacttttcaaacctcaactgtaagaagcgtcggtcagcgtctgtgcggtcgccgccgggagtcgcctcacaggggcctggctgacggcgaccagccgttgtggggaagagtgcgaggtgagcccgtgtagccgtggcccggtcggagggagggcagaacccgcgacggcgcggagctgcggcggagcggtcggtaaaagtctgcctagagaagcaggtctggcagtcatcaacatgtctcggaggagattcgattgccgaagtgtctcaggcttgctaactacaacccctcaaacgccgattaaaacagagaattttaataatttctatactcttaccccaaaagaacttgggagaggaaaatttgctgtggttagacaatgtatatcaaaatcaactggacaagagtatgctgccaaatccctgaaaaagaggagaagagggcaggattgccgggcggaaattctgcatgagatagctgtgctggagctggccaggtcttgtccccacgtgattaatctgcatgaggtctacgaaaatgcaacggaaatcattttggtgttagaatatgctgcgggtggagaaattttcaacctgtgtttacctgagttagccgaaatggtatctgaaaatgatgttatcagactcattaaacaaatccttgaaggagttcattatctacatcagaataacattgttcaccttgatttaaagccacagaatatacttttgagcagtatatacccactcggggacataaaaattgtagattttggaatgtctcgaaaaattgggaatgcaagtgagcttcgggaaatcatgggaacacctgaatacttagctccagaaatcctcaactatgatcccattaccacagcaacagatatgtggaatattggcataatagcgtatatgttgttaactcatacatcaccatttgtaggagaagataatcaagaaacatatctgaatatttctcaagtgaatgtagattattcagaagaaatgttttcatcagtttcacagctggccacagacttcatccagagccttctagtaaagaacccagagaaaagaccaacagcagaatcctgcctatcccactcatggctgcagcagtgggactttggaagcttgtttcatcctgaggaaacttcaggctcctctcaaattcaggatctgactctcaggtcctctgaagagaagacctccaagtcctcctgtaatgggagctgtggagcccgggaggacaaggagaacatccctgaagatggcagcttagtttctaaaagatttcgattcgatgactccttgcccagcccccatgaacttgttccagatttgttctgttagcatttttctctgtgactcatctggactgactcggaaatttgaaatctctggtgtgagattgtgtttgtagcttcatatattatgtttatattataaatgcacttctgcttagaagaacttaaggaacagtttaaatgctaggcttctgttggctagcatatcatttcttgtcctgaaattgttttgcagaggaaaatatttaagtatatgacaaaaaatgtaaattgtgtttaagagaacacatgcaactgaaagaactcaagttcagtcagacttataaaatgggttatattatggttagtaaaagttgaaaaaaaatgaaaacaggaatttagtaggttctaaggtaagccctataccataactctattacagagaatctgtttggggaaatgctgtcaagggtaaaccacaacatatactgctttataaatactccagagagagtttatagttgaaagtatttcccagttaccaataatagcttgaaactgtaagattttctttgtgtgccatgtgctcggtgagaggacacagtcaaccagagcagggttgatccaggctgtttctctgcaaaccgagtcaaaactcgacatcatttccagctcatgtattttgtacgtgcatcatatatcagatctaataagatctggaagatggatatgcaaataagaggcctttgtcttctagaatgattagagtagaggagaattggatagtacagaatatgctctagtttcagtcagacatattcataaagggaaatgttaagttctggcagctgacttagtgttggatgtctcctaagtctcaggatagaagcccatcattagagcataggcacttcaggaattcttgtgtgaaattctagtgagtgaggaggtgtgacatgcagctatctttgggctccttttgtgtgtgttctgctggacacaacacatgggagtgttcagtgttgtccgtggtcaatatctatgttcagtcctgatgggaggggcctagggactgctttggagatttcccactggtgtccattttaaggtctgtaataatgtcatgttaagataacagatctcataaatatgctactctatcagactccgttgccaaaacaaattaaaagcctgtgtattgaagtgggtgttagtctaacaacctgtaaattcttgaaattgttactaaaattccaaattctttagataactttaaactatttaaattgagcattgctgtctttgtttgattaaaggttgagttcctttatatctgttatttttaaaggaaaagttgtttgccttttgtatatgtgtgtgcatatgtgtatgtgtacaggtatatgtatatatgtattgatagataaaatacagcctttaaacaacttcatgttagatattctttccttgtgtattatgttcaactcaggtgccaaaagagccctcttatctgaataataagtatgcccatacattctttaagaagtagtctgttggtccaagaagccaaacactaaagatgctaaatttaactcttgtgtttctgaaattgagaagctgttggtaaattattacttgtatactttccatcagtgttaattcaggtaatgtcattagtctgtcattaggaaatgtggttactttcccaaacagtgatattttattgtaaaactttaaaaagtattatgccactcaccaaaagtaagcatttgaaaatttaattttaagtcatttgtttaaaaccactttttattgtctatatatatacattttttccccctgaggaatcctgagatagtttgtgtgttccccttcgttaattggctaccaggttgtaaactcccatacctttccttgggacattgcttattgtaaaagagtagctagtggttgcacacaataaaaaagcagtctttccataaaagcaaatttacaaatttcccatgttgaagtgtggcaataaatgtcttctgagagagttaatct

SEQ ID NO: 119 - protein, 372 aa, Mus Musculus
MSRRRFDCRSVSGLLTTTPQTPIKTENFNNFYTLTPKELGRGKFAVVRQCISKSTGQEYAAKSLKKRRRGQDCRAEILHEIAVLELARSCPHVINLHEVYENATEIILVLEYAAGGEIFNLCLPELAEMVSENDVIRLIKQILEGVHYLHQNNIVHLDLKPQNILLSSIYPLGDIKIVDFGMSRKIGNASELREIMGTPEYLAPEILNYDPITTATDMWNIGIIAYMLLTHTSPFVGEDNQETYLNISQVNVDYSEEMFSSVSQLATDFIQSLLVKNPEKRPTAESCLSHSWLQQWDFGSLFHPEETSGSSQIQDLTLRSSEEKTSKSSCNGSCGAREDKENIPEDGSLVSKRFRFDDSLPSPHELVPDLFC

SEQ ID NO: 120 - DNA, 35695 bp, Homo Sapiens
cagttttcaaaccgcgactgcaagcttcggtagtcctctccgctgctgtcgccaggagtcacttcacgagaagccaggtcacaaccgtcggcccttgtctggaaaagtaaaagtggatcctgccacgttcggagctccctggcgcctcgcccggctggagctagagaactcgtcctgtggcggcccccggcgtggggcgggacagcggccccctggagggggcagtcccgggagaacctgcggcggccggagcggttagtgtcctgcgggattggcgggttggctcggggctgcgatggaaccagccgcctcggtacagagacctcatacgtgaggaaggaggacccgaggagggtttaggcggtacggtccggctgagaggggcttggactccgccgcccctgaggtggctgattgctgctggcgcctctccgctttgcggctggagtccgggttccctggggttccgcgcggggggcggccggcggtcctcccaccaccctcctcagcccggggcgcgtgtctgtgtctgtgcgtgtccgtgtgtccccgtgcgccctccacccggccggccccggctctccccaggtcgcgccaggcagggcccccttcgcggcgggcccgcgcgggtcccttccacagcaaggccacgcggtccccctagcctctcccgagtcccagctgcggcgtgggcgcgttcccatcgggactcgtggacgcgtcctgctcccagctgcctttcgtctagagaaagttcgtgttcatcttgtgggacgttttcagttactgcttgggaacagtgttttaaaaccagcgagagatcaagacgggctacagctgtttccgtgattttcagcgatctgatttttgctttgatgccttgtgacccacttagtgtgcacgactcatcctcaaactataccactactggatgccaacgatttttgacatttacccaggctctttgttttattgtagggaaaagcgtttcatttgaatttcctccgagggagaagtagagacaaagttgaaagaggctttatagcagctggtagctggcattagtttctgtctggactagaggcactctgacatcaatttggaaattggaattaagaaaatacgtttttaaaatcgtaatacttatcagatttcactaatatttaaacacatgaggactgtgtatcacattcaccgattgttttgtcgacgtaatgtttacatctgtggtgctaatgataagcagaaccttgccagggacgtttgacgtggtgtggccactttacgttttcaagtctatgagaatgtctgcgcggagacagcatagctctgtagaaatgagtggcagcgtatgtaacctggcattttgaacccaggagcacaattttattaaaggaaaataaacctactttctcattgataacactgttttttagttttatggtgaactgttcggaagtaattttcaacaagtgcttattttataaatattagaccgtgtacccctaggattgtgtattttttaagaaaactggtccatagaagcggtgcaaaagttttaaactcatctgcctcggatcctcctcctctgagcagatgctcaattaaactttttctagtatcttaataattggaggtattaatagatgttttatttttgagatacatattgtacattttagatctttttttttttctaaagtagggatccaaaattgaggtgaaatatatttgcttacatggcaagactttttaaaagtagaatttctgtaattgaagaccatccttttttgtgtgtgaatagaatggttgcggtttctcttgggatcattgattagtgaattacgatttggttaagatagaatgcgtttttaggaagttggaggtttgactaatcgctgtgttagcatatgagtaacaaatttgaagaagatacaagcatttttatggctgacgtttctaatcagataattttatttttaagcttgctctgttttacttttgttaagtgaacattttaacatgttttaaagctctttgataattataagggagaatttccttatgaaaatatttttgctttaattttagagacacaagaagtcaaggaattcagttaataacactttcacttaatcgttaaattgccttaaaattgcatgcatagtatattgtaattcacattttctgtatgtaagattggcagttaagaatagtattctggccgggcgcagtggctcaagcctgtaatcccagcactttgggaggccgaggcgggcggatcataaggtcaggcgttcgagaccaatatggtgaaaccccgtgtctactaaaaatacaaaaattagccgggcattgtggcgcgcgcctgtagtcccagctactcgggaggctgaggcagaagagttgcttgacccggaaggccgaggttgcagtgagccgagatcacgccactgcactccagcctgggcaacagagggagactccgtctcaaaaaaaaaaaaaaaaaatagtattcctaggcttactacttttaaaggatactgattgattcttcttttcataaagaaatcttctgcactgtatgggtatttgttttgtcagaaacattagcagtcatttatctactacctttccacttaggaaaacttcaaatgtcagttgctttagtttttcataatattgatgacaaaattcagtgattttatgtttaagtactgtagtttgtattctatgctggactgttatcaaaggctatttctttgaatatttcagttaagaaatgttcttataaagttacaagcacgtatttttatttaaatatgttgtaatgttgcaattttcagggcatactttattaagttttttattatcctttttccagaacatttaacctcaaacttcagtgccatttaaaacatatatattagtttcttttaatatttatatgcattgtattttggttcatccctgaccctttgcaattactccaaaagagggtgtagtgatactgtaagcattgaaaaattttaacagtgagatggtaatttcctctttaatccttaaaggcagattccattttgcattgtaatagttactgaataaatagtacttaagcggtgctattaagtaaacaatattttacaacagaaacccaattttccgtcttgtgagtgacaagcaccatgcatttgttgcccaccccggaatcccccactctatttccgtttttcaaccttttatcctggttcacaattaacaggtttaactctttttctggaggtgggaagacacagcattaggccttagggtcttggcacagagtcaggcctaggagtcattgcctgacacttcagcccttggatagtatatactagaatggttggattagagttagtttagctgacttcctattgtgatttttagaggattaagtttatgaattatattttctgttcaaaatattttaaaaaacaaaacctgttggcagaatacatatgaggaatataatctcttccttgaaattgaaaatcatcatcatttccatcttgataccaatacttctaatcaatgactaattaaaaacacatacttctgccacaccaggagaaagttcttcctttacttttgatggacgttaaatctctttttcagtttcctagggaaagcttgctagcagtaaatgccttaaatgcctatgtagaaaggagttgcttcccttagaatcttcgggcttactttgcttcctgttgcctttccaatgtacttcatgatgatctagacttatcagtgataaatcttgataggacacttacctgaatctcctgatttttggaggctcttaaaagagtgatgttcttaactgcagtaggtatttgtattagtagcttatattaaaaacaagtagccaccttgtctggaaacagtggtaaaaacaaaaggtctattggcattacattatagtatatgacaaaataattttatctgtgtttccagactttgtggctacctgtttagaactgacattttgtaagtgcaatttaaaatagttactttatttgtccaaatgctgaattaagcagagactagctgcattcagagctccagtactgtaaattcaagatggatctcaagttctcctaacccctcgaagacatgagatatacctacaaattcttttttctatatctcataattcttacaattcagttcatcaaacatttttaaaattcctaccgggtggcagataccatgctggttgcttaggcacaaaagtaaaaggatgctgccctttaaacactgaacagaattgcaatctaacatgttacattttgaggtaaagaagtatgccaaggatcctcttatttgaagcataaaggagaagcctttaaatcagcctgtggtttttaggcaaagcttcctgggggagaggccattctgtgttgagttttgaaggatgtgtaagaagagttagccatttaaggaaagtagaaaggctttttcaggcaaagaagtataacaaagatgtggtggcaaaatatgaaatatgagtgcggcaggaaatgtagctggtgtatacttggcctcagaggcctttatgtgtcatgctgtaagtacttgaaagcttgtagatactggggagctaatgaaggaatcaaaacagacaatttgattttctaaatgtctttattattgtatattctattttttaaaaactttcttatttgataattttgaaataaatatcatgataaatactttttaaaatagagctagaggtttatagagatagtcttgcttttgttcacatcacacttgctttctgcattcaagtaagtgaaggcccagatcaagcctaacatttccttcttttccttccttcactgatctacttccaaattcttttggtaattattataatgagaattaatgaaaaaaatctttaaaaataagtgagataccattatttgtagtagtactgtgtgattaaaagcttaattgtgtcttaccttctattacactttttataggatctaatcgtgtatacacatgcatataaatttacttaccaggtcccttaagattttttttaaatgctataacctgataaaatgttatgaaatgaatttcaaatggagtgagacatataggtaatttagaatcggtaatatgaagtgtggtagaagacaagaaaaggcctgggaattgttggagttaaagagaatttggtgggaaatttaggaagatacaagaaggagcgacagagagctgactcataacctgcatgtaccttatatgaagggcaaccagatgtttgaggagggcttggtggacaaaggtgacattcatgctccactatatgcaaaactggccaaaggagaggaaatggaaaaatatcttggctctgacaattggttcagatgcagtaaataaaaggaaaatgaacttaagaaatgcttaatggatgcctaaagcagcttgtgatgtaggtatatttttaataaatagatgaacttatgaggaaattggtacccatattgatctttcagaacaatggaaaaaaatcagtgaaactgagcgctatcagaactaagaagatacataagtagttaaaacagaaaacaaaaatacttttaagaatgaagtttagactaagttgggatgagaattttgtacatggaaacagtacagctgttcaacaatggcagggaactgcagggagagtatttttgggtagaatgttaattttgttttgtggaacaatagcgatatgcccttgtgacttgcactgtacctgtgtcagtggacatgagttcagcatattttaatttttaatccttgcagcactggaagatcaattcttttatcatccatactttagaggcagcaaaatcgaagctttcttcaccagtaaaagggaatgcgaagtaaatcacaacaaaattccatttcaccttcatcacactagaatagccaaacttaaaagtctgaattgggcaagtattgtcaaagtagtggtaaaccgtcccatccagtgctagtgggagtgtaaactgggggtggaaagaaggggctatgtctaatatgttttatttttaatttaaatgaaatatgaccaagtaataagattggaaagtaaatgtttgtatatagtgttccttatcttacatttgaaatattatatattttgttttctttttaaataactgtgttgctgcagatcaggcgacttaacagaagtatattttctcaacgattctggaggctagaaatctgggatcagggtgtctgcggggttggtttcttctgaggcctgccctcttggcttgtagatggctgccttctcctagtgtgttcacatagtctttcctctgtgtgtgtctgtgtcctaattggcccactttaatgacctcattttaacttaatcacctttttaaaggccctgtctccaaagacagtcacattatgagatacaggggttagggtttttcaacttaggaatttgggggaggacacaattcagcccataacaatagcaaagttaaataatttaattaaggtctcatagctggtatgatggatgaatggaattcagacccaggtgtctttcagtctaaaggttattctcagaatgctacactacaaccctttgactcctagagatgtaccccaaaactagttagagctgtttccccaaagactaagagatgtagagaaaacaattttactatctagttatgtgaaagctataattttaatttaattttttgagacaaggtctccatctatcgcccaggctgaactgcagtgacgcgttcataatttgagaataacaccaagaagagaaaatgtagaaactgaaaacgctgaactctaatgacactgctttttggctaagtagactatagttggcatttgaatttaagaagataaagaacagtacatataagtagaaaataggaaaaaaagatgtcagaggaggaacaaatgcttagcgggttactacaggagggtgctaaaagaataataattgatattttattaagtaggcatagcaataagtcataagtgtcttgaaatatagtatctgttattgttttatgaatgcaattaatataatagttttgataacactgaatgcatataaacatcacaaatttccagatacatatatgagcttcagatacagaacttcgaaataaagctttatgtgtaggttagtcactcttccaacaaaattattgagcacttcatacatagcaggctctgtgctaggtcctgtcaaaggagggactcttaagacctttgagagtttctgagtttagtactgaaacatagccaatccgtggaagaagttctatttcttgtagtccttcacgtcagtaatataactcacaatatgtgcatttaccaccaaatttctttagccatgtgaaaataagtttaaaatgaataattattatcttgtcgtattaaattacctattatgtgaaacctataactttatttatttatttatttatttatttatttatttattgagataagatctcgctttattgcccaaactgaactgcagtagcacattcatagctcactgcaacctcaaacttctgggctcaagtgatgctcctgcctcagcctcccaagcagctgggactacaggtgcgagccactacacccagttaatttttaaattttttcatagagatgggatctcgctatgttgccaggactggttttgaacttctggcctcaagtgatcctcctgcctcagcctcccaaagtgctgggattataggcgtataccaccatgtccagctgaaacctctataactttaaagaatggagttttatgatgaaactaagtgattgtttgcattataattttatcataactattttttttaaattgagaggatttttacagtagttttattctgaaatgaagtcagtaacttcgttcaagtgccatagtgttattatggtttatgtgtatgctttttgttttttcctccttgtggatagaatgtgctctttaaatcttttttttttttagttgtattttatagctatatttggagctgtgtaatgtaatgcacatcctgcctgagataacatcttttctctgtattctctttttttgcataggtaaaaataagtgactaaagaagcagacctgggaatcacctaacatgtcgaggaggagatttgattgccgaagtatttcaggcctactaactacaactcctcaaattccaataaaaatggaaaactttaataatttctatatacttacatctaaagagctagggaggtaagaaaaccatatgacgtgtatgccatctaaattcaaattttggatttgtgtttttataattctataaaactcacttgggatcattatttaacaatgattaggaaggaaagttgtgatctctgttgctgttacctagggtccagtcttaactgacttgaaaatcaaatctgtggagggtttagtgaacttaaatcatacatcctacctagcctcagagcctctgataggaggtctctgtcgttacatgaggctgtgcatgggaagaggcagctcagcatagtggactgccgagttcaagtttggactccaccagttactaggtgtgtgacttcaactaaataactgtacctctttttttaatttttgtttgtggcggggtctcactctgttgctcaagctggagtgcagtgacatgatcttggctcactgcaacctcctgtctcctgggctcaagggatctgccacctcagcctcctaagtagctgggactacaggcacacaccaccacactgggctggttttttgtagagacagggtttctccatgttgcccaggctggtctccaactcctgggttcaagcaatcctctggccgtggcctcccaaagtgctgagataattggtgtgagcccctgcgccctgcctactgtacctcttagtgctgtcgtttcctcatctgaaaagtaggggtgaagataattgtgtctgtcttatatggttgttatgaggattaagttagttaatatttgtaaagtgcctagtacagtgctctgtaagtttttgttaaatgaaatatttttttaaattcctagggtattgtgcttggcttaaaaaaaaaaaaaaaagaagaagaagaagaaatagggagattctccccctctcctaagttgaacaaaaagaatgaattcatatttcatagtctgattctatgtcacaacaaatgagtggtttataagtaaaaagcctttacaaattgttttctcttaaccagtgtataaactctgtacggccaaggagtgacatgatattatgaaaccattctgtactaccattttaatatatgaaaagttataaaagatataccaagttatttaagttatatattcagcatcttttgagctttaaattaaaggtgcttaatgaagggttggaagatggtagtcatcatgtattttcagtttgattttagttctggaggtaaatgttttgttgtacgttaaatggtttactaagtccatatttgtgttgataaatgtgcagcaaaacagtgtgattgatttttgtctttgaaaatctcgatgtgagaagaaaagttgactgaatcatgaaaagtaatttcattcttggtggccttttaccttaagggcagaggcaagtcctggctttttcacgttgcagatgttggatgcagcctttcttttgcaaaataagaattataatatctggccaggtgtggtgactcacgcctgtaatcccagcattttgggaggccgaggagggtgggtcacgaggtcaggagttcgagaccacccttgccaacatagtgaaaccctgtgtctactaaaaatacaaaattagccaggcatggtggcgtgtgcctgtagtcccagctactcaggaggctgaggcagaagaatcacttgaacccggcaggtggaggttgcagtgagccgatatcatgccactgcactccagcttgggcaacacagtgagactttgtctcaaaaaaaaaaaaaaaaaaaaaaaaagaattataatatctacctcactgaccaagaattaaatacaaaagcacatttcataattcctggcatactaatttaatgtgcaaaatatttgggtgttttaatggtgtattaaaagatagagtttttagaaccttttaaaatgtttttaagaaattgttctaaatcttaattacttcattttgcattataataggaagaaaggttttttttttctttttttctttttcttttttttaagtttcctgtatctcacattgaaccatagaatctctgcattggaaagacttcagtggtccgtggtcttactaatacaatgtttgtatgcagcgcagcaatctttcctataatttcccgaacaaactgttatccagcctcagtttgaatgcttcagcgatggggaaatgaatattatgcaagtcttgaacagtacacacaataaaagtcactttcttttctatttttctgagttactatttgatgagtaaatttacttacattttttaaattaacttttcaaaattggggacattataggagctaaaaaatctataaagtatttttgctttgagggctttggataatttaaactttgaggatgatattagtaattctaaattgctttataaatgaggtgccaccataaataaagttgaattaggcatactttttagaattttagatcaaaaactcatgatagaatttgattaaagcaaatttagattgattgctaaattcccattttaaaatatctttatgaaagagaccaagtaacatctttcttttgaattgatatgggctaatgagtcacatggtaaatattgatatgtttaattattagatcttgataaattagaaatcatggcttttcatctgccaagaatgtactgaaagttctttcaatattgttaccaattttaatatcctatgcttttgtgaaatggaaattagaatcataatcatttcttctgaggtttgcacattttgaaagttatctttctgaatcaacttttttatttcagagtgttagtgtttaataattcattttcctttagcaaattaaaggaaattatgtaaaagttaacagttcattttttactattctcaaaaaacttgaattgttcctgttttttaacatgttgggtaagttttttctacccctcccccaactgaggcaaaggtttcataggacttcttgtggttagaagggtgaggcagattcagaaataaacgtcagcttcctttgtggcttaccctcccgcctcctttcacattttattgtgtattctagaatgcagaaggggaatgcagaagggtaactactagaccttttcgctgctgggaaatctagttagccttgcctttttagggtataacttaaggattatttttaaatgctttaacttttcttaaatgtttcaattacatttggaatagaaacatattttaaagatcattttttatacttttaaactatagcattttagaatggaaaacaaatatttggtttttttcctaagtcatctgataattatggtaaaaatgtttaccttcatagtatataaatgaatacacacgcacacatatatataattttattggaatctcaatcttttaagaaatacaaacactttaagtacaggatacagaatagcacagtatatggtattatagtgggtacatatttctggcattcattcaacagatatttcagttcctattatgtgttaacgaactgtagattttataattaccataataattaggacagacatggtccctgccctcatggagcttttacttagtggtgaacgttgacaaataaataaatcattatccacatcatttggtcacctttgccctggattaatgagtactatacttgtttaagaaagcctcttgggctggtgcagtggctcatgcctgtaaaatttcaacactttgggaggctgaggcaggagaatcgtttgagcccaggagtttgaaaccagcctgggcaacatagggagacactgtctgtacaaattatgtaaaaaattagccaggagtggtggtgcgtgcctgtggtcccagctacacaggaggctgaagtaagagaatcttctgagcctgggaggttgaggctgcggtgagctgagatcctgccactgcactccatcctgggtgatagagtcgagaccctgtctcaaaaaaaaaaaaaaaacaacctcttggtaatacctggaacaattagataagaagtgttatttacagataaaataaataataaaattattgcagaactgaattgtcacaagcactactataaactgttttttcagatgcacagttttcttggctaactagtttctgtttcctaaattttacaagtgaatttctttataaagcccaaaatttccttcctgttttagtcaagtttttgcttcgaaatctaagtaagaattgatagaagcaagtgagttacacttctttaacaaaactgtttttttgtttttttttttttttgagacacagtcttgctctgtcccccaggctggagtgcagtgacgtggtctcagctcactgcaacctccgtctgccgagttcaagtgattctcctgcctcagcttcctgagtagctgggattacaggcatgtgccaccaagcccggctaattttttgtatttttagtagagacgggatttcatagtgttagtcaagatggtcttgatctcctgacctctggatctgcccgccttggcctccccaagtgctggtaataccaccacgtctggcccaacaaaactattttaaagggaggaattgttttatagtgattagaacagaaagttaggaattcacatttctcagttttattcttgaggctctgattccatttatgacctttcatgaggtatttaatcttattctgactcaatttatccagtataaaatttatgaaacaccagtggattgaatataaagggactaatttttgtgtgtgtgtgctcatcgaaacccatcaatttgtattccttctgtatacaatgagaaaatattttatagttaaacattctcaaatcttaaaactgctttcaaagaatcaggtttttatatgcaaatttatttagttgatgtattaatatattttgataaatgtagaagagtcaaattatagtttgatttccagtactttccattggcatcaattttgaggaaatttgggtaataaaaagtaggactctttgtcatcttggcctttgcgaatagctagtaaaatacagtcaagcagtgtagtcccccagtttccaccccgtaccccctaaacaccaagttttgttttccatgctaagagtctgatagactgtgttagaaatatattgaagggaattgaggcaagaggagttatggaacaaacattgcttcctaaagatcttttatttatacctgatttgttagtatcagaatccagagagtaattcaaaatttaaggtagaggttcttaattttggatcccctatactcagccttataaggtttatggatgggctttaagatctgaaaaccctctggaattatatgtaaaacttcctatttaagggcttgtgtatatttttctgggtaggcagtcaatagaatagcttttattaatttcccaaaataatccttgactcagaatagctttaggcttttgtgaaaataaatttttggccgctgtagacttacagtaacacgtatgccaatagaaatgaattttcggtgtctttaaattttggcagaggtactaagcactgccattggagagagctaaaagcatacttatttctaaaatgataaacatgaccttaatgggtgtgtttgtacatagctgtgataaccattattttcttagtttatcatgaagtatctttgaatattttctgtaggacacatataccttagttatctgttacaggcttcaaagactactgagcattactaagagacatattgctaaaacaattgacaattgtgatagtttcaaaggtggtaaaaattgtgttgaaaggaaaaattactaataaaattaaataagtcaaatacccatttttgcattcactttaatttcttatatttaaaggtaagctattctaattagagagttaacatgataccctatgaagggtacagtttttggaaatagacctgagtttaaatctttaccttgactaaattacatatcttctctgaggtgtgaagaacaggagagcatttattatataggattgttgtgatacttaaacacaataatttatatcaagagcatggcatggagttggtgtgcaaatgagattatttccctgcaatgataatgtatcttttttttttttttttttgagacagtctcactctgtcacccaggctggagtacagtggcatgatcttggctcactgcaacttctgcctcccagattcaatagattctcctgtgtagctgggattacaggcatgcgccacaacgcctggctgatttttatatttttagtagagacagggttttgccatgttggccaggctggtcttgagctcctgacctcaagtgatctgcctgcctcggcctcccaagataatgtatcattttagtagtgaagaataaatataattctgtcttatcctgttgttatagtttgccatttacatttgtacgtgatagcactataaattttataaaagtacgtatgatatttgaatcaatttagagaacaaagataaattcctaatgacacagatatttcaaagaattgactttaagttggaggtataacagaatctgtaatatactaacgttgttctctgcagaaaaattaaaattgattgttctcatcttcccccagaggtaaatttgctgtggttagacaatgtatatcaaaatctactggccaagaatatgctgcaaaatttctaaaaaagagaagaagaggacaggattgtcgggcagaaattttacacgagattgctgtgcttgaattggcaaagtcttgtccccgtgttattaatcttcatgaggtctatgaaaatacaagtgaaatcattttgatattggaatagtaagtatatactaaatagtatctattttagttggtatgaaaagatgattaaaatgtcaagaataagaatgataaaagtgtgacaagaacttgtaaagattcctgttaataaaatgtaaaagggacctaatttatattcagatattttcataagactaaatgtatagcctcgggcacatacacaaaaactaacagcacagaataagcaaatgacaaatacaacatttgaggaatgtggagaaatgaatatacattattttcttaatggctaattgattgaatttttctggaacacaatctgatgggcagatagaattgaagtaatttgtatattttcttcatctatttgaaaaataccttcaagaaaataagaatagaaaggagaattgaagtaatttgtatattttcttcatctatttgaaaaataccttcaagaaaataaggagaatagaaaggtaaactgcataaaactttgcttaatacattgtttgttaaagaaatacatttggtatatgtaatgtgtgaagcactatgttagttgtagcaataataaatatatctcttgccacaagtctgtgaaaaagtgaaaacacccccagtattctacagttcaccaggtggtaggggtagaggattgttaaggtaactggtttgttacctagtatattgacatgtgactcttacagagtgcctttgttgcatgattgtctgtcacgtttattctaaggatgtaaaatgtgtttgaacatctgcaacaactggaagagatcagctagatttatgtttagtataccttgggtgccaatagtttttaatgaagtaaatatattttatgataaaccaagaagagataagtgtttattttagtaaaaaatgtattgctaactatagtaattctttttagtaactaacttgcatcattgcctttttaaatttaaaggtatattaaccttatttttgtatttagttattttaaaattaatgtttttgttccacgaaatagattggctggaatcaacttgtgaatgaaaatgaagattttgcaaaatgttaaactgacaagtagttcatttaagaatgaatactatgtacatttcccagaaccgtcttaaggcgtgttatatagcactttcaaaataaattagaattgcagaaaaggccaagatactaccaatatgatttcagttttcatatattttgtaattatttttgtcaaagattcttcagctgacctttaaaaagttacctacttgcataacatctgcatgtttgaagtgtgtaaaaagtagctaacatttgtcaaaacagtagtggaatactaggtttggaggatgaatatacataagaacattgactattttcataaaatcctcttttgggggttcatccaaacagcaacgacaaaatacatcggaaagatttgagacattttatggatggaccttgttcatactccggaaaattgactcaggtaccttacccagtaaactggcagaacttactgatctctatacctctggctgaaatgtagcaagcactcagaaaatgtttaagtagattaatgtattacatttcttaccagagtgactaagacccactaaaatttattgctagaacttcggcttaattactatgccttccgcttttggggtggcattgtcacatttagtagtctcagttgaaggtaaaaatttaatcaggtttagttgttttagtagtgtggcataatttttatatggtgaaattaaaatggtggaatctttaataactatcacccagtcaattctgtcctcaaatcatcctacacacgttttcttccccaactcttattttacaaaattccaaatctatagaaaagttgaaaaactagtacaattaacatccttatactcttcacttttattcaccagttgttggcattttgccacatttactgaaccatttgaaagttgtaggtattatgatattcctttttgtgctgaagtatttggtgtgggtgatgatgtgtatttattgtatcacatcaggtggcaataaagtcaggttttattactggttttgctaaatttgaacatgcttaaggtgtagtcttctagctctcctcattgtaaaggaacattttccctttttaattaatctgtgtagtgatatttacagaccatgtgattattatcttttgttgttgttgttgttgttgttgttgttgttgttgttgttgttggagtcttgctctgtcaccaggctcgagtgcagtggcacgatctcagcttactgcaacctctgcctcctgggttcaagcgattgccctgcctcagcctcctgagtagctgggattacaggcacgtgccaccatgcccagcaattttttgtatgttactagagatggggtttcaccatgttggccaatatgtcttgatctcctgacctcgtgatccacccacctcggcctcccaaagtgctgggattacaggtgtgagccaccgctcctggccaatattatcttcttaacttttcgtctagtgatttccctttcccactttttaatatttctgtggatttcatgttttttaaattaatctaacacatggcattaatggaaaataacccattatgttttaattaatgagttctaatcagtttctgccactgtctttttttcatgctcaaattgtcccaagcttatcagtggttccctttcaagctacttcctatgtccttttgatataatgtcattggtgtttgaagactcccttgctttatgcacaccaagatttccagggtcatcttgttatcttgcctgccccagacctgtaatcagccatctctctgagaagttctggttcttttaagtggggaatagcatttagaaaccaaatatgggtgttggacatgctcacttttaacggagcatcgttatttttaggacttttctaaggatagtgttaggaaatcatattttttcaaaatcacgaatttagtctcatagctccaattcaagtccaccactacaaggttcttcatcacttctcacattctatatatgcatctcccctctctcacagtgaaaacccaggttctcagcaatacttgcttattcactttatccaacaatacgtacaaaatagtttcagcataacaatactaatactgctaccaacagcaaactacttagtacaactgtttttttttttttttttttttttggacattgtttttgcacttagactatagtccattaagggtatctagttagagttatatatatagttagatacatttgtttctgttgatattcagtgttaggatgtgattttttatattcttattctgaaattctaaaaaaggtttgcatgattcaaaacttaaaaaaatgtggccaggcatagtagctcatgcctgtaatcctagcaatttgggaggccgaggccggaggatcccttgaatccaggagttcgagaccagcctgggcaacaaactgagaccctcatctccatatattaaaaaaataaaaaataaataattgtttttttaaaccacacaaaaaatgtataaacatgtatcccctgtactgcaaaatcttgctctcattcctattccttctgctctcttccaaccatacctatgtagctaaccacatttattcattctggctcattctttatatgtttcttcttgcaaatataagcaaacttgtatatatttaatattcttacttacagaaaatgtagtatatatactcctttgcaccttgtatttttgtttgtttacttaagaatatattccagaaatcattctacattagttcataggcatctttttgactattattatggccagtttcttaaatggctgcatagtactctgttgtatggttggatcttgctttagtcgaccttctgtaaatgggaattattatggagatgtagctttagagtaaattcctagaagaatgattgctggtcaaagagtaaatgcatatgtagttttattagatgttgtcaaatttccttccatatgagcagcacacaatcacttttaaaaggcacttttttggccgggcgtggtggctcacgcctgtaatcccagcactttgggaggccagggcaggaggatcatgaggtcaggagatggagactattctggctaacagggtgaaaccctgtctctactaaaaaatacaaaaaattagccgggcgtgttggcgcatgcctgtagtcccagctactcaggaggctgaggcaggagaattgcttgaacctgggaggcagaggttgcagtgagctgagatcgcaccactacgcgccagcctgggcaatagagcgagacttcgtctcaaaaaaaaaaaaaaaggcacttttttgatttgtacatttgctaattatatgaatcaatctagaactttcttctggaacaactatagcctctttttgcttttgtgttttgttttgcctctacctaacctattttttgaatcagtttacttttgtgaattaatctcaaattcttgcaacctgcttgtcacttttaacaattattaaaatctttcccttcttattttaatacatagttcataggaaagtatttcattgccagttatgaagtctacatgattgttttagccttttatttcttcagaaagtaatataaatcttacttttctggaaggtagtattagatctatttatacatatggaggaaaatttgaggataattgagtcattccatcaccactatccatgagacaaagacttttccataccaagtgtctttaaagcatatttgtagaattaaataaaatatagctatacatattaaaaatctttttaaaaaacttctggaaggaaggtattatctaattggacatactaagttttcagtgctgcattttgagcaaattaaagttggtcataaaaaatacttacctttggccggacacggtggctcacacctgtaatcccagcactttgggaggccaaggtgggcggatctcgaggtcaggagatcgagaccatcctggctaacacagtgaaaccccatctgtactaaaaatacagaaaattagccaggtgcctgtagtcccagctactcgggaggctgaggcaggagagtggtgtgaacccaggaggcggagcttgcagtgagccgagatcacaccactgcaccccagtctgggcgacagagcgagagtcgtctcaaaaaaaaaaaacttaccttttggagaacacagaacaaaaactttgtcctagaaatagtgaaaatcaaaaggggaacttacattcatcagagacaactctgagattatgtgagaatgctattttctttttgtcaagaaattttgtctactaaacatctctaagtaaatattaagtacccaacagaaaaggatggagactgtaacaaaacatgcaaaacagaaagccttaccttctggaatgatctcaatcaccagagaaataacattttaatatgatcttaacaatttcaaccataacgtatgttgaacatttacactctggcaggcactgtgataggcacgttatctgtattctcatttgatttttaaaacaatcctccaaaaagggagattggtattcacatcatatgtctagttaatattctaatgtctttccattctaaaatcccatggactttgtttctcccattagcataggaatataattttaaagagactcttaatattcaaattttaaaacaagttcgttttgatcactggaaataaatgcttattttaaaaatctttaccatggcttttcaaagctatatgactagatttgcattttatgggtaattgagatattactttgttttactgaaaatcttggctctctataactcacagaaatctatcatttttgataggaaaatattctgattttaatctttcatgtattaactttatgttataggaatatttctaaaagatcttctctacttgctgttccctataaaagacagatgtagagctagataatatatagcacataggttttcatgactgtgtaacctgtgctaaagtactcttatcacgtattctcacacatagcacatgtatatatgcattagcaagtgaacatagatgctgaatttctaaatttcttttgttgatatccctgcaagggacaaactctttttagagagaaagagcagaagtcacctgatttatctcccaggtcaatgataatgatataggcggcttttctgactgtagatatttttctttttcttttttgtcttttttttttttttttttttaagtcactgctctgggtgactgctcagggtggtttccttaacagaagtcttgtttgctactcactgcttctgtttctttttccaatttctgccaacttctgcaatttgctgcttgtgttatcagttctttccctcctcttaagtcttcctaattttcgtattttctgtagctccacctatgttcctctgttgtgtgagaaatggcagtcctatgaaatacattggtcagcttgtcaaactaaaaggaagagacagtgtgattggctgacaatcatagtattttatttgatcttattattaaaacaagcaaaaaactctgaggatactttccctgattataaaagtaacacccattcattgtgttaaatttaggagatacagaaaagggaaatcacatgtaaatgatggttactttatgatatgttcctgtatttaaaaattattcttattttttggtctgtgcgtatgtacttttagagacaacattttgatctactgggcatattctattgtaactctcctttttcacttaagaatatagtgtgtgcatctttatatgtaccatatagtgtttctaaaaatagattttaatttagcaaagactttaaaaatttccttcaaaatcagagttcaacaaaaagtcccaaaatttggaaaggcgagatgttggctagatttgcgattaatgtttgttggctcattataatagctgatattggctgggcccagtggctcatgcctgtaatcacagcactttgggaggccgaggcgggcggatcacgaggtcaggagatggagaccatcctggctaacacggtgaaacccagtctccactaaaaaatacaaaaaattagccgggtgtggtgccacgcgcctgtagtcctagcaactcgggagactgaggcaggagaattgcttgaacccaggacggggaggttgcggtgagtagagattgcactactgcactccagcctgggcgacagagcaagactcagtctcaggaaaaaaaaaaaaaaatagctgttatctattgaatatttaccgtgtgtcagacactgtgataagtatttattgaaacgatctgctttgattcttctaggatgtttgtgctcaatactttatgtggattatccaatttaattcttagaccatgaagtaggagctattctattattcacattacagtagaagaaacagaggcacattttgtcccagttcacctagcctagttagtgacagagctagagtgaaacccaggcagtcttgatttcagtaagcactcctatatgcaccatgctatcctgtctcttcctaggcactgggaattgctttccatactttcactttactttcttgtattttgtttttaattttagaattggtggagtgttctggttattgaagtaactttaacgaatttgtaatataaaatgttggtaaataatcataaagtattcaagaataaatgtcttacctaaacaatttatgttgctgtacaaatgaagaatacacatctattttttatatatttagggggtgtaaatatgtaaattcatattttatactgttttctaataatttcaagttatttggtctgatttttataagataggactagattatcagtatttatatcttgtaaagtacctaacaaaaaatatattctaagagaatctaaagtgttctttcttcattttcttattttcttatgattgcattagtactattacctaatataatattatttgtaatattattttgactgtctttgcaggaatatatttagaccactttctgttttgagacgatttgtatcattgaaactaaacagtgtagccggaaagggaaggagtgatggtgtcactgccagtctgtgcctggattcccactctgccctcaggagaccttgagaaggggtgtgagaaatgaatactgacatgcagaccaagggccgctaggcagtgtgtatattaattattcttgaagattagtgtatttctttttttagattaagaaaatgtgaattcccaaaattgtctttctataccttattttggagttcactactataaatttaatagcaaactacacttttcaatactcagattatctttatcatgatatgttgaggtagatattaaaattaatgtcttggccaggcacgatggctcacacctgtaatcccaacactttgggaggccaagatgggcagatcacgaggtcaagagatcgagaccatcctggccaacatggcgaaaccttatctctaataaatacaaaaattagccgggcgtggtggcatgcacctgtagtcccagctactcgggaggctgaggcaggagaatctcttgaacccaggaggtggaggttgcagtgagccgagatggcgccactgcactccagcctggcaacagagtgaaactccatctcaaaaaaaaaaaaaatatattatgtctcatgaatttacagcaagttttggtgagtgtaatggggttaaagtgacatatatgtgattggagctttcacgtgtattccttataagctgtcctacagagtttttttctgcaaagtcagaaagtgtaaagcaccatatgtttgcggcttctaactggcttactgtgtttagattgctcaattgcaaattatatctagagtgtgaagtgtcagtccttgtgactttcaacttgggactgaaatttgagcccaccattattttttcttcttatggctcctaacacttatgacatattttttcctcttggcagtcactgagacttctgaatccccagcttcaacccctctaaagaatcgctgcccattccatcattcattcattcaacaaacattactgaccacctactgcagtgcatgctagatactgttcttgatgtggttgtagcagtgagccaaagaagtaaaaatagagtaatagtattttccagagtgagttactattttatcaaatagaatatacttgtgtattcccaaatataccttacaaatttgatgaataactgtataaatgtttttgcatgatgttctaattttatcttatttagatttaatcccccctaaaaaaatctgtggattttattgatatttctgctttatggatgactataagtaactgaccctaagttatattgcaggtaaatagaagagttaggatttatgtttcgataattcattccaaacctaggaatttttcactatgcctttttcagcattctttaaatttcagttctttagaatttatttatttatttatttgtgttctggccccaagtattctgcatgaagctacagtacaagatggtattggctaagaatgcagattcttactcatattcaagtttgttaacctaattgtacttgtttctactgtaaaatgggtgtagtaaccatgtacctcacatgtttgtcatgaggctcaaaatagatgatatatatataagaattcatatatatgaaaacatatgtatatatatgaatacatatagatgtacatatatgaggagagcacaaagagctactatttttattatctttattgcagtgaaggcaggctgcaacattattggatcataaagcaattcagttttatttattaatattcaagtattagtacccagaatttgaaatagtctcatcacttattttcttttttcttttttttggggacggagtcttgctctgtagctcaggctggaatgcagtggtgccatctcggctcactgcaacctttgcctcccaggttcaagtgattctcctgcctcagcttcccaagtagctgagattataggcacctgccatcacacccagctaatttttgtgtttttagtagagatgtttcaccatgttggccaagctgatctcgaactcccaaccttcagtgattcgcctatctcagcctcccaaagtgctggtattacagacatgagctaccgcacccagccatcatcacttatttttttccttaaagatctctcacttccctgccctatttttaagtgtaacgtattaacatttatatagttgtatgtcttttacttaacaggtacacaatatttaaaagtgtttaggtgaatgaattttcaagtctctgttctttgaattttattttagtgctgcaggtggagaaattttcagcctgtgtttacctgagttggctgaaatggtttctgaaaatgatgttatcagactcattaaacaaatacttgaaggagtttattatctacatcagaataacattgtacaccttgatttaaaggtaacgtaacgtgatttaaagtaatgcaacatctgtgttcttcttctgctcttagtatgcacagttgcaaactggtattaacaggaaacaatggttggttcctggtcgtctagactgcactggtgtgctctttgcttacgtgtgcctatgtggccttaattttatattggcagaaaggagaagagtgcatgtgtaagcagctcaaattactgggctcttaaaatgcatcattcctgtgttctaatcctacattagatggaattattccattccatcccactcttacaaccacatcctggaccttcttattttaaaatgctgtctatctctgaaatgctcaattgtgtaatctccatctctgaaaataaatcctgctaatcctcatgcatttgctcctattaccttcattcatttttgtcttgaggttttcagtcttttggcttcttccagatcgttcaggctctttacccaagccccgaacctccagtctcttatctccatctctcatgttgttatcctttctccttatccttctttcataaccacacaaggaccttaagatctgaatcagtctgtgtctcattttttgagcattagattcttctgtttttatgtggtgtccttgcatgaccctttggcttctattaccactttaataataataataattcaaaaatctccacctacagcccaggcctctcccttaatttccaaatcctcttaccgctttttcaaaagaaaaaaccctgtagttctgttttgggccccactatggagcagggggacagtatttaccatctagtatccctgctatttccccaactgataaaatattggaaaagaagcaacacagtaaatgccaagataatcacgctcccaccagcttcctgttgggtcattttcctgctaacatcaacccaagtacattacatagcatcacatagcccttgaagtgggatggcatataaacctgtggttgacaacaacagagctaattacctttaccttttctcctgtaataggctctgtgctttagtaataaacaagcatgagattgccccaaagttaagcgactgttataattctttgcacagattttgggagcagcaccttggcagaggtatgggttatgacagcagcaggggactttgtaataggccgtgggcctgcagtagtagtaaagcaaagtcacgtggttttaggaggcaatggatgaggtgtactatgccctcttattgtctaagctaaagccagggaacagtcagacctggctcatccagaatcatcccattgtactgaaccatttttcatttctggaaatgtttacgttctcattcctttatgccttcttttgtgctgttccccagagcacctttctggtggtctttttttttttttttttttttttttttttttttttttttgagacagagtctcgctctgtcgcccaggctgaattgcagtggtgcgatcttggctcactgcaagctccacctcccgggttcacgccattcttctgcctcagcctcccaagtagctgggactacaggtgcctgccaccacgcctgatttttttgtatttttagtagaggcggggtttcaccatgttagccaggatggtcttgatctcctgacctcgtgatctgcctacctcagcctcccaaagtcctgggattacaggcgtgagccaccatgcccggcctctttttttttaaattttttaattttttttttatttaagagagggtctcactatgttgcacaggctactcttgaactcctgagctcaaacgatcctcccacccctgcctccagagtagctgagactacaggttgacaccaccgtacccagctacccagagcacctttctaaccagcatactctttaagtctcagcttacgcatcatctctactgcaaagccttcttggaatttcttattgacagaatgaggcagtctttttattactgagtattctatatcttaatctttccatttaacttcttttctcttcaaacctagaatcctttttgggtgtgtttttggctttatgcatcattgaataatagctccgcctaagtagtaagtcagtaaatgtttgatacatgactcaatgaaatgtataatagctgagcaatatcttccacttaatatactttccatctgagactagtatgcttttttgtatattacttatcatgtttttgttgtactttgtttagccacagaatatattactgagcagcatataccctctcggggacattaaaatagtagattttggaatgtctcgaaaaatagggcatgcgtgtgaacttcgggaaatcatgggaacaccagaatatttaggtaagaatttccttttattttctataccattttgaaatttattaagtaaatgatacctctgtagaactatattttagagcatgtaattcgattcagttaaaaggatttgattggttcaagtattttgatacattaaaacttggttaggttaagacacatttaaatgaaatgtattgaataaaagtatgaaacatttacagcaattcaggggacactgaatatgtaagtgtacaagttgaatgtttgtgtataaaggatttgtacataaggaaaaaagaaatgggtaagagggaagttagggaaaaagagaaaaatggaaaaagaaaaactgctgcagtgaagtggcccatgattgtctttgaagcctggctgttggctagatctcacttctatttctggtcccaattccagagctgttcacaatacagatatcttcagtttaaacttacaggaattgttagccggccacctcatttttgtttattgctgctgctttagaatatgaggttttgcatagggttgtgaaagtagggttttgaagaagagtgccaaaaagaacctttgattaggtaatctgggcatattgtgtgaaatcaacaaattagattatgcatatgaaaggtttttaagttgtatgaagcagtatataaatttgaagtattttaacttataatctttttacttttttctgtttattgtttatactgatgtccccatgtggacattgaaaagatacagttaaacagaacagatgcgactcagctaggcagctgtcttttccaaaaataaaaagcagagaaaattactaacttttgaatgctaactggggctatagtcctagaataaatgaatgtaattattggtaacacagctcacagaagtatgtgaaaatgtaggtggtttaacagaagctgactgtatatgatttaaaggctttattaataaaaatgttaggctttagggaacagtttctctttggagaaattatgaaaccatattgtgaaacaagaaacttatttatcactcataaatcctagtttggactgtactaattcgaaataatatggtaatgtttagaaagcatagagaatttattttgcacttttttttttggcaagtgaagacagcagaaaattaattgctttggaaattaggtccttgataatttaagaggaatgtttaattcactggaaaatctagcatttctggctgggtgcagtggctcacacctgtaatcccagcactttgggaggccaaggggagtggatcacttgaagtcaggagttcgagaccagcctgaccaacatggtgaaaccccatctctactaaaaatacaaaattagccaggtgtggtggtgcatgcctgtagtcccacctacttgggaggctgaggcaggagaatcgcttgaatccaagaggcggaggttgcagtgagccaagatcatcatgccatttgtactccagcctgggcaacaagagcgaaactccgtcagaaaaaagaaaatctagcatttccgagaagcaaaatttgctcatgatgtcattgcagatgcacatgatcctatttaccccaaaagaaaaacctaaattaatctaagaaaataatgcaaattaattctagagtaataaaactaatttttttttaaattctagcttccagagttttacttttttataattgtttttttctgagattaacctaaatgagtttaactacctagccactaattactccaagaatattatccatgtttttgaaccacctgatcatataatttactcaataatagggatgtttaaatgtccaatcataggataattaatactgtgctaaatttctaaatttctatcgtcttatatcactaggctttccaaaattaaatccagttacaatttttattttttccgagacagagtctcactcttgcccaggctagagtgcagtggtgggatctcagctcactgcaacctatgcctcccgggttcaagggattctcctgcctcagcctcctgagtagctgggattacaggcatgtgccatcacacctggctaatttttgtatttttagtagagacagcgtttcaccatgttagccaggctggtctcgaactgtgatctcaggtgatctgcctgcctcagcctcccaaagtgctgagattacaggcatgagccatcatgcccagtcccagttataacgtaatataaagtgattttcttgttttaaaatttgtcaatattgaatttaagttttatcttttctttcagctccagaaatcctgaactatgatcccattaccacagcaacagatatgtggtaagatgttgttagttaccttaaacatctttatggaaagttgggaaacgtatattctggggttctttgactccaagagtaataaataataaggctttcttcaaaagattttatttgaatatcattattatgctacaggaaaatatttacctttccattatttttaaataacacttaacttctgagccaaaagtacagaaattaataggaaaatctctctctgtgatgaaaactcagttgagtaaaagaacaaaatacttgcagtacattgctacatattttatgatgaaggtgaaatgcttaataagcatagaagcagcagcagacagtccattgccgggctccacctcacaaagggagacatctgatctaggtctaaaagagttggccgggcgtggtggcttacacctgtaatcccagcactttggaaggccaaggcaggtggatcatcaggtcaggagttagagaccagcctggccaacatagcagaaccctatctctactaaaaatatgaaaattagctggacgtggtggcgcgtacctgtaatcccagctactcaggatgctgaggcaggagaatcacttgaaccagggaggcagaggttgcagtgagccaagatcatgctattgcactctagcctgggtgacaaaaaaaaaaaaaaaaaaaaagctagaagaaggtatttgttaagcagaataattaggtcaggcccacccaaaaatgtacttttatgagagtacatctctgggaaattatgagttttgtagctagcccagagagaataccatagggaatagaaccagaactgatactggagcttcagttgagaccacaaaggggactgactcctcagaccaagtggaaggtttagacctgttctgtgttctgtggaactgctcatgggtttgcccaggaaaaaagatggtatggctaaataagttggtgaaacatgtactatattgtctttttctggctcctgggcaccagacttgccattaacacatttacagattttaaaaggtttgcagtgaaaaaatttgcctgcccagctttgtgcttcgccaaacttgcagcctctatttgtgcagaacctctctttacatctcacaagtcattactttgccattggaaaccacttaggaaatgctgcagcagctttgtgtactccacggcaggtatctgtgtgaaggatagacggtagcaataatatatattgaatacattgtatttatataacacgtgcattcccttgtgttctctttctgtgaggcacactttgagatcattattttagttttaataatataggaactttgaaaagcaatgtaaatctgtagtttaaccgtaccagttttgaggagaggagtatgttgaatgtcgattgtactttgtataaatgtttaaaaattaacatacattttaagttcccctcccttgtttttcaggaatattggtataatagcatatatgttgttaactcacacatcaccatttgtgggagaagataatcaagaaacatacctcaatatctctcaagttaatgtagattattcggaagaaactttttcatcagtttcacagctggccacagactttattcagagccttttagtaaaaaatccagagtaagtaataatttgtttaaatactattacaaatttaatttgtttaaatactattacagaataaataatatatacctattaagaaagtatattctaaaatagtataaaattattagaaatatgtacaagttctaggtaaaataggtggtatgagcaattattaacaaatacataacttcagatataaaatatacaacaggggattttgaagtaaagaaaagatttgagttacttctctcacaaaccactactaatccctgaaattacctaaaataattagtcatagaaatttacaatacacatggctggttatgataagactttattgtaaatgatttacagtttaatgattttacggccgggcgcggtggctcacgcctgtaatcccagcactttgggaggctgaggcagatggatcacgaggtcaggagattgagaccctcctggctaacacggtgaaaccccatctctactaaaaatacaaaaaaattagccaggcatggtggcaggcatctgtagtcccagctacttgggaggctgaggcagaatggcgtgaatctgggaggcagagcttccagtaagcagagatcgcgccactgcactctagcctagatgacagagcaagactccgtctcaaaaaaataaataaaataaaataattttacatacataacaagtatcatttactgattgtgaaatcttgaaggattggatgccctttgacaaccttacaaaagaagcgagtcagctgagcgtggtggctcacgcctgtattcccagcactttgggaggccaaggcggccagatcatgaggtcaggagttcgagactagcctggccaatatagtgaaacaccatctctactaaaaatacaaaagttagccgggcatggtggcatgcacctatagttccagctactcaggaggctgaggcaggagaattgcttgaacccagaaagcagaggttgtggtgagctgagatcgcaccactgcactccagcctgggtgacagagtgagactacattgcaaaaaaaaaaaccaaaaaaaaaccaaaagtgatttggaggttagttaagcaccgtctttcaaaatataaagacccactagctttactagtaactcatcctatgaacataattagagaagatcccaaaaaacattttctcaatattcattgaagcatatttataatagcaaaatgctagaagcttcaatgggcatctggttaaataaattatggtgtatccatatggaagagtactaaataatacagctgttaataaatatgttaactctgtactgatgtggaaaaatgcttgagatgcattattgagtaataaagcaaattgcagaaacatggagtatgtgaagctgtgtatgtgtatgtgtgtgtatatgtttgtgtatgtatatgcacatatatgtagaaaaaatatctggaagtgggattggggaatgagaaaacaattttactttttatcttcatgagagataatatggtgtaatgcttaaaagcacagacgataaagtcaaagttccacttaactaccatttacaagttaggagatttggggtaaatttcaagcctcctggtaccctactttgcatatctgttaaatgagggtaataatagtacccatttcatgagtttgttatgattgttaaataatgtatttgaagcatatagaatagtccctggcatataactaagcattcagtaaatgttagcagctattatcattattattctcttctgtactgtttggattttatactatgagtatgttttattttcacaagaagtaaaaaatatgtctataatctatcaaactgaagacattttcaacttgatttttagttctcaattttcccttggtgctttctttcaaaggaaaagaccaacagcagagatatgcctttctcattcttggctacagcagtgggactttgaaaacttgtttcaccctgaagaaacttccagttcctctcaaactcaggatcattctgtaaggtcctctgaagacaagacttctaaatcctcctgtaatggaacctgtggtgatagagaagacaaagagaatatcccagaggatagcagcatggtttccaaaagatttcgtttcgatgactcattacccaatccccatgaacttgtttcagatttgctctgttagcacttttttctttgactcatttggactgaatttgaaattttatatccactccagtgagattatgatttgtagcttcatatatgacatgtttatattgtaaatgcacttttccatggaataatttagggaagtgttttaatgttaaattactagttgctagcatgttatgatttcatatcctgagatagctctgcagataagaaaatatttaaatatatgacaaaaagtaaaattgtacatgtgagtttacatgttaatgaaataattcaacttcaaatgaacttaccagaatgttttgcatatcaacaaaaaaagtggcttgagttttattatagttggtgtaaactgaacacagtgaagacattggaatttaataggttctctctctaaggtgactcttataccatgcctctatcaacataatttgtttaggaaagcagtatgaagtttaagccaaaataatttctactttatagatgctcaagagacattttacagttgaaaatgtctttcaattacaaatattttgaaacttcgtaagattttcattctctgtggtctgttatatgagagagatcctttaactagagcaaagagggagttagaaacctgatcagggatattctttacaagttggagcagaggaaagagtagcatgccttcgtattttaacgcaaatgtctttttcctcctcccaacctacttgagatctgataaggtctggaagatggagatatttggtatgcaagtgtagagttttttaatcctccagaatttctagagtagaagatacttaggtatagttaaatattctgtatttttagtcaaacatatttattaattgaatatagaagaaaatgttgacacactcagacagcttactgaattttagatgtcttctgcatcttagaatacaagccagtcattcagagttctaaaagtatgcataaaaaattacagcaccggtaggtctattaacacagtgcccgagtcagcggtagcaagactgatgtgatcataaaacatgacatcaggctcgtctgaagttcttgtgtgaaattcctagtgagtgaggaggctcagcttaaagccatctgcagagtggcccctcattgtggtcttttgctgggaccaatgcaagagactagggagagcaaaatgtttgcttatggctagagactatatccagccctaatgatggggaaagttagtccttttcgggtaatcttttatgaattttcacctgatgaccgttatattggtttgttatcatgttacgataactgtgatctcatgaccatgttgctgtatcagaagaaatagtttgacaaatggtaacaacaacctgatgttccccctttagacctttaacttctcaaaattttggtaagtttccaaattctttaataataacttaaaactttttgaataactatcaggtcactttatttgaccacatggtgaattcctttaatgtcttcagcatttgttaaggaaaagttttctctacttgtgtgtgtatgtgtgcacatgtgtgtatgtacaggtgtatgtatata

SEQ ID NO: 121 - DNA, 2976 bp, Homo Sapiens
cagttttcaaaccgcgactgcaagcttcggtagtcctctccgctgctgtcgccaggagtcacttcacgagaagccaggtcacaaccgtcggcccttgtctggaaaagtaaaagtggatcctgccacgttcggagctccctggcgcctcgcccggctggagctagagaactcgtcctgtggcggcccccggcgtggggcgggacagcggccccctggagggggcagtcccgggagaacctgcggcggccggagcggtaaaaataagtgactaaagaagcagacctgggaatcacctaacatgtcgaggaggagatttgattgccgaagtatttcaggcctactaactacaactcctcaaattccaataaaaatggaaaactttaataatttctatatacttacatctaaagagctagggagaggtaaatttgctgtggttagacaatgtatatcaaaatctactggccaagaatatgctgcaaaatttctaaaaaagagaagaagaggacaggattgtcgggcagaaattttacacgagattgctgtgcttgaattggcaaagtcttgtccccgtgttattaatcttcatgaggtctatgaaaatacaagtgaaatcattttgatattggaatatgctgcaggtggagaaattttcagcctgtgtttacctgagttggctgaaatggtttctgaaaatgatgttatcagactcattaaacaaatacttgaaggagtttattatctacatcagaataacattgtacaccttgatttaaagccacagaatatattactgagcagcatataccctctcggggacattaaaatagtagattttggaatgtctcgaaaaatagggcatgcgtgtgaacttcgggaaatcatgggaacaccagaatatttagctccagaaatcctgaactatgatcccattaccacagcaacagatatgtggaatattggtataatagcatatatgttgttaactcacacatcaccatttgtgggagaagataatcaagaaacatacctcaatatctctcaagttaatgtagattattcggaagaaactttttcatcagtttcacagctggccacagactttattcagagccttttagtaaaaaatccagagaaaagaccaacagcagagatatgcctttctcattcttggctacagcagtgggactttgaaaacttgtttcaccctgaagaaacttccagttcctctcaaactcaggatcattctgtaaggtcctctgaagacaagacttctaaatcctcctgtaatggaacctgtggtgatagagaagacaaagagaatatcccagaggatagcagcatggtttccaaaagatttcgtttcgatgactcattacccaatccccatgaacttgtttcagatttgctctgttagcacttttttctttgactcatttggactgaatttgaaattttatatccactccagtgagattatgatttgtagcttcatatatgacatgtttatattgtaaatgcacttttccatggaataatttagggaagtgttttaatgttaaattactagttgctagcatgttatgatttcatatcctgagatagctctgcagataagaaaatatttaaatatatgacaaaaagtaaaattgtacatgtgagtttacatgttaatgaaataattcaacttcaaatgaacttaccagaatgttttgcatatcaacaaaaaaagtggcttgagttttattatagttggtgtaaactgaacacagtgaagacattggaatttaataggttctctctctaaggtgactcttataccatgcctctatcaacataatttgtttaggaaagcagtatgaagtttaagccaaaataatttctactttatagatgctcaagagacattttacagttgaaaatgtctttcaattacaaatattttgaaacttcgtaagattttcattctctgtggtctgttatatgagagagatcctttaactagagcaaagagggagttagaaacctgatcagggatattctttacaagttggagcagaggaaagagtagcatgccttcgtattttaacgcaaatgtctttttcctcctcccaacctacttgagatctgataaggtctggaagatggagatatttggtatgcaagtgtagagttttttaatcctccagaatttctagagtagaagatacttaggtatagttaaatattctgtatttttagtcaaacatatttattaattgaatatagaagaaaatgttgacacactcagacagcttactgaattttagatgtcttctgcatcttagaatacaagccagtcattcagagttctaaaagtatgcataaaaaattacagcaccggtaggtctattaacacagtgcccgagtcagcggtagcaagactgatgtgatcataaaacatgacatcaggctcgtctgaagttcttgtgtgaaattcctagtgagtgaggaggctcagcttaaagccatctgcagagtggcccctcattgtggtcttttgctgggaccaatgcaagagactagggagagcaaaatgtttgcttatggctagagactatatccagccctaatgatggggaaagttagtccttttcgggtaatcttttatgaattttcacctgatgaccgttatattggtttgttatcatgttacgataactgtgatctcatgaccatgttgctgtatcagaagaaatagtttgacaaatggtaacaacaacctgatgttccccctttagacctttaacttctcaaaattttggtaagtttccaaattctttaataataacttaaaactttttgaataactatcaggtcactttatttgaccacatggtgaattcctttaatgtcttcagcatttgttaaggaaaagttttctctacttgtgtgtgtatgtgtgcacatgtgtgtatgtacaggtgtatgtatata

SEQ ID NO: 122 - protein, 372 aa, Homo Sapiens
MSRRRFDCRSISGLLTTTPQIPIKMENFNNFYILTSKELGRGKFAVVRQCISKSTGQEYAAKFLKKRRRGQDCRAEILHEIAVLELAKSCPRVINLHEVYENTSEIILILEYAAGGEIFSLCLPELAEMVSENDVIRLIKQILEGVYYLHQNNIVHLDLKPQNILLSSIYPLGDIKIVDFGMSRKIGHACELREIMGTPEYLAPEILNYDPITTATDMWNIGIIAYMLLTHTSPFVGEDNQETYLNISQVNVDYSEETFSSVSQLATDFIQSLLVKNPEKRPTAEICLSHSWLQQWDFENLFHPEETSSSSQTQDHSVRSSEDKTSKSSCNGTCGDREDKENIPEDSSMVSKRFRFDDSLPNPHELVSDLLC

SEQ ID NO: 123 - DNA, 175221 bp, Mus Musculus
  misc_feature (1)...(175221): n = A,T,C or G
cgcccccatcatcataacaaccatctccgaaccagaagaagacaccctgacccaggaccttaaacgctaggaccggggaagaggaaaaggaaaggggaaggaggaaagagaaaggaagactaggacaacactacaattcaccaaaaactttccaccctggattctctacttttgctccatggacagagccccagccagccaagtttcagacagaccgtgagcagtaagtacgctgggcgagggctcccacgcggcgcctgtagttcgggaagccctgggcgcgctaagttccccggctgttctggggctctggctctcacgcgcgcttaggcgaagccgggaagtgcggtggagccttcactggcaacccctccgagcactccctacatctttcgcattcttcttaactcctctctgtcccccaccaccacctcgtctggactcgtggcgactaggcttctcccgcgtccaaagcgctcttagaggattctcagagcccctggtgtattaggggttcctttcatgggtttcagtgacaatgtgggcgccgtttcatcaggtgttttcccttcttccgggtcactcctccaaaattgaagagtatggagcactgctcgcctagggacctcgagaaaaactttccagatttagaaattaggattaatgaagcctgctcctgtacctaagaatcaagatttctttctcttatgttgtacgcttaatggcttaaaaaacaacaaccacatccaggatacgatgaagataagaatgctcccaaataataattgtgatcctgggatggagggtagcctttccaaatctcagagtgttttgggatgctcgctcacgtgaaattatagttaatttttttgtgtgcaaaggtgtgtgtttgtgtacacaagtgtacttggtccataaaggtaaaaggtggggattccatggatccattgatccagcttggccatccacagcgcatttatcaagcaattaatttgcttaaggacccgtgtaagtccttgctccctccctggcctggtgggacctctcgcccataagtacgctcctttcaaaaccctgacaccccaagtggggcttatggtggtggtggctctttatcaaagagaggataatgccagcgctgcccgcaatgaatggggtactgcttaaaggcttcgaggtccgactctgtccacacaactgagggctaactcttgggacctgagacagagcaggtcttagtacctcaagttctgggcagctttgggacctccagtgtttgtttggttgggacttgctttcccgggacccttcggtacccttctgcagcgtgggaggaagtttgtgtggctgcggtgcagtgctctgccactggcctgatcgtctatcacgtgtgtgagcggttttccctcttttttttttccctccccctttcctcccctccgccccctccctaggtccctgcgcgttttattgcgacctgccggtgggaactttgtctccaaatcggagcagcatggagcggcggagcgagagcccgtgtcttcgggacagccccgaccgaagaagcggcagccccgacgtcaaggggcctcccccggtgaaggtggcccggctggagcagaacggcagccccatgggagcccgcgggaggcccaacggcgccgtggccaaggccgtgggaggtaacagcccggagctgggaggtgcgcgcagcggaggcccagtgataatggcctgggtgtcagggttcaggttgattaggcgctgtttcggtgtaggattacaggaagtcaaatccaggttgccaaatagtgccctagttgcctctccgcaactggtagtagcttcatctcgagttaaaacaagaaagtggtttacccagagggtggcattttttgggcactttgccactctgtgctgaggtgttggcaggtctgtgtcacagccagctaactgtttctagattttcctagagagctctttagtgttttaactcctttgccttgcctcggatctgttttagggctgaagcttgtatgccttggttgtagtgggacagagacctaggatctggctagagtcgaagcagtgactctggtgttcttctgtagctgggacagggttgagacaaatgagtgacagctaggactgtgtcctgcagaagttctaggggaaaaaaccgaaggatcaccgtgaatccattatgtccttagaggatttgatgctgttttgcctgcagagtttagacggagccggttataactttgataggaattagagaattgggtgaaaaacagcaagcaactctatatgctgcctgctgcttccctacccaagaattaaatattattttaaaggaagacttttatgtttcagtacatctacacataactttcttcaatagtgtttagtaatcttacaaaataagaccagagaggaatttaaatactgtattttgggtttgcagggcagtcaactagctgtttcgtacatatgaaatgtacaactttacacagcattcagactgttttgtttgggataaattattcctttaattgtactatgcctgagataccccctcaccccagtggctttcaacagcagtaagtttaatgtaattcttaaacttggtgataaagtcccacctcccattcccccatcccttatgtccctgtttgtggtgaccatcaaattttggaatacatgcttagtttgaaatgtctccacacacctaagaagatgacacttttctgtttttaatgttattactatttttcttggtggtagtcattaaacacagcttagcttgcctcaatcctttaaattggccatttgtcccgagaagcagccttcctctcaatttttcaagttttgaaaacatgttttggcttctgtatagtcccatttagagatgtgaaaacatacttttaatgagacaaaaagaaatgaaaaagaaacgagcatgcaaacaaatctggcaactgcatggctaacttttcaagagtggggttcatgagtatattgccccaagaccagaacaatgacccgagcctcactttatggacacctctatgcacacaatggagggaaatccatcagagatatggtaaaaccaagcttcgatcctgactgtacaggctgctaatgtctggtgaggacatttttggaaatccttggaaaacacatattctggaagtcaccttttatataagaaaaatcgtggacttagtaatttttgtttccctttgttaatacagtgcagttcagctgcacgctctaagttcgctgagttctttagacagtttagagtgtaactatcaagaatccttcaacaaagctggcttctttttctttcatgtcatattgaactaggaaagaagttgcctcagtctgttgattctgggtccctttagtatggaacccagaatctgctcctttgcagattttctgaaattacaatttgcttttgaccactgattctaaatttgctacagataaaattaatgcctttctgaagaataatagatttcagtaaacttctctagtcagcaccttggaggcttaatttaatttggaaacagtgggtcctattagatgcctcccaagctggaagtaagataacagcatttgccttaatgcacaacatttgtagtgcttaatagtaaagggtatatggtggatttgtatatggtgggtttataaatattctttttaaaaagctttaattctcttatatttttagtggtaagcctagcctttaatggctgagccatcatctctccagcataaagctttaattctctacagcataatagattctttggaatctatctactttaaataaactaatttagaaaccttcaaaatataacttagaatatcaaattttgcagtgcaatgcttttttgtattgactgttaataattattttgttggcttcagtctataaagttcccaagtgtaagatgttaataattttatttctttataacttctaatcatgtatgtagactggaagaaagccaagccttttaaaaatgtatattttaaattaaaaaaaatgttcaaagtatatttctagttagaaattcttgtaattgaaatgttttcttttaacataggataagtataaagtaggttgtatttccaccattgtacatctcttgttgaatattctttgtaaaacaaacatagatagtcacaaaaatgtgtactgctgagccatttgttttcatcttcgggctattgcattgtgtccatgctgtggacatggactgtggacacagagtagtggggagcacaggcttgtttctcttgtgttcctcctgaaaattgtcctcctcacagagctagggaaaatcattacgttaattggttgctccgtaaaatagcaatttatcccaccgcttttgataagcaggaagagataaatgtttttggttggctgagagaccatgttctgctgctgtgctcctttttaaagagtgggaacttgttaggattttttgatgagctttagatattcataaaagggggggttagcattcttgtagtagagtctggtttgaaccagttacgtggtgaatgtcccatcgcagtctaaggtgttttaagaatcaacttagcgttaagtcagtgccctatgtacaatatggtcagccttagatgcccaatagcagctacactggttttgctctgtcttttctaacacctctaccccccccccccccggggatgtttctgttctttgtgttatattttccaaagcatggatatagtgaattggaagggctcggatatatgtaaaagtcagcttttttagaaggtcttcatggggaaaaaaggctaatatctctttaaaaaacatatgaaggctgggagagagtttagacaggcaagagccttgtggtgttgacagctttatatccctgctgggtgacattcacttactagaattggcgttccctctcagctagtaattcactccataaggatttgggaaaaggatgattaatggtgggggaatttatatttgcaggattgttgattaaaacttatagatctatttgaagacttagaagaagaagagattattaaggatgagttaactaagcatcagactcactcttttctccacccttatcatgagcccctaagaccggctgtgctgtgtggaatcctctcagccaggcaacccacagcctaaaatgaaagtggggccagggaagactgagaggagcccaggcttctgcctttcctcctggactgctgcaaggggccagccagctgtgctttaccagcagtaagtcattgtgcctcattcattgttaacacaagcattttcactttttagtgtttggcttcaagaggaactttcagacagctttatttaaactgaatgaacagcacttggctataccagatggtgtatttgctgataggaagcattaaacatcagaaatctttttggtatttttctttatcctaggatttttttaaatgctttcaaaaagtgtgtagtgtgtgtgtgtgtgtgtgtgtgtgtgtgtgtgtgtgtgtgttaaatgttctagtttggggtttggaatttaaaccttgagaatgtcttattgaaatacctgttcattttgttaaaaaaattgcttatttttgaaaaacattttgctttaaaaataattgggtttattggcgaactcctggctgaagttacgtcctaagagaactccctgaagtaggtggctcccttgcttccaggtctctttaagagcatagctgtctttttgcaaggggaaggaatcattatgcagtgcacacttgctgcattcaaacagagaacaaatgtgatcaagattgttaggcagggcctcatttagagcggaacatcatctactacaacaacagttagcttaattgtctacatgtgggacattgccttctccattaagagccaaagaaatgcggatcaggtcaggtggagacacaacattagctgtgggccagcaataattttacttctgggaagtagtgctaataggaaagaatatatatatatatatatattgtaatattgaaatatgtaaaaatacttagaaatatcattgtcaacccagggaagtggagagaactctgtgtcccaggataactatcataaggtcagtggcagttggagcatacgctgataggaaggactcagggttgcagagggaagacttccctacccatccacactgttattactgctttaaatggaaaggtttaaggtcttttaagaagagtatgaacttaggcttgggggtcatctactcgtctaacatgtcctctgtagttttgctgaagtagaaaaatagctcttccctaaagtgtttttagcccttggcctgttattaaaataaagacatacttggttaaaaaaaaatatatgcaatggaacgtacacattaaacagaacacagggtatccgcccctcaaagtcctgaatgtaatttggtgtttcaagtaatcttggaagtttcatgttccatcagcagaaacccgctgaccattatatagtgaagttctgctgcagtggtgtgcactgtgtgcatgcttgtgtgtgtgtgtgtgtgtgtgtgtgcttgtgtgtgtgtatgtgcgctcacccacccacgcacgcatgcttaaaactacaaagaagtcccttaagcatctgttttttaactggtgcagaaaataagcaataccttcatttcctgaaggccgtgtgactagccgaggtaatttgttcatcctagatatcctgtattgactctttctctctaattcctctctctctataggaagagaaaacagattaatcattatttataagatatcagagaatacgaatttgggtaattttaaggacaagggaatcagttatttcagtcaagactatagtaattttttggggtgccgcttggcaagagagcaattatgaggcttgatggttttactttggtgaattgaaacactgttgctgcttccccctcctctcctcctccttctcctcctcctcctgttctttctcctcttctgctaagcagcgattcattgtagcagcagtgctgtatgtgaatatacttaaaagctgtgctacactaacagagttagatacattccatattatagcatttcctttggatacatatatcatttgttgtcttttggcttctattgagataaaattgattccatttcttagcattaaaactaataatcccacatttggtattattgttttatttcagcttgccaaaagctgttcttcatagcaggaaacatataactcactaagatatttatatatttttatttaataagtacactttaaaaaactctctaagaaatgtatagtaacatagtaacttgtgctatctttcttacactgagactgaggtacaatggcattttggaacatatttaaagacagagcatttgacaaaagttgtatgtgtaacagtttgtcagtagaaagtgacaagcgggaaatgacaaatgaaatgttggcatcatccctctttattttgataaaaatgtctcaatttgcaatgatataatactgtttcatagtatttcgtgagttgtgggagatgcataaggagaatttagattttgtgaacgggaaattagcagcccaaactctcttttcagaagctttggcagcatggccctttccccctgctccccgagaacaggaacagcagtgaaatgttggattgaacccatacagtttaactcattattttttgaaaaaaaaaagggggggggcggtggctgggtaactgaaagtggtttccagtaggagacctttatacttagctgaggaagtgcagaagagtttgccttttcgcttccttattttctttatggcaatttgagaaggagcgattccctgctcttggctttgattgtacaggtctcctctccttccaatcatcacagctcttcagcagtcatttagcaagccagtcaggtgagctgtgaatttctcttgttttaaagtacaggaaaggttttgaaactgtcagagcattagaaacagatctctaaatacaaaggattcatcagcctgctgcttatggatgagtgattgccatttccagagccaaagtcaatgtctgaatgcaattgaggctgagctaagacaggtcagttgagggcttccagagggtttattttttcattttattttattccattttttatttttctacttttgacacaggtgtaacttctacattgtattgttctctcttttctgaagaaacatttcttccagtcttgctatccagcaattgagcttttatttctttcctttatatggacgtatatttgatgagcctgacataccatggcatttctgtaaaaatgtttcgcggtattggtcatggtggcttatgcctgacatagcagcacttgagagactgaggcaggagaattctgagtttgaggctagtctgggctaaatattgagttcctattcagcttgagccacatagcaagacgttgtctcaaaaatccacaaccactaacaccaaaaatatcctatgataaagttttcaaagtcatggaagaatatatatatatatatatatatatatatatatatatatatatatatatatttcaaatagtagattttttattaattgcaaatgataaattgtgatgaaaacaaggataattaggtgacacaaggtattagaaatgtcacctactctgtcttttcttgttatttgtgaagctttggttaattgcagattaacaacaggccagataaaaagctgtaaatgtctaaatctgtttagatatgcagttatggcaactgaatttagggcatgtattttaaaattattatctataacctctcaagccaaaataagaaagtcccggaatgagtgaagtataatgagacatgtgtgtaaagatcctaggatgaaacccagtaattttttgctaacctaaaatcatgataataataaaaaggcaaatcaggtccatattatacttaccagagcaatgcataaaataacagcagagcagagaaatcaaaccaaagtccataaagaacagtgtcaacagtttaaaccctgaaatccagttattagagagtcaaatcagtgtacagcaggcacttgcgggactgttggtctgatacagtgggataataaaacttctctgagaagttttccatttaacttcttcctgatgctgttacttactgtatgaggtgaagtgatttctcctcttaacttcttgccttattatcacaatggagttctgtcctagcacagttggttattaaactgtggtattaagaaaatactttttaacaaaagtaaaggaagaggctagcactgtttattaaagtacatgcattccccagctgtgtttgatacccactgatggtttcacagagctccgtgcccatctccgtttgcatgaagacttgtacagatgtggggagagatagattccagataagagagtgttttctaaaacactgaagtgtgataggcaatttacaagacgtacctgggaataactggagctacagcataggaatggtcacttacccttttcttccttgaaggtctttgcttgatttaggtccatagctggaagacaagtatatcagtactgtcataactaattgttttattttacacaagaaaaaatcttttctttccagagagaaccacacaactgcagagaactgaccaaaggcaaagagtaaaataagaaaccgtattttgatatttttctgattgtgtcagcacatgaaaatcaagcctttgactgctctattacttacacatataaagaaatccaaaattgatacttctgatagcttattagaaaaatgcattcatataaaactcttaaaattgctgtgtttttgaagcattatttttttgtttaatagaacaaaactttcttttgtcataatccaaagatggtaacagagcctcatgataaatgtctctttaagtgtcgtagtaaaagaaaatgacttgccttctgaggcagtagagggtttatgttgttttggacccatttccaagcagtgatcgaaaacagattacaataacaattatacagtcagaagatgcaatatccatttctgctttaattgagtgaaggaataataaaaacatcattaagaaaaatgaggtggacctgtcacacagtgtacaaatttttagacttgaagacgatgcagaataaccagagtgcttcttgttttctgtggtgtttattagctgtgatctgcattggctgtccttccctgagaggttcacaaaaactcctgtgggagtgtgtgccctggcaccacaaaggtgcacttttgccttagggtctgacatgttcttgagttatacctgaggtgtgaccccctcagcctctttctaacctgtggggatatatatatctacagaattggcagcttgtcagtagtgcgtaagagctaagtgaggtaccagccagcaagtctttacaaagtcctcaggaggctaaactggaaagagaaggttgaggcccacccatacctgtcttctcccctgcacatacgagaacctgaacttcctcgttttcatgttatcaccttgtcactttggtagaagtagagagttaagactgtcacttgaatacagagcatctgactttcattctgagttctgtaaactattgcatatatccatttgtcttttttttttttttttaaatttgaggtgggttctcagtgtgtagccctggctagcctcaaacatccccctgtctctgggattaaaggagcacacaccaagtcccacatttccataattgttaaccttgttgggctgggctaacagcagccattccgcagtccacacttctctgtgggacagcagcagacagcagccaagatcactggctaagttttcatgctgagttgctcttcttactggaaaacttcacagttcctgaacacctggccatgacagtggagtcaggccccagcggcctctcgcagagaagcactgaggctcaagcaccggatgtccctagcacttacagcccaaatttgcactcagttgagaccctcagaagggaccttttaaaaaaaatcagttgttaaaacattttcttggtgccattacttgaaaagatctttctgtgagctgcaacataaaggatggaatgggtgttatatcctgtggtggagggcccagagaccctggtcagcccagagatcattctttcagaagggaattcctattgaataatccaaaagagcttaacatgtgtatgccataaagagcgtttagttaataacaccttcattaaatagcacctcaattaaacctttgtcagcaaaggttcttttaccttcatattcacataacctaacagggctgagctttaaggatctattagtggttctgttttttctgggctttacagtttgagcctaaacattaattctgggtggaacttggcatcttgtctctttgcctcagagggaatttttgttgtacagtaaaaagtggtatttctttcacgcaaccaccttctctgagtttccccccttttctcctgagcaaaaagcaattaagtagtcaaggttttaagagtgtatctttaattttaaaaacagaatgattattttaggtgaattaagcaatttttccattagttcacattgtaaaaaagaatagaaaagggacgcggagtcaataacgcaaagaaagtattttccttctcttcttctcaacacgaaacccatgaattagtggctactgttttagatgctgagagttaagacattttgttttatttgtgttacctgctattttaacactgactgaaagaaaggaaaatcgattctctgtctgaaacaactgggcttcccaaccttatcttggaaaacatacttccactcagttgttctgcgatggtcttttctgtcgcttgttgatactgtgttaggattgggttgttacaggcatctgatcacatagaaatggaaagggaaggatgtaggttatcttggtaggaaaactagcaagttcccagagtgtcagtggctgtgtggtccatggcagagcagtccctctggagacagaggtgggctgagtcggctgtgttggacagctggcctcctcaggtcaaaaggcatcttcagacaaggttctgtcttttggatctggcggtattggtatcaggagccctttgttgagggagcctgaggagaacaggttgtcctcgagatgggagttattccatgttgaagaccaggtgaagtcacttttcaaaagtaaataaggtgattctgatttttttcctgcccctctcaaatgaatgtctaggtaattttcagcacaactaactccgtttatgagctcattcatccagcaagtttgtgccttaagcacatttttatggttaacttatacctcccaccccaaatgggagcttactattgaaagtctgccagtgatcattagttcccaagagatttgggagagaagaagaatgacggggtctcacctagagtgagaccgtttgtgttgacattttgccaccatgggaagccagagtcaacctgaatgttcagggtgactgtgaactgtctgatagagatgtatgggattccaattagaacagggtcaggataccaatgcccctctcttcatgctgttcccgtgcttagtggaaaacaagctgcaaagtaaatcccttggccctccaataaaaagatttatagcaaaataattctcagccccataatgggcccgttgtaggtttgtgtttgatatttgtaagactgaaatacagtccatgttcccaaactaagcatttattgtaaacaagttaactgccaagagcttctattctgtcaaacataattatattgaagattgatgtatagcttgaaagcaaggttgagagagacaattcctttccatgaagggaggcctctgagactatgctctctggttctctgatagcaccacttaggaaagcccccttcctcacaggcagccttatgtagaataaacacaggcttgggcttgaaaatagacctgtctgtctgtccttctcttaaccagagagaggagctagcactcacaggagctggtatgagcaattctcgctcatcatccaggtttggcagccgcgcggtccagagacagactgcgtgctcttccccaggctctgcttcagtgtgcccacaagcctgcaccgatgcttataagccaaccccacaggaaatccttctttccttaatcctggccttgcctgttggctattttgtgttattcttgtgagattagaattctttggaaaccatagcctcaaggtgtggcttgctaaaatacttcagcgtgaggtttagggttgacttcagaaaagaaagaatttataaatctagtagtctaggggaagtgaaatctttttgaggtgtacatatctggaattatccccagtttaacattctttgcttggagggaaatagaatttcattattttgtttagggcaaggacatcttactttttaatccaggaaacatatcatcttagactttagatatatttcggttaaaacaaaagaaatcacattcctcttttgattgagtggcagcctttgattgaccatagtaagggtgaaaatagtattttctagctggatgtggtagcttatgctgtaatcctagaacttggaaggcagaggcaggaagattacttaaggtttttctttttcagggaggagcactgggggactagcctggtctacctagtaaataccagggcatccagggttagagggtgagaaacatatctcagaaaaacaaagcaacaagattttcagtgggtttcataggtggtgactttcacacagttgcctagttttaaaaataatcaaatttaatgtttccttttagaaatatgtagagtataaagagaatgtcttagaatcacagagagaaataatagtattctatttttattaagtaattgctataaattacactggtgtgtatatagttaaaagattgtgtcagggaagtattttatcagaccctgtttccctggtctgtgtttattaacttcgtctcagtcacagtaataatgacctccatattgtaagccagagatctcattgtccctggagggagctatcagatgcccactatgatgctgagtttttgtagtctctggtctccctctttcccccctttccaccctccccatgtcagagctctctgggacttgctccctttccctgtccacaggcatttgatggatatgagagtgagggtttgggaacagggatgctggttgcctatccactgagatgcagctgtgtggaatctgcacccgttcattcagtgatcacttctttacatttctgttagatatccataaatgttttactgtttaaaccctaaacatagtattttcttttatgagggagaaacctttttttttttttaatataaaaactttacttttcggttttcattcgataaaaatctttccactctcacatgatttcctttgaggctttgcaccagtgtttgatctcaatttttaataattttttttgagttaaactccccaaaggaaacatgcttgtgctatgaaatattcccactagaaatacaggtagtcctaccttattgagcacttgattcctgtattaattcctagcttgaaaaacctcaacacagttaaccttgctctaacactacactggaggaattaatcaaaaaatatttttttaaaaaaattgtttgaattagataaagtaatatttaggcagagctcaaaacctgagataatgaagcaaatagtatagggacagtttttatgacccccttcttttgaggggtgggactctagtgaacagttgctgtagacagagtattgagaaggggctgagacaaatgtgtatgcatccttgtaaacatgaacacggcttaaaatctaccctgtcagaaacttgcagaatcaaattgctctttgtcaggagacaagaatccggatactattgaaatttgctataatcacttttaatacatcattgactcttttgatgggcatacttcaacaactgtttaattttaaacttttaattgttcagttttgaaataattatcttccagcaatacgccatgggcttgagcttttctgtaatatccagattgaaaggaggcgttttgctgcaatgtaggccgtggtcctgctgaccaattgcctccccaaacctgaacctggcgattggtgtttgtagcccgggagtcccaagtcatgcagccttccggtcctcaaacagaacccacagcagtgccttatgctgatatgccagcagtctctgcccactgtggacacgcatcgccgcgtggtctggcgagcttcctgtgcccaagggaaaagcagctcgtgaatccacgtgtctgtctctttcctagaaagcacttcctgtgacctgatgctcactaccgtgtagggggcccacagtgatgctgagcagtccacgccacttattaaagaagatgataagtgtctaagtggaattagcattgtgttaaactgaaccaacgtttgttttggacatcccataggccaggctttgaggtggggtgtggcggggggggggggggggattgtcctaaaggtgggcctctcccctgaggcagccacaggctaggtgtggctgacatccggggatttagttgccagggttcagctgggcctgcagcggtccctggtgtcgctcattctttgttatttaggtaagttaccagagccgtgcctcctgggctcctatgacactgtggtttcaaactgccttcaaactggagcctgccactgaatttcctagcagttaagcagccctgatgtcagattgagttacgattcctaaacttgaggacaggtctggcagcggatgaatgtaatgctacaaccggtccttctttcggctattttgaggctcccattgaatctttgagaaatagtgttcactctccatacttctgtctaaccctgcacttcatttctaaggataggatctgcttccgggctgacaaagcaactacttttaccacaaaaatcttgcctcatttttaaccccttgtgtccccagatggtgagagggcgagagatgcattaagagattttattgttgaaactttacttggtggcggggtgtgtgtgttcagtctgaagtcctggtggagaggaaacctttaggtttgcggctttgtttgtctttgcctgtttctttagagcagacagtaaccttccctctgtggccctccaccttcctgccatcacctctgtgtgagggttaaatgaaatcaacagccaggaagagatgctggtatggaggtatgtttgagggagtctcaaggcccccagattgacctgtgaacttttgggtgactcccttatcctcgaatgacacacttcttttacacctacaattgatgaattttttttctactttttttttttaatactatctgacatttccccccaattaagtttatttggaaggaaatatgaaggtacagccctaccatgaacagtccagtcatccacagagtgcatacagtggccccataacgttacagcctgcagtgctgaggtagccattttaaatctgtgtgagtatatacctgagattcacagaaggaccaggagtacttttttatactacatcttctctgttaaaggaggagatggaggcctttccatagcaaaatgaactgtctttgaaacaaatgttgctggagattgaactgctggccttgtgtttgctaagcattctacccttgagctctatccccaccccaaaagtgtcacctcctttatcaattaatctcagaaaatttccacatcatcccctgaggacggggagtatacggcagctgggtttggaatgtggctgtcttaatctcagaaggctgggcctgagaaagtagggaggcaaggacagggccaaggcgagctactactctaggaaagacacaacttggttaattttgaaattttgtttgtggccccaaccaggaggtaaatgatgtgcacatttgttttctgtttccggttatgattcttggctctcaaactgcactttgctgttttagggtaggagaaaaaggatagaaagtaatgttgctcctgctctccctctctgtctctgtatgtatgtgtgtctgtcagagagagagacagagagacagagacagaaggagattatacaaatactttcatttttctagtaaattgtaataggaaaaagatagcctgccctttcgctccagtctttggagaatagactgtattaagttggcttcctgaatttctcccgtctttcttgggcttggtgtagaagttatttataatggaggttgtggaatgtggtactttgcttcaggttcagtttatgcaaagaacggatagggaggctctgtgcacagcctttgtatcttcagttcttctggaatcttaggtgacagatagtgcgagataaactgaggagtggtcctgtggctgccttcattcctgaaatgggtgggttttaggagccacagggaggacaaaggcaggcctgctatgacctcaaatagctactgcccttcaggttgctgttccaagaatgaaggtggactcaaaagaggacaaagggggccaggacaagggtggagtctggcccttcagagtcttttctcattttgtctgtagtgcctgaagagcagatcatttctgaagtcattccaagcctcgcactgcccccacaaatgggggtcctcaaaaaattcactgattcagtagcaccgccctcttggaggtacagcgagtggaaagggttgctagctaatagggcaagttgttgggtccctgtgggtggagtctgggatatattctcagaggagaatgtggggtttagatgggccgagttgttgctctgcctcagctgcatcattttctggtcctttcagacgcttcatttattagctgaggtcaatgaggaccttctcaggtggtaaatatgaggaaaaagtacaggtgactcggtgggtggggcgattccacccagctgaggtggcaacctccagctgtgatgatcctgtgcttcaggccaatcttccatctctccgggctgaggttaaagcactcagagagctggagaatattctagttcctctccttttgcccatgggagcattccttgtagctcaggaccaggaaaaggaagtgggagagcttagaaaagacgtaggactcccactgttagcaatcaagtagctgcctaaggtttgctaggtgtagaagagaggcaaacaccttttactatctgagataaacagaatagcttttgttcttaagttacctaagatctagaatccaaaggagagatcctcacgtatgaggggtggggtgaagtgctcaggacgatcacgtacttccatgtcttagtatcattttttagtgagttttttctgtgtgcaaaaagccattgtgtgtgtttgtaatttggcagattgcttgtaggggcatattatctcacagaaaatataaggcacatgtgtgatgtctaacagccacacttaaaacaagctaaaaaaaaccaagtaacaattttaacaatgcatttaattcagtttgttcaaatattatttctacatgcaattcattttctaacaaatgtttataatacatttacttttgttgctttttttttttttggtagtaagtcattaaaatcgagtgtcttttatacttaacacgggtctcagttgaagaggagacacttcaaggccatgctttttgctatagagcatgttgaatgctattggttattcttgtttgtatgataaaccatacagtgatttctagtttcattaggttatttggtgatagtttattcagtcactattagtgttatttttatttgaagaaatactttcttagtgtcctgaacattgcttactgaaaagtattgaagaaatgattgtcttttttccatctgtaaaatggcattgatactcatatttaaaaaagaaggctagataacattgtctgagagctggctgacctagatgtattgcacgtgcacatgcacaccacacacacacacacacactcacacacacacacacacacacacacacacatcatttgcatgttagctgggagaatttgagtcttagagaactctacatacattatgaacagtcagtgactcaggcagagtgaccgaagcaggattgtttgactccagggccgactgcctgccaccccagggcttttcagaacatctaactatcttcccaccggtctgttcacatggccgaggtggcagtacagaggctggagccatggctctttaggatgcatgcccttcttcagaactatgacaatgaacatggctgttccagccttctaacagatgacagcagggaagcacgcttctctaggggagagagccccgtttcctgtctgcagtgacagaggacagcatatgtcctgcttgcctgaactagtcatgatttttagtaaatggctggggcccaagtgcctgtcttcagattaaactacctgcctacctccagcaattgtaaaaggcttaacaaggcttatgatcaaaaggtccaaagttctccacttgatcatctggaaatgggtctgtgccacaataaaagaaaaataatgccgtaagctcaaatacggggctggagcccgaggcttcctttattctctcgtctcctttagaacttgtaactgtgtttggctctctgctgctgcttctttattgaagctactttattcttgccactgttacatttatttttgaagcattttgtaaattccctccctgtcctcttctctattcttcctttgccagaggacagcagtgagactggggaggagtcacttccttgggaggtgcacatttcttcttgccctgtgtaggcttccctggggtagacctgttttcaaaggcttttgagtcctatgccttaattttcacgtcaattataccagtttgctatttttcacttatttcaccattttcattagtaattgcatcagtttttcttttttttcttttcttttttttttccttttttttttttttggtaaaaacagaattgcattataaagccataattgttgaatcaatcaagtactagtaaaatgattaatttttccaacaatggaatacaacctattaccatatctgtgatcctgtgtgtgtatgcctgtgagcctgtgtgtatccactgtgtgtgtgtgtgcttgagtgtgcgtgcacttgttcgtgtgcatgctaatagagatttgaagttgatatcgggtgtttcctctgtcatttcccaccttactttttgaggcggagtatcccatcgaaccaggagcttgtcattttggctaagctggctggctagtagtccaggatcctcctgtctcttggccctcactgctgcagtcacagaacacatgagtcactgtgcatggctttgcattgtgctgggtatctgaactgtggtctttgttcttacaacaagcactcatccactgagccatcttattttttaggtaggtgacccaggtaaggggattggtggttgcttttgactagaaggaattactgctgttgtgctagccagcagttgttccctccaatcacaaactaaaatgtttaagaaatatttttcccaaactgagagttataaaacatcagtttcttacatgttatagacacctgagattttatgttgtattttgtatttaactagttgtgctgttactttgaaattaataggaccagtcccagacttacttagtcatgggtgaatgctagtttatagagtagctagattcatttaaaggccttatctgtggtccccagatgtgtgacatgtacgtgttgacattaggaactgcacatggattttcagcactgaaacctctgtagacacaggtattagcgatgaggcagcttatggcactgctggctacgtggctgtgtgtgagcatatgcttaaatcactagaggtagcaacgagcctgcttcctttaacaaagattatataccagtatgtaagagttaaaaggtctaaatggggctattccctgccgggaagggctctcctggatgggttgtataaaatgccattatgcttgcttaggaaggttttacaatgcttccagctacagtgcgggcagaagccatagcagacttgttcttacctgtatctatggagtgatgggtgatacctgacacatagtaggtgcaatcaataagtgctatacaaaatgaatgatgaaaagataatgtgagagacatctgatttgtactcttcgttatgtatcttaaatatatttgggaataacctcccataaacaaataaataataaatacttcacagatggtaaccaaggaaaacagcactataaagcactacactaaatcatctcctttgcctaatgtttgagtcgtctcactgccaccttgcattttccatggttctgtacgatggatgagttttctgtggggagtaatgatggagtcaagggttgtcccaagtgtggtgtggtgagacgtgttgggctgttgctcaggcttaataataattaccaagatctttaatgataacaattcttaatgagtattattattgttaataatgatatttaataattatacccaatacttattatctttaataataataattagcacatgggaaccagttgtaccattgtattatctttagaacaaaaccctgagtctgtgggccaggagtctgcaaaagtgcctgcttttcgcctctgctttccagatctcagtgagtcaggaggcatctggggtcagagcagggagagctgctggaagccttctatacatctgtgccttgggcctatctatcctcagtcaggttatagaggccttgttttcattatggagtgcctggaccaagtgctgtcacacttcccatcctccctctgcccgcctgtacatcctttataacgtttgtgttttgttgcccaaaaaaaaaaaaaaaaaaaaaaatagagaatgactcagtgcagatcctccttccataatgtactaatttgtgtgacttatgcagggcagagtccatgtttattacatgtccattggtaaatctttgatcttcttttgtcttgctgtgtttagatttacatgcctgtatgacattttctaaaaaaaaagttaaaaactgtttggtgaattaaacattttttaagcttttcacactttgatacaaagcagagaaatatttcagtgacaaccgatttcaacagatttttgaaatagactaatttgctttattctttagggtagtttatttatttatttttttatctgcaaacattgaaaagtattctgtccagggataactcgtgttcatgtataaaataattccaaggacatgaagtttgcatttagctgtatgctttatattagttcaacattagttgagatttttctgatctgtacttttttcaagctaacttgggttgtttactgaatcctagaagaggactgctcttgaattcctgttgactttcctgtatacactcacataacttctcaggcctggaactataacatgcctccctactgggtgctgtagactagcagcatcgaaatacatttctagacaaaaccagagatgacctgaaaatactagtgttcggccagcctaagaccgcagacattaaaggtcctaaggtcacctcgacctgggccacatgctaagatacctccttgtgtagctgactttttaatcactgtggtttgaggtcttttgccccagtcctcagcaatgctgctgcaacaggactgtcattatagagaagatccattctcctctcccgaagccttgcatggggcccataaccatcaggctgctcaaccttaactgtgtgtgattctagcctagtaactttgagagctgtctcttcccttcttttcctatggctccaactgccttgtaacaccccgttctgctgtctgattgtgtcctcctaggtttgatgattccagttttctgtgtggtggagcagttggatggctctcttgaatacgacaaccgagaagagcacgctgagttcgtcttggtgcggaaagatgtgctttttagccagctggtggagaccgcgctcctggccctggggtattcccacagctctgcagcgcaggcccaaggtattccttctctctttccttcttagcctccgtgtgacccagggaagtattggtttttccaaaaggggctgcaaaacagttgttggacgctgcacctgacaccaggcctcagaaatgttggaggatcttgttttcttgttctgtgaagtatttgtccagtgccacaaaaaccaaccagactgacttgtattttaaagcaaccgtcatgatgtttttgcatttgtaattttgttattttgcactaagtcagcaaattggtgttttcgggttcagtgctgagatatttgccccgcccccccgcccgacttatcccaactttaatatatggtttctaagcataagaaatttatttgtttactgccttgggcttatggtttctgcagtttggcatcaggttttaattaaacaggaatcaagttgcatcttatgcttttgtacctttgaaaactgttgttcagtcttgatgtggtccattcattttaaaaaatcagtttctttgtagtcactcatttttacctattcaattaactgctaacgttgcattattctgttgataatcccagggagcttatgtgcactgctcttgtttttttctgaagcatactctattgttctgctatgccaaagatgcagcaaaacaaataataacaatattcctcaaaccttgactaataggaaaagaaacttgagccagtagaattattgtccttgtatttcaggtgaagtgactgaatcacatagtttttggtaatagttttaaataaaggtgagaaattcataacatccctggctcactttatatgctaatttcttaccatcatttgtattaacattgctgtggttcccaagatttcttcgtatgccttgagtctggcttcatgtcatcattaagagagatcctccagctgggcagtggtggtgcacgcctttaatcccagcacttgggaggcagaagcaggcagatttctgagttcgaggccagcctggtttacagagtgagttccgggacagccaggactatacaccctgacttgaggaaaaaaaaaaaaaaagattacaaggggagatcaggtattcatagagctagtcatgcagaagcctatgatgtaggacttagaattttaaggtcttccctttgattctatatgcacattggtgctttttaaaaggtagactttgtttaaattatagagtagttctaccagggtggtcaagcatattttcccaggtgagtgtaccctacatccatgtcctgtcatcttagtgcagaatcctgcccttggccaggctgagtgcagagacagcagctgtactgtggagtccaccgctttcccagcagcataacaaagggtggcttccttcttttccttgaaaactttcttcctgtgtgagggattcaggatttgatctccaataaattgtatattggacaccactacttttatctcacatgacatgcccaaatgaatgaaaagaactgttgcccagtccctgtaaactttgatgtcggttcagggatattttccttcgaatgtaaaggtcattgtatcctaccgcttgcatcctggcatgctggcttcctgtttgacagggctatctatctcagttagcatggctgctcggtacatcatgagatcacatgtggaacacgaagcactaagtggccaagatttgattcttggcacgagctaaggaagagactctcagggaagctacactagggagccccattgactctcagtgatgtgaactgagaggccccactcacaaagatgagcctggcaggcaagcagtgactgttgtctgttgtggagcataaggagggggtgagccaaaagtaaaataatacatattacatatatttatagatacttttggttaagttgaattaacttatcaaaactactgtctagattatgttgtgggaaaaagaagttttattaacataaaccccacagacttacaaaaaatattatactttgcttgtttttttcttatgctgatgacctgttttgaataaatgggaaaacttagaattgttcatattttttaaaagatgtattcttatatttaccattctgatgattagaaggttaaatactctattatggctaggtggaaaatcttgaataacatttttggaataagtatattagatctttcttgtcattcagatggttggaagatgtttagggtagatggagaaacagggttatccgttcctctgaaaggctgtatcgggtctcaggagtcactgaggtgaaggggagcacaaacccactgcctgcatagcataacttgagtggcgtgctgtaggagtcaggttattcatgaattggacacacagcacagccagtttattcgacaaggagatagcagcaaatatggtgtcatgtgacgtaggcagaaggctttatgtacgtagtttctattttctttgtttttttttttttgttgttttttgttttgtttgttttttttgtttttttccccatgcttttgtaattttcccaaggtagggagtcaagagaaccttctggccagggcaccgacaaaggagctgctgcggtttccctgagttttgtcttcccgtgctggaagtgtgagggagactcgagctgtaaggatagtgggtgtttgtaccttttggaaaagggtttttcattttgacatgaccagagaaggttctcagtgactgacttagaaaagcagtataagtgcaaatatgtctgcaatgtgattttggagtgctgctcccaggcagggctgtacccatcaagtcccaatcaggggcttgcttacccatgctcctgtaagcacgggattgtcaatttccttctcggagagggtattccctccaggtgagctgcaaagatttttacttatttgtttctaaagggtaataggaattctactgaaagagagtccagggattccccggcccacgtttgcaaaatatttatttaaatgctgaatattggcactagagaaaaaggcaccagacactgtcataaatcatgggaacaatgtttctagctgacttatagtttccatttaccaagacaccactaactatgtgactctcaatgagatgcagggttcatctgatctgctattgaacatatgtaaaaagctgaattggtagaagtaggtctattgagcagtgcacacacctgcattgtctgatacactgtgagctcatgtctctgtctcagaggtcttagagtaattgaagagagaatgtggaggatggtcagagtccccttcccctcatcttaaacttgccattctttttattctttctctttgaaccttttgatgttgccctgtgaggttttctgtgacatcatgcagctcctgcactatccagagattctttaatcattggtcacccagcagtcatgtttgcctacaggatggctttgggaggagacagctgctgtcccaccgtgcttgggtgtcttaatttgcaaatggtcattttatctatagtgctcttccctcagtaattttcaaaataaaattaattaaaattttattttatgcatgtgagtgtcttgcctgcacaaacgtacatccaccacctgcaccttagtgcctgtagcagtccgaggaatgagattccctggacctggacttatggaagccaccatgtgggtcctgagcaccgaacccaggtcctggagtagaggagcaggtgctcctaactgctgagctctctctctaacctcgaaatgtgtgcttctgtctggtaaattttatttaaaaacacactaagcaataagtaagcgacagcccccccccaaaccggttgtctttgttgtcaagctgcatgtttcaaaaggggtgcactaatcaccgtttctcatttatcttgcaataattacatttgtgaagtcatttgaaatgattttttaatggcacagaaaattttatttagtaaatgttatgtgactcaaccatggtgccacatagcctcgattatataaaatttcacatatgtgcagagaagaaagacaaacaaagaacattatctgtaaatggtgtgggtgtaggattatgtaggattccttttcttctaatgagatcgaaagtaagtataaaattctacttccttcttaaattctctgaacaagtaggaagttgttacttccatactcccatgttttgttaagtagttcctttgttcctatctgtaactgggacactcaaggcatcacagagttacatctctgttgccttttcctgtgggagattaggaaagaaccagcctgctattttcaccattgggaatgaggtaaacaatttctcagcataatgatgctcagagcagttgagcaagtgctctgttagactctgctgagagatgcggagggcttgggtcctggttcagttaggcagcacagcagccctgtgaaggaatgcagttacccagggttttccattttactgaagaggaagttgaggcaaaaaaagagtaggcagccattctcgctggggcctaggctgataggtggggacccgaggtgggaagccctgccggctctgaacagggatgaaccttagcagatgtagagtcaggctagaggtcacatctcactgatatcttccctgcagtgtttgccagaagcagcttttgggtagtgtgcttcccagatacacgatgagtgcgcgtgtgcgcgtgtatgtgtgtatgtgtaggcatgtgtgtgttttatgtacatggttatgcaaattcagatataggtcttgcttccgtgaaaaaaagaaagaaacatgtagagatactttttgaaagcattggctatacagtttatttattttttaaccacagcattattttttgttttatttagacaagctctccctctattccaggctagccttgaactcccagcagtctttctgcctgaggtttggggtgctgggattataggtgttcaccaccacattccacagacttctaaaactaaataaagggcatcattgtttcagataaataattccctaaggtcaaattgaatcctgatttgtaaataaaacatgtttcttaacaattctggcctacgtgttaataaatctctctgtgtctctgtctctcttttgagataggctttgtctgtgttgccctggctgtcctggtactcactctgtagagtaggctggccaaccttgaactccgatctacctgcctctctagtgatgggattaagggtatgtgccaccatgcccagataactccttgtctttaatgcctgtcttgagttagtgccgtttcagcttttggaagtaaagaggtggaggggaaatgctattttcaatgagtttacatgtgcttgattatagtaagcaatgaaacatgtagaactactcaggtgatttttgaccctctgagctcagaaatacaccacagtaatattgagagactacaaatatatgtacaacttatttgttagtctggtgctactttacttagttttaaattcagtttagttattaatattataatatttatttaatttatttatgtttggtgcttagttcagcggttactctttaaaaatttgcaagagttccttccagtctgttgttggaagtaggtggcaaagtgggacacaggccttgaaatctttgctccaatgtcagttccttaccacgttttcagggtcttcctctctggctttgttttttaatgtggtagagctcttcctctttcaggcaataagctggcttgggctgacatcagtcaccagcagtcatttggaagaatagacagaagaacctgagctatttacgaaggagcctggagaaatgtgtatgccctaacgtgtgagcttgctttcttcagtgggtagatctggggaagctggaaactcctccattacctcataaacgacctaaggttcacagtacagtgtgagactacagttcagtgcatgtgctaaatggatgaaagcaagttttgttttcttatttaattttaatttttacatctacttatttatttttctgtgtgcatgccatagtgcatggatgaaggtagaggacaagtttcaggaattgatttttttccttctaccttgggggatctgggaatagaattcaggcgatctgacttggtggcagtgatttttcctgctcagccacctcactggcctcaaacatggtttttgaattctatactttactaaattttatccacaaaggattttttttctctcctgtatcatgaagtccatttcattcatgatttagctgttaaagtcagaaatggaatgtagttaggctctttgttgatgagcctgtgctgagctattcaaatcataagtcatagacatctataaatgatatatgctggatattttaactaagtccttttgattgtatgacttttgtttacattcacatttaagacatcctaggacttttatttgttgtcttgattctctctctctctctttcagctaaacttagggcaaactttgatcctaaaatttcttcagatagtatgatttcaaaggcacagtcagtgagctcatttataatctcataaagagttcagaaattcacaccttttgagggagaatctgaaaggacatgtggtttagagtagaaaggtctcccatgccttgaactttgacatttcttggctcctttttttttctctcttccacttttgtttctttaattaagctcttatgtttgagagaacttgactgtttacccctcttataatggcatattgaaaatggtccatatttagaagatcttggagcaaaatttgaacaaatgagcttcttaaataaaatttgtccccaaaataacagagaaaggtaccccaaattgctatagccccaccttaggtctccccaaagtgacgttagctgggatgtcatacatttttaaccctgttcctgctgtgtggtcctgtcctgctgtagaaccttgagttttcacatatgtgttcatctgcattcatatgcatatgacaaactgtgaaacactccctttaagtaaatgccaagaggaaaatgacattatcttattttcttgtccaccatatagttaagattaaatatctaatataaatatttatagctttgtatccctatttattttgtcataatatgtgctaccttacatatgtaagtatataattatgacttgtgtgaaagtcaactgataaaaatattgtctacatgtaaagtaggataggatgagactctacccaacttggatgcctagcagtttagtagataatgcttggtaaaaaccactgtgggtgaggactagggatatagctcagttggtagagtgtttgcttagcatgcgcaaagccttgggttcattccttgcaccgccttaagtagaagtggtggtacacacctgtaacccagcacttgggagttagtgttgaaatgttcagaagttcaggtcatccatctataaagagagatcaaggccagcccggtatacatgacagtcactataagtgtcaagcactgaaaatgcaggagtgacttgagttttcctctgaccttgcaatttccatttgggtacatatttttaaaaatccagccatgtatggcagtccagtgcttgtaatccacacagttaggaagtgcaagcaggattagagtttaagtctaacttggctccatagcaggagagatccatgtccaggaggggggctgatcacatgacttctgggctctgttgcttgtgtgaaacaattcaaatgatccaggtgaaacaaattgacctcaaagacagacagcttttatttaataattaaatagctgaccagcttcgtttattcttcctttataattctgtatattattcacttcctgttgcatactctccagtgtttcaggagtatagctagctgtaatggattataaatgggaagcatatagcttgatattggtgataattctagtatgatttattctatatttgactttcattctattgtaaagcgtaacctcttctttacgtatatgggttttaagtacgagattgagtcatttgcttaagatgtacgtctgtctgtgctttaaggtgcagcacagattccatcaaggaactcatccatacactttcacaatgctgcctcctcttagctaaatcctataagactgtccatcgatacagggctcagtctttgtttggacgccatcgttttccagctctaagtaaagtgcatttgatatttacattggattttataatcttaaaatgtctttttaaaacctcctccatattttttcttctcatggaaaatgattgtcgcgttgaaagcccacagtttcaagtagtctttgtgaaattgtgagatttcagcattctgtggtttacgctggacatttctgtgttcttatgggatctcagttccctgtatgttcactcattcatgtagtatcagaaaggtgtgacttgtcccttgctttgggcagctctacagtgtgacagaaaggttcattagtggctttgcagagtaggatgacacgtctgtgttgaactggctgcttggtcacatgtgggcacctgactgggtttcataggaacccaacataagggatggtagggggcatctgaaactaggcacagcagtgggctttcagttgtatctggaaaaattctaatgggtctgaagttgagattttagaacatgtgacacttcttccccgagaacctgtaattggcgaaactatttgagtgtcaacatgaggaaacacacaggctttcctctggtttgatgaaatatcaggcaagacaaaactgctattttacaagctctttacccaggttgggaaaagttgctgcagcctatatgcaaatgagacagtgccaaagtcccccttggctcccagctccagttggcggagaactgcttctgacatattccttatgtcggtttggtaaagcagggaatgggatgtggaaagcttatagcacatttcagacctatgcccttgatggttctgccacagctcccatttacaaattctgcccagtaatctcctatttaaaaaagcagaaacagaaacaacaaaaacagacaaacaaaacatgccagcaagtacaccctttgtagagggaagtctgctcctgctccaggtcgaccaccttccagtttttgagaatgtgtgctccagagcctagatggtaaatagcaattcagaatgtgcatgtcttgggaagatattttgtaagggtgtagagagacatcacttcaaggggactggttttacataatctggaagggaagagacataccagaattatttggaaagtaacattgtattgtaagatctttagctttttaagcactgtttaagttagtggagaaaaaactgatcaagccaccctgggagggcttgtcctgtctgcttctctggcatgccctcacttcactcttacactaattgttattctttgttatgcacaagatcctgttctgagttagctaacaaaggtcctgagatgttaaggtccctgtcttttttttttttttttttttttttttttgggtttttcgagacaggatttctctgtacagcctggctgtcctggaactcactctgtagaccaagctgacctcaaactcagtaatccgcctgcctctgcctcccgagtgctgggattaaaggcatgcgccaccatgcccggcaaggttcctgtcttgtgctctatattgggaagatattaaagaattcactgtgtagtagacggttgggggagtccccatgttccccatctggtattaaggctttggcttctggagacaaagtacttcaccagtacaaaattgaaagttttaagtaggttttgagggctaaaaatgaaatgatatggacaacgcaaagattaaagttcttttttctgaataaaatatgttacctttgtgggctaacttctgttggaaatcagataaatgttgcattgttaaaattagttgatgttaagctatggcttagttcttatgaaaacattaacataataaggcttgttagtaatatatgtatattatacatacatatacatgcacgtaggtatgtacatgtgtgcttgtgtgtgtgtgtgtgtgtgtgtatgaatatgttttggtctttcagtgagcccagaacttgaatggtagcagccaggcccagcactcttcctgtctctgggaatgggtgccatctactctcatggtcttcctgtagttacctattgtatcagtttatttagttttggttttcttttgagatagagtccactctgtagcccaggccagcctcaaacctacaatcttgctgcctcagcctcctgagctgggtttccaactggattccactttatagaaacccattttatttgtctctagttttgtatatgtgtaaacaccttgtaaaagcataagattttaaaaatccttttttctcttataaattagtgctcattaattgtagaaaagtgagaattaaatagtagaaagacaacacaaatctctggacaaaataccaagggatgcttgggtctgcttctccttggttctgtttctatataattttcacctgttactattatactatcacagcttccatattccatcttctttattattgtttctggtatcacctaacagtgaagctctgatctaagaaaacaggggacatttgtttcttttgacttttgtgtgtgtgtgtgtggtttgttaaataggaacaattttaacttcagagtcataagttcagagctgtgtatagcctgtgtcggatagtcagatttgccccaacatctgtataatagagttgtttcttgaaaatgcacttcagtactggggaacaccagggccaagaagtgggagtgggtgagtggggggagggtatgggggacttttgggatagcattggaaatgtaaatgaggaaaatacctaataaaaaattaaaaaaaaagagctttaataggtggcaggaagtaaaaagaaaagaaaatgcatttcatgtcatttgaattgttgcaggtgaaaggccagttattcaacgccatccccctttgaggctgctttctttttacccctgccttacggtatataaagagttaaattttgtgtttgtgggttttcttttctttttttttcttcctttttttttattttctgtttttttttttaaacatggaagaagggtataaaaacattgtgccattcaagaaacttgagctaattgctttcatattttgtttttgtagccgtcttgctgttacccgcatgttgggctttttccccttgaaaaagcccatacacatcactgtgtgggctagtgactgagtgcttacgactttcacaatgacagtcctgtgtgaagatgtcccttggcccagggattaatagctgatgacagtctgtctgttagcttctggttttgttgtgtgcagtagggtggagattttctgaaagtgtcatgaggaagctctgagggagcatttttttatttttttttttctctctcatgtttggagtgactgcagtcagcctgaggttggaggtggggaatttgtcaggcaagtcaggaatgcaccctcgtttgctggagtctgtttgcaatcatttctgctggaccttggggcctagtgggcatggagatgagatggacatcttgctcagtctctcctcagaatcttattgttctaacatgggtctggcatcaaccccacagcattaacaggtttgaaatgggtctgggtacaattctgtgtactgaaagttgagcatgaagcacatacttatatctcaacacttaggaggctgtggcagaagtattttaagtcaagggcagcctgggctacagagcgttttttcccatatcttaagtctttcctaatggtgtcctaagctgccatcctactggttaccctgaccctctttcctgcagttattcagttcactgtgagagctgaccttgcaagtagagaatagtttctttgtctatgactctgcgggtggctcctggagagatagagatttagttgagctttttaatagacatagcaagggttggtcagtctttttatataatttaaattatccattaaaatgggttccatgtagccaaaaatatcaattcatacaaaaggagtgttaaacaagcattgtatcataaatatgtaatcagagatttctgtgtaacatgatgtcttagtcagggtttctattcctgcacaaacatcatgagcaagaagcaagttggggaggaaagggtttattcggcttacactttcatactgctgttcatcaccaaggaagtcaggattggaactcaagcaggtcaggaagcaggagctgatgcagaggccatggagggatgctccttactggcttgcttcccctggcttgctcagcctgctctcttatagaaccaagactaccagcccagagatggtcccacccacaaggggcctttcccccttgatcactaattgagaaaatgccttacagttggatctcatggaggcatttcctcaactgaagctcctttctctgtgataactccagcctgtgtcaagttgacacaaaactagccagtacacatgataaggtatgatttgcctctctgtctcttctaactctgataagtatttaaatgtacctacttgcagtttaaattagcacagatgaaaaaaattaacacatgcagttgaaataaaaaaaagtagaaactcttctccagttcatggaggacatttcctgtggtgactggtgacaagaccatgaacttgctttaaaccttggcaaataaccctttagccaagaaaagtaaaagatcagaccaactgcatagtccttagctcaccaggcttctgtggaggtggcgtcctcccattacaaatgagagaccctcgctgcagagttgagttcaataaggatattttaatataggctcaagcatgagggctaaaaacgacaggtgctcagaaggaaagagagacagacaccccaaaagcttctcaggtcacggaaaggaagctgtacccaagtgtgagcttggcttcctcaaggaagacttgcctgtattgcttcaaagtctacttaagtaaccagcttatcatttaaccactcgtcttaagtgtgttttcctgttctatcggctaccttctgagtagccatgaagatacaggtttagtgggttcttgcgtattatcttatcctttgtggtgtgggtgctgttgccaggtagggtgcaagcaagaaagcagagcttgttgtgcattgaagtgtgtccataggttaactcatttcatgcatacacatctggtgtggtctgcttgtccccatcttgtagctgagacaactgaggcagaaggagattaaatgacaggcccccgggtacactgcaaataagcaatggagccaggatccaacccagtctttctacctcttgaggtaatggctagatgctgatacccttccccaaccgtgacacgattaaggcattattgtaatagtgaattacgattaacaatatcagctgggcatgagggtgcatgcttgtaatcccagcacacaggaagttgaggcaggagaatagctgcagtcttgaggccatcctgggttatataatgtaagaacccatttccagaaagcaaaccaaaataaaaccaataaaagctgctataacgtctcacatataactagagtcattcattaaaatgctaaatatttctcctcttttcctttattcatttttttcttcagtgtgtagaatgggaggaagggaaacaggaagagaatttgagagacattacgaatgcattctacttaatctgaaatattttgacgcttctggagaaggaagatgatttaatttcatatataattgcatgaagaatcataaattatgttttctaaaatacctatgacactaaagcacaaaatgaacagataaaactgatttgttctctgacaaatcaagatatatggccgtgttttcattacaagtgctgtttgtgcagagggagctgccgagtacgttaccataagacacgaactgtttccaggcggtgctgcctctgcatggacatcttgaggtgatttataaccacgctcaattattttcttctaaaacacgctggcaggcgaagcccaggttgaacttctgaagtcatagcatgaggatatgtctttctagttgacctttggcataaacttcctactcggaaataaggtgtttttttctgcacagtgaggtgactattttcagggtttggggtaccagatagaacattgtctctcaatgctttggatagtttcctgggaggtatgtgctgactttcttctgaaggagaatttatccatagtaaaaatgagcaaaagtatttttattcttcccattagactgaaaataccatgtgttctagttctctgtggtggaggaaaataaaaattgcaaaatggaggtattataagttacagcaattttcaaaggacccgtgtcctgaagttgacacagacaatttgtttatcctgaattttcaaagtgctgtgaatggttccgtgtgtagcattagcagttctggacaaacgagagagccatgttgtgtgtggagagattgacaggtgctgtggttagggcagtccatcagtgggcttgtctgtgtactgtgacagaccgtcacttcctcctctttgtgagccacctgacaggtaacaaatgtgcaggcacgggagtagagactccatgataaacctggacctcttttgtacccatatctagcatgacaggatcagacacacaggaaacattattcctacactaagaatcgcaccacgtgacttgttaactcctttttcttctatatacattccctactatgtgtctgaaggttggataaaagtgactgatatttaaaatattaggttaaagaaaatttaaaaggaaagaaatacaagattacataaaataatgtgactataataatgaattaggtcaagatttcaaagtaaaggtttccaagctgggtggtagtggcgcacgccttcaatcctagcacttgggaggcagaggcaggcggatttctgagttcgaggccagcctggtctacagaatgagttccaggatagccagggctacacagagaaaccctgtctcaaaaaaccaaaaaaaaaaaaaaaaaaaaaaagtaaaagtttttaatacattgaccactatacattagttttgaaacatatttagcttataagataatgagcaggaataagtggttaactagatttctgtctctgagaaataagatttgctcccaaaaagtgtgatggctctgtcaatgtgctgttgccttgtgaggtcacatgggagctgactgtgtggcctggctaggggtagagaggggagtgtgtgtctctgattctcccctctgcacactgacctaggacagtgggccctgcaggtctgttaggtgctgctgggtcctctacttgtgactgctgttcaataatcatggatttcctaatctgtgaccctacttcagtttgtttgtctcttaaagagtaataatgggctggagagttggctcagcagttaagagcactggctgctcttccagagaccctgagttcagttctacatgatggctcacaaccatctataatgggatgtggtgcccttttctgtcatgcagacatacatgcaagtggaacactcgtgtatatataaacaactaaatgataaaataaaataatagtaataatgagtgatgctaacaaatcttcatccctaaggttgttcggctaaatgaactaagtagtgtaaagcactttactaaggccttgacccatagcaagaggtgggtggagctgctgtggagatccatgttgccagtggccatgctcagaagactatgcagccctagtgacttgagtgtgattcctgggactcatgtaacgagagaactgacgtgtgtccacacgtgtaccttagtgtgtgcacccacacacatcatatgtataccctcatagtaataataatgataagatatcgttactgctagggctagggaagtgacttagttagcagagtggctgctgtataaacatgtgggcttgagtttgaacctcagtagctgtatcaaaaacctggggtcccagcactggggaagtggagactggaagatcctggggtttgctggtcagcatggctaggcaaactggtgaacttcagagttataagagaccctgtctcaaaaaacaagatgtaaagtgatacacacacacacacacacacacacacacacacacacacacattatctctctctctctctctcactttataccaaaaaatagattgttattgttactgtagagtacaaaagccagataaatctattcatttcttttgttttctcagcttcaattcatgcagtcccttaacctgacgtactgcatgtgaattaccaatattattttcttgatctgtttgttttcttgtggtagaagaagataagacatagggatacttgtgtcttttaaaaagctggtggtatcctatcctaggactccaataactcaaaagaaggttttctgttttgttttgtgtggaagaacagttctacgtcacatcgttacgtacacttaaaatattttatgtaggctggcactgggcactgtcctaaagcttcctccttgagtcatctacgtgttaagtgcagggaagacatttaagctgtgcataccttttctcaaatggttatgcttagatgactctggggccatgttgaacaggggagatatcaagaaacagattatgtgaatgtcttcctctggaacacattggcagcaggtgtgtgtaccctggagaacttgattgaatgccaggagaatgccaattccacaggcatctgggacttttgtcgtgaactaaatgatcatgactcaaaaagaaaatgctgaagagcttaactagccgaagactagtgttcaattcagctgtgtcatagcataatgtatgtgattagcttgtatatacagaggtcaggaatcaaatggtaccatgctcaaaagtagtagttttaatttccatttattgattatcctctccagtcaccttctcttactactatttcctcccaaccctatttaaactcttcttgttgcttcatttcccccacccccacctcttgggccaaaattctcctcttaaaaacaacaacaacgacaacaacatctaagtatgatttacccatgggaatccagcctgagaaataggactgtcccctgccagtcagtaggtgtgtggttccaacctctgttttggtatgtgcttattctaatgttagaatcatcatctggaagctaataatactttaagaaaagtataattatgaaggtaaatctgtatcaaaaattgcatggtatacctcaaagtcaaatataattattagtgaatagctctcatttaacaatcatccagttgtagaattgtacataaagtggtgtttcagaatccatgtacttagaaaattgttcaatttcccataaaatataattcaccagatcttagacaaaaatcatctattttggtatagtagagccatacctatatgaaaataactggagtacatcgaaatagaacacaatgttcttctgttaggtcgtgttgtgtggttttgggtccagtggttctatttttacttttctgagtattttgctctcctggccttggtcttacccagccatttctttcctctgtggcagtggggggccaggaatgctcctgtgctgtaagaggctggacagctcttggtgtagggggcgcgactggagagctggcaaggaatggtgtcagacctgcttaatgcccttggggggtcacagaaagcaaactggggattgtgctctaaggaggacagtctggctgaagaggtgatggtgctacaggtccagttcctgtcctaacaggtttatgtgtctctggaaaactggtgaagggaggtggtagctgtgagccattcagcaagcagaacctcactggaggaatgaggggttcattccttcattactccattcattctctgatgaattagctgtgtacccttcccttcagggaaacccttagctacaggactgcaggcagcctaggtatctatgtgtattatatgctattttagtgtgcactcagtagtggtttgttttttgttttgttttgtttttttttttgatttttgagacaagatctttctacatagccctggctgtcctaaaactcactaggtagatcaggctggccttgaactcacagagatccatgtgcctctgccttcagagtattgggactaaaagtgtgcacaatcatgcccagctacgctgaatactttttaactggcacgcagtattggtattagtgcctgttattacagtaccattttaattgtactatgagtggtagttaaaacaatgttatagagtactttaaatgagtatgtaggtggtggtggatatatatagtgcatttgtgacctaattttcatttccattaattgtatatggcagtcatttcattttattagtattattttcttctggtgcagggaagttgaacctagggtgtcatacatattaaacacatgctttttaaacagttttacttgtttgaggttaaggccattggtggactagaaaacaaaactgttcttttattggagataagtattgtagtctcattcttcttcttcttcttctcggagctgttagttagttcacagtgtctgcctgctcagtctgcacagtgggcctcctcccacggccctcactgttttgtattctgagtacaactgtcctgactattgcctgtggagtggtctttccttcatcagaagacaatgtctttctcctattgcagcaagctgcttgtctacctctgtctgacatgtgtgccaaggcttactactggaggggcaactatattttgacaagcttggttggtttgctctgctcctgctgtggtcatcctgtgctgtgattttgggattgaccagtaggagctttcccaagcagcagcagccaactggtattcaagaggataggtttgtgcagacgggggcagtgacagcagcgggtgctggcactggagccttgagtgagcgctttgacacactgagtcacagcccattatcacttgcactagtgtcaaaacaatacggcagcctgaactgcagcttggcttacgcctgctgtcacacatgcgcctcctaagtcattagagtgttggcgtggactccttccgggatcagtcagagctgcatcaggagagagggaatcggttattaatcatctgtggctaattgtgccagggtgggatggggtgtcctgatagcactgtgacaaggccagactgaggtcagtggctttggcaagagccacactggagaaggtcgagttcagaagagggagaagcctcatcaggtagggagctctgttcagactgagacaggcggatgactaggaaggccttgacaaggctgtaagattctgatggacagagatgaagggagacagttggcaggaggaagctctctttggcgtatctgcatgatataccgagggggctttaggactcagagaagaactgtgcatgccaagctgaagagttcatgtttgcttagcagtctcctgtttgggaccacccttccttgaaaggtgctgaatcagtgtggttatggtgtgtaagaaaaatgtgaagtctattgagatgttagctgaggtgataatcagctaagttcacaaatagcaggaagtctacaatagtgtaataaccaaaaattgttttgagttgttattttttgttttttgtttttggcttgtttcaggtaggtggttaatctcatctaacagtttctttgccatagcatcaaaggccctggctttgagacttttagaactttggttctgatttcagagacttagaaaaacggagggcaagaagagccgaagacagggcatgcctctccatgcagaccccctctgatgtcagaaggaaggctttcttaggaatctgctttttattgcacttaagagcttgggaaatcaagttttcaactgatacaatgcctctcaaaaaaaaaaaaaaaaaaaaaagaaaagaaaaaaacaaacaaaacccacaaaacaataacaacaacaaaactccccaaaactgggattctctgggaaggaagaaggaaaagtggatattggtcagccaatagcagcattggccaccatgtgtttgtgtctatcgtgggaaatcaagaaagacagagagcagaggggcagaaagccaacagagccagcaaggcattgtgattagagtcagataaaacaaccccagagttcagtttcaattctgggtttgcttaacaaaaaaacccaaactgtattggacaatgggttaggaaaatgaggctttgagcatggcactgctgttagacttgtgcagagggcagcacggctctaaggttcattcttcttatctgtaaaactagggacttactggaacacacatacacacacacacacacacacacacacacacacacacacacacacacacacggaaatgggacctttaaagcctgaacccaggatgtatgatgctaagaagagattgaacatgcattttggaataccactttcagactaaatgctgagtaagttatacaagaaataagcatacatttcttaggaagcatacattatgggaagatacacatcttactaaaaactgtctttccctattttatggatctaatgaataagcaaaagtatttcatagattagtgtaaaatactgaatttaaacaaccctttaatattccttggcatgggtgtttctttgtcaaccatcccagcattcatatactgtaaggaatgggggacaagggattatatacaatgtgattgtttaaaacagtcttttccggataaatggtttggctgcttcctctatagttaggcatgttctggtgcttgctcctgcccattttaatctggaaaattttatgtcaaggtacaagtaagattgctgtcttaggagagaggggctcttcctcccactgcccgctgacaggcagatgggtggctttctctgctcttcttgaagcattagtctgggagcagaggtccacgcgctggttttatcagctgcttgtctctgttctctcctagcctgtgagttatcatgcgtcgtgcacacttaccacttgctggtctaatctacaccatagctacgaaggaacactggggtatagatttactgcagggattcttatgaagaccccagtacttgtttgctggtgatattggctctctttcccttctttgatctatgaacaagaatggttggtatgcatgcttatcacattgtgaagataagattacattcaaacagtgttcttattagcacagcagttattaacacctggcaggtattcgtagtccaaatttgggtgctgttcctaagagccctgtcaggtatctcacaattgcctccataggtacctatacccatgtgcacatcctacactagggcgcgcgtgggcgcgcgcgcacacacacagacacacacacacacacacacacagctacaaataatagaaataagtctttaaacattgtttgaaatacagtaaacaggacagaattgatttgtcaggaattcagcctcttttctctagctcttgtgctcacaggcatataaaaacagacaaatagagggcacatcagtacacttgattgcccctgggtagcatatttcagtcctctcaatagctaaggggttaaattttgagtgagcatatgatggcaaagacataaacgagcattttttccccctaaacataaagaacgacttggaaagaagtctgtcggggtggccaaggcaaggaggctccctcagaatggaaagaggtctgtggaagtggagagtaagtgattcaatatgattggaatttgatccatagtaatatggctcaagtgagatctttatcataggaagaaagaaactactcaagattcataaatgccatttattagcaactactacttgggcttctttaattagaaggagtcttcaggcctctgaggtcactaatggagctttggaggtgagaggacaaaggacttttatgattaagaaaaatctaaaataacaacaaaaaacccttctttatttctgtatttacaaaggtaactgtaaatgttttaccagcctgtaagtgtgtgttttgatctacttttacacttattaatggcatagttactgtaaaaaaaaactcatcacagcttttaacgctttcttttatgataggcatatgatgtcattcacatgtaatacattgcattaaaacatggtgaccaccctgagcagatcattaaaataatgggacattcattctgctggcactgctgcctaaaatattccatcattaaagtcatagtaacatgtgctgggagggccggctgattttggaggctgcagttccacttctagattggaaattcataaagatgattaactcccaattctttgggaagcagtggaattgactggtgaccctggggagttctgagttctgggcatactgtcctatctaactggggcttatctgcaggaaaggctgggtggagcctgccctgcttttatcattttaactaaaacaccacaaagtgcccaatcctatgactatggctgctttacaatcaaccacagatttcagcagttccttctagtagccttaaatatcattgaagtaatctctaaatctaaaattagatttagcagacctactgtcctttgaggtcagagttcaagaagttctggttaattttctgggtgtagataggggaagactcactcaagatactctcttaaacaaaggttttattctctagggctcaaaaaaaaatcacttaaatagtcttaacagctgaatacacactcaagtgcataaacacacacacacacacacacacacacacacacacacacacacacgtacgcagtttgtaatctctagtctctatgatagaatgtttataccagctattaatgatcctagcctatagagtgtatacaaacccaaagggaaaaaaattcagtgaaggtgggggtggtggagaggcaagccatgcccacaaacttcctccctccctcattcctcacagacttgtaattaaattcagacttgctgcagtatcattacatagtgaagatgagctggaagctcttttgaagttaaatttcttaacattaccccctgcagtagaaagggcattgccttgctgtgaccaatctttaaaaatagagcaatgctaagcagtgcgtgcacatgcccagcaaaggagcctccttcagagggacttggtatttcttgaaggtggtgttgccaaacaatgatatagaaaggtcttgtcttgatttttcaaggctggtatcgaaaacatctactaggctgaactgtagggtgcagactgctgtagctgcagtgtgtcagctcactggtctaggaggaggagatgcctcctcgattactgaaggaagcagtgttcacagtccagtgtcacagaaccccgactgagctacaaaatgtcaggagaatgcatgctaaactctgctctttagctctcattttctttcttgttttatatcaataaatgtaccgcagaagccttccccatctgtggaatatacttgctaattaaaacgaatagagtgggatttccaactgaatgaagtgagggtagtaggatgggctattgggattatatttatattataacacaattgaggaccatttcttccgttacccaccatacttaggaatccttcctccgtgtggtatcatgcagcctttgtgggcacctctgggatttggggccttgtgtgagtgtcttccttcttggagacatctgctgcatttgctttgaacttcttctacaggttgatggggaccattgtctttgaagtttagcattgctaattcaatttctgaatttggaaagtactcttgtgcctcccctaaaacttctcttttagcagtctaaaccacagcagcggtctttgtatttggtcactctgtccctttgtactctgcatcacccttgtatcttggtgctgtctagttgtctggctgtcccacagcgacttaactcataacctcggctgtgatcttgactgtgtagaaatgtattaagtcttttcataaatgtttacagtagtggctcatatgaagtcatttcagtattatcaagactgttttcacatttcaaataaatttatgtcaggtcaaaattatgtatatatgtaacttaaaaataaattaataattgttttttccttttggttttatttagtctggtcaattgctttagaatcgagaatcaattaactccttccttccttccttccttccttccttccttccttccttccttccttccctccttccgtctctctctcccttccttcttccctcnnnnnnnnnnnnnnnnnnnnnnnnnnnnnnnnnnnnnnnnnnnnnnnnnnnnnnnnnnnnnnnnnnnnnnnnnnnnnnnnnnnnnnnntccctccctccctccctcccttccttcatcccttccttctttctgtctttttttgttttaggtatttttgaggtagggttattagctcagggtgactttaaacttgctgtgacctagaattctggtcttcatacccctgcctcccatgtgtttggattataggcctgtatatgcctggccagttttggatcaaaattaaatcatccaatatgattgcaaaatctacaaatttttgtaagcatcatcatcaaaattactaacaaaactgtgaagggataggacaaaagataagatagactcccaggagtggctcatattcccagctgttaacctgcaggtataaactacagagctggaacttactgccaggcccatgaggtaactcaaaaggcttcctcgggtatttctacctttcctgtcgcccacgataaaaggattgaactttctgagttcttactggtttggaatttctgatctctatgttatttgtttgtttgtttgtttgttttacatttagtcatcacttctagcactatgctgagacatgcgtccttgaattaagagacttacatttattgtagtttatattcttttctaactttattccctgttcagtgccaccactctggcatttcaagttcaaagctgcttttgcctcagccggtggtgagatagaagtaggtaggcagctaggtttgcctggaggaggggtgcatctttttggcatcatctaccacaggcgaaactcctgtctctttctatatcttcatcacttaaaaactgttagagttaactgtctcaggatctagctctttgggcctggattctgtgataagatctttagagtccctgcttcattttcctgaggtactgaggaatttacacccttagggaatttcctaagcgactaaactgaaagctagaaagtgttgcttttagactgcccttccctcttagcagcctctcatttcctgttaaactttactccagcatacttcatgtgtgaaataggatgagatttctgcttaaactgagatattcatgacccggagctggctccaaagccaatgagcggtcttctcattcatgaccatgggacatagtcaatgagcggtgctcttattgttactattttccatgatgttgcccactcattcccataactgtggcttacaagcctttttatggttttatgactatttaaaactatctccttaaaacaacttcattcatgaaatcattttctgccaccttttcaatttttttttaagttatgaaatacttagctctctctaggaaaagttggtttttatatctctgagtgattttgtacagctttatgttgttctgtagctagagagatagatggctccggggttaagagcatatgctgctctggccaagcacttgagcctggttcccatcacccatctcagaaggctctcaaccacttgtaagtccagcgccaagggatttgatgcctctggtctctgcaggtgctcacattctagtacaggccacctatgcctgcatatatacataattaaaaacaatgcaatacatctacaagaatatatattgctctaaattgaggctggcatagtcattctgtgtaccatagtgagttgagcactgtgaagcacaaggttgtggggaagcctagccttaggtcacatagcatccagatagtcctgcataaaccttggctctagaaggggatcgtctcagcacacaattctggaaatttttcctggttattttttcactgtttaataggaagaccaaacacattattagcatgtagggtttggatttagagaaagaactgagaatcctggtagcatattcgtgagactatagataaccttgcttgcattgcagcgttcttcaagggtcaatcctgaaggctctgccttgggtgaggtcatgtgtgcactgtgcagggaataagagtattaatcactttcatgtaattagacattcctacatttttagaatttctaaatcagaatggatttgaggaattttacccagcaagctttccccctctttttaaaaataatatattccctagaaataagcatgtggagtttgatttctttaccatgaataattgtactaaaatatctcaaggacatgttctatattttcagttgtattgtcaaggttcggaacacttttcaggaaacagtttttttttttttcctgaaaaagaaaaatagcaaaacaaacaaaaaaacccacacatgtgcaggtacacacacacacacacacacacacacacacacacacacacacacacaaaactaccaataccaaaattccaaccagacaacaaaacagccctcacctcataaaacaaaaaaagtgacgccaataatggtgacgtgttccttgctcacaactatgcaagcacccaggtctctttatccacacactcttcacctacatttcccctctgacctttccatgtactctcagggatgcacactctctgttcttgtatttatttccccaggacatttctctgctaggcgtcagggtacttatgtaaatacagactccccatctctggagacctaatgaattgggtcccctgatggcagaccctaggattgttattttcactggatctgttgtgtgtagagatatctgtgaccctaagtttgagagccactgctgcagtccaattgtccttggcttcatttctctctgatgaaaccgatagtatgcagggctccttccgaagctctttgttgccgaagagcaggctgctcggtaggccagaacagattgtcaccatgtaaatgtggagtcaagggacataattttacgggctcacacctatctctcagccaaaggcatttcaggttagttgtttgccgccactggtgaaggaatatggtatcatttgaactgggacaaccctagctccgggtacattctgtggtatgatgtttgccaactcacattcagcccgtgcatttataattgtcaactgtttccatgcattgagtcatggcagaaaagcctcttctttgtagaacctcattaagatttcagttgctaacagattttattttacagttccagctttcatgatattaagatatggagatttgggcttctgggagggactgtttacaagtctaaagctttctgctgtgggagcatcactgtttttctaagggcacaaccagaaaggaaaagaaaaggatggaccaatattttctaatggatgtgatgttgtcagatgttgacagaacaataaaggatgctaagtcactttcaggatattatttgtttgagacttgtgtgatttttcttactatagtttagtttcacattatgtttttataaatttcttctggtatggccagaaagacatatcacatcagtgaaataggaacatttttagatgaatatttctttatggttatgtatgtatgtatatgtatgtatacgtcatatacatatacatatacaccctgacttaaatgacatttttttctttcatggtagcaaccaaaattatagtatcccattttatgtcttatattgttcaccccccctcgtacactctaaaaatttttttctaaataatgtgtacttctttttttccgcatacccctcgctgtcttggaacttgctgtgaggaccaggctgaactcacagcctcctctgcttcccaggtgctgggactaaaggtgtgtgccatcatcacctagcataatatatagttctttaattacagctagtgacaatgaggtgaaggttattggttttgttgcttctagttgcctgctgccatatccagtcttctttctgctaacttcatcattctttagtcctgcaccaagggagcacaggtctgtttactaccggggactaacctccaagatggtggttatgtgtgagaattctcatctctttcctgatgcgatgttaccatgcctatcctgtggaggccctggctccttttccccttagcagtcatccctgctgctcttcagggtaaagttttccacatccagcccagctgctctgtacagctgagaggccatcctggtttcccctcttcctttgccgttggtgcatctgcccgaagaacctcgctggattctgttcccctgttgtcctcacattactgttgtttaggggtggtctcataccccttgttgacagtgccttttagtgagagtgctgttcctgcttgggatcctgccgtcacaagagccagtgtgaggatagtcactgaaggcaggcagaggaaaggagggctgagttcctgctgtctgacctgtttgatttgctctgttgacactctccacctgcctctgccatcatcaatatattgctgcttaatatactcttggacaatatgatatctgtttataatgctagctataaatgtctaaatcagaggccctctcatttcaaaattgaagagaatgcatgaaagaactgggatttctgaacacaaatagcttttgtcagtgtgtggcttgcgttgcttgatttccatggaagtgtggcaatttaacagtacacatctccattgtgacattgcagcaggcaccgaatgtagtgaaggataaagtcagatgggctctctgtgccacttgcagtgcaagatattcagtatcttaacagatgggctaatacagttgagatcttctctgtggctcacagtctcttttccttccttcacataggcagtaatgcatatatgctattaatatatgcacactgttatacccactatacgtatgtaaatatctgtgcccaaatacacatgtatgtgtataaatctgttatctctgtgttttcccttaccatgtttcatggcatgaattttgaattgtggcagcatgtcagctaaccatctcatttggtatagacatttatgctatttagaattaatttttcaaataactttcaaataaagatttatgtatttgaattccattctgttttttgattaattagttgatggtagtagataataacttgaaataactttaaaaagtctagtttctactagttgacattcatgattgattttcattgacatctaaggtgtcatgttgtcaaatttcagtctttgcatttaattagtagttttaaaaattgcagttatcttggaattaaggtttttgttgggtactggggctgagtgtctcaggctggtctcaactggctgtctagttaataatggccttaaactcttgatcatcctgcctctatcttccaaactggagttagaaaacatggagtccatttagcattgtcatgatttaaaggtcaacaggaatttctaaaggatccttgaagggacaaggttgctaattgggatattctaaggcataatagtcatttaaagattttattgtgaggtatgccatgcttaccaaggaatacaagtgaattttacgtttagtattagaaaatagttactaaaacaagcattctggtttgcagcatactgctggaaaaatagaatattgctagtaccttccaaactgtcttcttttaattgctaatttattcttatcaatgtaatttatttttttcgaatgcgtgccaaatagctcagtagccacggagtagacttggaagagttttctgtttcctctgctttttttctataatcctgtcttactgtccccatcccagtggttgctgctgctaactcaggcgtttaccctgcttcactgtccactctcccccagcagcctcagcaacccctggaacaggagtgaacctgatccacctaaggccacccaaggcttggcttctctatttaacatagagtaagatccatgtttaccctgaactgcacagctcttcctgttctctagcttcttggtttcttcttggccagctcttctctgtaggggccattttctttgacttcctgattgttcttcctctcagcatatattatttttgttcttgccacttgctttttaattatacctttgcttgttggttagtagacattcagtctgatgagtgcaggtagaatgtctgccttaatcaccaggctgcccttccattacctgggtgaacatttagtcaatgttgaaatagctgaatgaaggggagagtttggtgatgcctttgggagagaatagtttttagtgtctcaaggctttttatgttcaaaacaagcatatgtattatgatgtaacaaaattgagtcactggaccaggactgttttcttgggtgtatgtgtgcctggcctatgtattatattttaaccctcactgactcatttattaaatgtcaccaattagggtcaaatactcaactggagtcttatttttgttttcagtacttcagatatgtaggacagaaagatttatccaacatactggagttagaaggctctttagtagtggaaagaatgtgagttctggagttgtgaaaccctaagatggagagtagctatgcttcttgcttgcagtcttgacagcatgcctcacagtctacccctgcttctcctctcataagaagcaacacccacctcattggtttgtagtaacgactgacagaagataatacgtgttaaattctaacatggtgctggccacaagtagttgcttgattcatgatgttatttatttttattacttacttgtccatatagttagctgcctaatccttttctcctttcatttggtcctctggaaaactgagacagtgtttactttgtgggaataatgtagacgtgagatgggatcatgtgttagtactgatgcatggcgcccagacaactctgcctgctttgtagttgctgcactgagtgagccagagtgttcagtagaagaacaagtgggatccagtttctgggtgcagaatctaagtctttgagtttcatttatttattcaccagctgtttttggagatgctcagattagtgttgggacactaagacagtggaacaggaagtgagaggagacaggaagttgtaatcatttgtctgataagtgaatcggaagcacagtgagagtaagtctcttaggggtgtagagagggtcctgctctccgtggaggtctctgtgaggtctgagcctcagactgggaagacacatgtgagggaccagtcaccctgctgctccctagtcagacaaatgtgggtttcagtgaaaaatcaatccataggcaaattatttgtcctaacaggaagtagagatgctttctgtcacaggacttttgtggagattaacacaatgagaaaatgtttggacacaccattatgtatgagtgcatattctttgcaatcaaatgagattatgtctacttttgtatataccaggagattgtagactagctttatagatatagtcctctagggaggtttcatgggactagaagctagtctacaatctgtctgttgttttaaaccttgttaagcctgatctatatctgtacctgtcaaagttcagaggtggtggccactgctgtccatcagcttcttagaacccttatttggttatgtaagagcctcctccttatttacttccataccacagtgcctttcatactctgagttctaagcaggaagtcaactatattatctctgcattattgtttccttggagtaacttcaactttgaagggaatttgttcaattggcctctcataattgacagagaacctggattcatatatctcatttaatgcacccagcaactcttagcaagtgccatggactgagtagactgacctggagagctgaagggtttgctcttagggttatagccaaaggctttccactttagaaaagaatacacttacttatcttctctatctttgtaggtcctcaggctggagaccctgtaaattagactgacaaaagacagattaacaggggaaaccaagtttataaatagtggtctctgtgtctcactcctcagatctttagttcagtctgccagaccgtgcatcaggggtggtattctactcacagcctgtgtctagttcagtcctccatgtggcatatgtagggtggcatccagctgccttctctgcggtgcctatattgcaggtttcgccttctctctccaccagggcacttttaagcttcctaactggtttctgcctgaccacagtttcccatggcctgcattctggaacactacaaaactgtcctttggttgatacaaataaatggtgtttctccattgcttcttggtgccttctctgccctggcacccactgaggacacatcacattgctcttaccatctcagaaccactgtttcttgatggtaacctctccccactgtcagggtgtggacacctccatgagatgcaagcactacagttcttaaagcctcgtgagtggaagcacactgctcagcctcttctctacagacctctcccaggtgcagaaccagcttcttccttcatattagtgtcttcgtgtctatgttaactccatttaaaaatactcagtacacttaccttcatttgtgtattcttttccagacgttgtctggtttgtattaggcacattgacagttgctgagttcttttgcacattaacccatgcttgagctgggtgactttgttgataagttctaggatatagagtgctgagttgaccatggacatacttaatataatgtgttgctttctttctgttaaacagatcaaaggtttacaattattattcagtctctgcttgcttcagccctttttcagagctaaagcgtattttcacataacgtagtctgtagtctgcacaaaacaggagcatactacacacagttcaattaaaactgatttgagcatacatcatgaggcatcgtggtgaagatctattataagataggactttctttaaaaaaaaaaaaacattttgtagcactgcccactccttttcctagcagatttgttatctttgtcttggtaaatagccacttaggaaaatggaaaaagaatgaaaataaaggcactaagggatatggaagctcggccatctatctcctttccctttctctgagcttttatatatgttctgtttcaaaaaccagtttaaaaataaaaaagacgagggcggttgcaatctgccacattttatgcagatgaggtgtggccctcaggcacctgccaaactgctaaaaagccttccacggacctgggaggtgacaactcagatcctttcctttagaacagaaaggctttgctggaccatgcttccactagaagatgtgggtcaggccacggtggagcatcatctgagcatgtgctcgaaggccagggcctcatgggctgacatctctgttattcttgctgttatcctgaggacagtgaggttcccagaggccagcatgattgtgacctctctgtgctgtggctattctgtaggtcattttcttttctaattcaaatgcaaactgttatcatctctgtgaaacacgtctgtgagccttactgttgcaacagcaaatatctttaattatccagaatgtttttatgaggatgacactcaagaagaaagttgagtttttggattattgcagcagccattttttttttttttatgtagtgctgggaattgaacccagggctttgtgtatactaggcaaacactaccaactgagccatatcctcagcccccatggcagccatttgtaatgttgctgggtaaggcattatcttttaaaaagatggtagagacaaaatgaaatgaaatcaaatcctcttcctctttgactctttagcatactttttatggaaatagtttggaaatgattgtcttttatgggaaaagattaagggcttttgtgaactaagctgggactaagaaattcaaagagatagatctggggcctatcaccagttgtaggtgtgtaaagagttacaagaagtaactagttttttaagttatccaaatccagcccatggtgagaattgctagatattccacatgagcatatcttgtgtgaaaaaattttgtaaccaaaattactccttgacacagaggagcaagaaacatattagacagtcgacatattctagatcatcatggatattcaagaggaagaagtaattctgtcccagatacaatattaaaccatcacataatttggttcacacagtgttttatgtatgaatgacagaattctcttttttggcttattataagcattattattataggcaccaacccaacctagtgctatgtcaataagtaattttgaagcatgggtaagaatctcaaagcttttgtttcttatttctttgctttatttgggaaaatataaattaagtgctgaaatatgaaacacgtcacatggatgaatctggaaagggaaatttgcgatcatttttagttcacagggttcttagaatatgctcatgtttcaatatgattatgcaagatctttttttttcccctttactgagtgtcaggaacaaaagaagaaggctggtatacttgagaggtgaagctgtctaccagactgactggctctgaaacctatccctgcgtgtgagactcacagactgataaactcatgtccatggcttttgatgtgtcacccaacgttatatgaaatagtatatcagaactaaaaatttgatgaccactcggtttctgctaccagtcagtttgattgtggtcatgggttggatcactgctttcttcttgtgtagcaatatagaatagcatgagaggcccaaagcaaatgctccatttcttgatggagtgattgtgacaaagcacattggacaactgaaagtgaggagaggcaaatttgggcccagaaggtatcatctgcaggattaggcatgaagacaggattaggcatgaagaaaagatggattctgggggtagacattttctgtttttatcatcatgaattatgggatgtagttgataaaacaacaaaggcatcatacatgcaaacacagtggcagggagagattaaatggctcctgtttcgttctccatttaagaatgagtggctaaatatattcttagatttgtgaggttccttccttttatgggtgggcagcttaatgatagtttgctctgagaataaaaatgaaacaccattctggttattttaaggatggttcagttaaaagcaaatcaacaggaattccatgtgacctgtgaacacttgcccagctccccagatagagcccaggagagttctttatacagtagcagctctcaaacagattttctcttctccttcagtttttattttaatttatttaatttctatatatttttgtgtgttttgtttatttgcttttaagaatggatatcactatgtatcccagattgggcttgtgatttttttttcctgttttggtttgccagttgctgaggttataatatacattcccccattctgctcaccagactgtttttaaagtcttaagtaagtctcactgatagacagagacagagcctccctctgctggggtggagagaccttgatactggattcatgcactctgcaatagagaggcttgttctgtttgggtgtgagcacaggtgtagccccggggatatagaaggtaccagcagagggaaagaccaagcatctcccaaggtgtcccctatggataaaaggaaagtaggtcctattgacattttgttaataatgagaatatgttgaaatttctgctccttgatatctgttgtgtcataacttatgaatcagatgtatttacatatgagggttacattaaggactttaggagaggaaactatttgtagagctctgtgatcgctcattctctctaatgttgaagttctgggagtatgtgttctaatcattgttaccgaatttgttaacataagagaaacacttggcagttccccctagctagcaattttaaagtagagaacacaattcctatagctgctgtcttagttagggtttctatttctctgacgagtcaccatgaccacagtaactcttacaaaggaaaacatttaactggggcttgcttacagggtaggaggtttaatccattattgtcactgcaggaaacatggtagcatgcaggcagagatagtgttgggtcagcaggctttagaaagagagactccttgggcttggcttgagcactagaaatctcaaagcccatcctagtgacacagacacctcataatcatgccactttctatgagcctgcgggaccattttgatttagaccaccagagtcactcccagttggaagtaaacagcatagttggtagaatgatgcttgttttgtccgactgaactaaattcctgtttcctcattgatatatatgccattgttttgctcaccaactggcagaccttcagttatcctgaatagctgtttgctatacttagaaagttacagggaaaaaaaaaatctctgcctgagaaacataaagctgagtgtttgccattttttaaaagtagaattttaataaggacagactaacctaccgattcagtgttgaggttttattcaatattgtcaattatttttattttgttggttattttaattatgtacatttgaaatgttatccaccttcccagttaaaccctctatccccttccctgtccccagtgcttctatgagggtgctcttccactcaccccacccccaccccctacctcagcaccctagcattccccttctctgggtcattgagcctccacaggaccaaggggctcccctcccagtgatgtccaataaggccatcctctgctacgtatgcagctggaaccatgtgttcctccatgtgtactctttggttggtggtttagtccctggaatcttttgggggaggagggtccggttggttgaaattgttgttctttctgtgtttttgaagtctttaatgcctctgtcaagtgacaataatgaaagccaccatgattggaccccatgtacttgagaggccttttggtctaggatatcagagctgcagtggcagggggatacccagggaatctcttcgtagtgtggggcattacacaaagattcagcttgaggatgacagccctgacctttttctgcatttatcacctttttggaagatatctgtaagtgcagagggtctctgggataatttgagagggcaggtggcactactaacactgtgtctacacagtaatggcttggtaaaggataaggggctcaagtcactgagatacagcaaactgccaagcccagtgcattagccagctttttatcactatgacaaaaatacatgcggaaatgactttaaaggggagaaaaggctcatttgggctgagagttttagagccttcagttcatagtcagccaggttagttgctctcagctctactgtgaaacagaaaaatagaggagaagagctgctcaccttgggtaggcagaaagcggagagagcaggatatgggctgattcccttcaaaggataccccagtgacctactacctcccaccaggccctgcctcctagcagcctgtttagctgtgtgtccctcactggtgggattagaacgtttttacttcccagtaacatcaccagatggggaaactaagccttcaacccatgagcctttggagacattttcaaaacataacaccagatagatcatttgctgtgtaagccagtgacattttaggatattcagtgttttgcttaagtaagggcatctctccctcaaaaacattctaaagaagtaaatgcttacttatttgatgttaacttagcattcttgaatgccagttgtacacagctctttatgatttccttaaaatctttctgcatctatttacgggtgcacgcacatgtcacagcacatggagggcagaggacaatgcacagaatcggttctctccttttaccatgtaacttcagaggactgggtgacggctgtcaaacttgatagctggctccttggcctggtgaggcatcttggggcccagctttgtagttttccatgcagtttgacttctgttcttttgctgtaatcatctttgtgagttaggcagggctttctttgtttcatttaatttttcttttgcttccactgccatgtgttctagtaaagaaaacgggtctcagaatggtacacagccacaggcaaagcctgtctctctgccttctctcttactgcctatcagtgaaatggccttatcggcacataatccatcaggtatccatgcacatgacagtgaggctatctaggtgggtaagctaggttaaatgatgtaaaaccttgatatcatatggtccaaatttgatgaaaatgccctaatgtttattcatatataagaaattgttcttcacctgccatattgctcattccatccatgccaagttcacatatccaaaaagaagtaaacacagtggcaactctcctctggtgctgacattgaaccttcttatcaagtatcctggctgacagtaggagcatattttctggtgacttaacaacaagggattctgggaatcatttggtttcaccttttctctggtcaagaatgtgtgggtagatcttagtcttctggccattgtgtatgtgtgggtttttgtttgttcatttgtttgtttgtttgttttgtgggactcctaggcagtgattgattctcaagcctggctcctcagcatcctctccttgggtcctcccatagagattttgtttcataggcaagaaagaggctcatgatttctctagaaataaaattggagcccgctcatttaatgtgactaccttacgccgcactatccttggaatgggacaataagaattagcttctgtccctttcattcctctcagatcctcacaaggtgtccgatccaactgccatgtctaattatacatataatcattaccaatatctaagtctctcctacttcccttgccctttaattcatgtgacatttttctgacatgtctgaatattctatggggctcatataagctgtcatcattattcatcaccatgtgtgttgtgactgtaagtctgcctttgatccagttcaagaaacatttgtctgcggaatgagcacctattatgtattaggcccttggcttctctcatagccgttaaaatgatagtggcatatttcaaattttgtcttacagtatttaaatatgacatttcctaaaatgcaaattaaagagctatctggacatctcgtaagtgtgaagtgtttgagacctgtaaatcatgtgcattataaagcttaatagcatagaatacatgatgtgcatctcatgtacatatacagaagcacagagagtgaaaaaaaatcattaaaatattccaaagggcacaaagcaggcattctccaaatcaaacaccactctgacttcatccaggtttgcttccatgtgttatagttgcttagtaaatggctataatatctgttgagtcggaacatagataaagtgtgctgcatagttgcatgtgagcacacctttaattctaacacttatgatcaaaggcaggaggatctctgtgacttcaaggtcatcctggactacatggtcagttctatgatagctaggactattgtacaatgaccctctcttaccataaataaataaataaataaataaataaataaataaatgaaagaaaaaattgtaaaacataaataatgtatttcttgcaatcatgtagtcaccttttctttctttttttccaatcattttttattagatattttctttatatacatttcaaatgctatttcaaaagtttcctataccctccccctgccctgctcccctacccacccactcccactttttggccctggcgttctcctgtactggggcatataaagtttgcaacaccaaggagcttctcttcccagtgatggctgactaggccatcttctgctacatatgcagctagagacatgagctctgggggtactggttagttcatattgttgttccacctatagggctgcagaccccttcagctccttgggtactttctctagcttctccactgggggccctgtgttccatcttatagctgactgtgagcatccacttctgtatttgccaggcactggcatagcctcacaggagacagctataacagggtcccttccgcaaaatctttctggcatatgcaatagtgtctgggtttggtgtagccaccttttctttgataatctacatgccatcataatagcacccttgagatcagccattatgtaattctagattataggaaacagaatatgccagaagggctgttctggaatatgtaatgggagcatgagattgacaagatttcccaagcctgctgagccaggtggtggagtacctgcaatgccagaccctcaggaaactccacttttgctcccctcggagaagatcatgggtaattaattaggatgtggactatgcaaggcagcagttgctttaggtctttagtggctacttcttaccttagaacacgcagaaacactagctgaatatgttttgaggagcagctgccataatcagggcatggcataagtggagcaggaccacggaagtctaaggtggtgagtgttccctatgtctttgattattgaaggtatcagagacagagcaaatacctttacccaaatgtatttctgaatgtatttctgaagtggggaggggagaaaagaagtggtgagttcttgtttgtgttacctgccaaaattagtcccttaatttgaaattctttcagacaaaggttaaaactagaaacaataataaggcaatctgtcactgatgaaaagcttgccaccatgctagcagtttagaactggtcccagataatgtcacacacttttctcatttgcccaattctccatgtaatggttttaaacggtactcttatgaaataaatagctaaatgccaaccacacttttttatggcctgtctgatattttggttgtttttcaggagaattggaattttgaaaattaaataaaggtttataaaataccaacttcagaaagttttatttaattttggaataattttattcactcttcctacccccctttctctctgcaacagggtctttattaatttagtctagttacttagtgcttatattaaataatctaataaaaatcagagttataacataacgtttcccaaatgtgaaacagcgtctattacatgggacaaaatctttatgttgcacaatgtaaaaacatgtatagaattacaagacaccaaatgctactgtatatatgtgtgtgcacgtgcacatgtgtgtgtgtgtgtagaatgtttttgtactgtaatggggttgattatttctaaaacatttagaaatgctgcttattaccaatagtttgtttataagctactctaaaaattaattttagttcttaaataccagtaatcttccctgtaatgtattattttctgtctttgggtgttttgcctgcatatgtccatgtgtactacatctgtgcttgttgcctatggagcctagagttgagcattggctaccttggaactggaattacagatggctgtgagccaccatgagggtgtagggaattgaacccagttcctctggaagagcagcaagagcttttaatggctgagccatctctctagctcctaggttaatatacttcaaaaattaaaactttggttgtttgtgttggttaataatactcagattgttgcaagtggatcagatatgtgtggggaatggaaatcatgcacttgcgtgcacgaaagcgtgtgtacatgtgtcctgttgatttctacatgaatttatataacaatagagcctcaatgtttattctgggttgttatttgtttttgtctggtatttgcttttgtgctgttataaatacaggcaggattaaatgcattctaggctcccagactggtgagttgagaggtttcattaatttgtgtaaattacaaaggcagctggataaagtagaatgcccaaagaatacagtgtaatttccatttccttttacttgaatgcatttgaaatatatagagcctttagaatcaaggtagacactgttggtctgctttagtaagttgtgttggctctgctgatccatgcacaaagaagaacaacctgtgttttaaacctggccttttgtcttccttttttccttctctctcctcaccgagcatcattccaccacaggttcagcaataataactacaatgtatgccgtgttccttccacaggttgatgagttagcatagccaggccacaggttagaagcgcaggctgaattattacatattgctgggtagtgatttcctgtgaacttatttatggataaataattctctgttcttattagataggacagacagttttaaattttttttttaacaaagcagagcctaacaacagaaaatgatatgctgtagtgcagggacacaattgctcgacttggaagagggcaaacagatgcgatcaatgccagttctcctggttttgcaaggggtctcatcagctgttggtgtattgtggaaataatactgagaatcagaagccccaaggcttagttattctgagactagagtttttattgacactctttttgctgagatcttttccagggagttatgagatatataaactccagcctttggatattaaaactaatgtctcatttttccccaggttgagttttcactttgccttttaaattaatgtcaggatgcacctggaataaaagagagttactcacggagctgaattttgagggtactgttgatatcttgcttggttgcatgcatctgtctcctacatggattttgtcagcaactccctccatgtcactgacctttgagaactttcatgtaccgtgtagatggcgtaaaccttcattgtatgaagtagttcttacatttgaggtacaagggtgaaagttatcatcctggcttatctggagagcagctttacttagttgtgtgcttagcaataagcagcttctctattcaaactccataatgctagggacaagatgcattggtatctctttgcatagctgtgactcagagacatatgagaaaattgtgtctagtggatgcttagcactgattacaaaccttttgatgttctgttggttatagggtacatcatcacattcaaggccactttaagtggtttctcgaatgttcagctacaatttgcaatatcccaaactctttcatttttatatattaaagattaataatttgaaagagaaattttgctttgactttgcagaatatgtggtttctcagtctaaacactgataaaaacacagaaaacactcatacatacacactgatggttccttctgtggaacgtcaactctttgagtctggaaggatattatattgagagagtgaaaaaatggtttctgttgttgcatctttttaattttagacaaaaattgcttccatttccaacttaattttatgtcactaatgggaaatttacctacaattgcattttgttatttggtctgaatgcattacacaaagagtgaattggcattctgtattttagaatgaacagatttgtctgggtataaacagttttatttatattgtgcccaattcaatcatgttaacatttgtatgaatttcaactccaaaataaaggcccataatttgtgactcaaagaccttgaaactgcatctgtaatagtcttcaacaccaggcattttctgaatgtttgcagataacgcatttcttggatgacttaggagatactgtgtctgcagtggctccttgcagggaccattttccccagagaactgccttttggtcttataacctggtgattccttggtttcatttggtactttccatcagaataaatgttagtgccctgattgacacatgactgaggacaagattagccctgctccagggactcatttttgggaattggcaagagaattcagacttacagcatcggggctgagtgtagaaggggtccagttgtccaaaccttacaaaatgaagcccagttcctagtcatggttgtcatccactaatttcttttaaatgtaaacgaggaaaatacctaattaaaaaaagaggaaaaaaaaaagcaagctactttctgctaacctttagctcacttgcacatataatagaaactccccacagatgaaggaatggttcttgagagaaccagacattggatgtggtagctcattataattcatgaggctgaagcaggaggatcctgagtttgagcaagcctcagctacatcatagtcagaccctgtctcaaaaaatggacaaagaaacaggaaaagcaaaaccaaaaataaacccagacaataagaagacttggtacccgtaaagcagtgtaaagggatattgtgataagactcacaagccaagtacagattctctccgtgcagctgtgcagagaaaagattacttcagataggttgcttagagttgagctagtcccagggtgaaatctgaagaatgttcatgattctagaagtgactcttggggatcagtgttctagacaaagtgtgctgtctgttcagagcaagaaagtggatcatcctccaccataagctttactggacatgtgcgcatgcctatctgtgtcaaaagaagaaaaaaaatctgacctcagtcatgtttgttccctttttacttgctggagttagaaagcttagattgtggctttagaaataacatcagtatactgccgcttaccccagagttattgaggttctcctaatgccgtgagtcaggaactatccctagagcgcctaggacaaatttaaaattcactgtcaaaggctgggatgagtttgctaactttgtaattaaccactcctgcttggattgttgtggcttttttttttttttcttcccctagggtagttccctctattcatccagcactcttccaagagaaaatcatctcctatagctttgctaataagatgctgttgtgagctcactcagaccttacaaagatgttctgctcctggtttttgttgagccttggtcatttggcagtctctactaattaaaagcctcatactaatgcaaaagtgggcatagttatcatccccactctgtagacaggaaaactgaggtgtagagaaaggagacagctggccccagatcatggtttgcacaaactcacccccaactcgctgctaattaccttcttgcactagagtaactggaggcttatctccatccatctttaggacaaagctttgtacaaagggctttacgtgtaaaatactcagtttccttgaatcgaattctgtgtttttaattccatttcatggacgagcggattgaggaacagagacactaagtaacttgctagagtcacatgatcagaagatgggggagccaggaatgatctgtggcagttcttttggaagcccacactcattcagacttactgtggtaccaggcttcccagtttgatttctttaattaacatttgactgctattctaagtaatcagggaaggagactgtttccaaagtggattaatgcactaggcagacagccctgcttgaagggacggcacattgaagagagcccctctagccattctgccctggaggtagacagttgagtgtacactgtgacctctcgatagtagagagaaggaaaagcaggtactttctccctggccagagagaatagcatgtaccctctgtttccttgaagctgtagagaccagcttggggcagatgctctgggtggaggtattcaatgctgtgaggcacctgcgtgtctagttacagcctaaacaagtctcttcctggctcattgaggtggtgaatttacctaaatggagatagctgtcttcaatctaatacttccaacacacctctctctttaattatggtttattttttacttattgggtgaacacgtgtgtgtgtgtgtgtgtgtgtgtgtgtgtgagagagagagagagagagagagagagagagagagagaggtgcaagtgttaagagtgcatgtgtgtatgtgtgcatgtgtgcacattagacattgagtgtctcccttcatggctctcaccttgttttctgagacagcatctctcactgagtctggagctcactgatcagctaagatgaagggccacacgctgaggcctctgcctgtcacagtgccctggcactagtgttatagacacacaccaccatgcccagcctttgtgagtggtaaggcctgcaaggcgggcactctcctgactgagcccccaccccccaccccccataccatatcgcttaggctggccttagattcactgtatggcctaggatgtctgtgaacttactgaaattatgggcatttgccaccatgctcaacatgtgtaatttatatatgataaacatatttatattaggaggttggtttgatgagttttgacaaattttatactagtgcagccactagtctgagcaagcaagcccttcccagtgaattctctggcctgcttgtctcaattctgttcccataggttcccatcttgctgttcttggatttgatataaatgaaaccacacaactatatttggttgtgtctgcccacactgtataatgtgccttaaaaaataaaagggggtaaagtacagagactcacggcaggaagaatgtcccagaggactggccctgaaagttttcaggcttcctagtcttctgattcccttcatggtcagggcatccaaaatgactcctgggttctcctctgtgccaatcagagagcacagccgctgccatccacttctcctagtctcttatcagaaggtagaaaacctgtgccaggaggatacagccagctgtgttgaacttgtgggtgatcacgacaatagcttttctaaaggaagtggaagctgcacaatgattttcttagaaaggtagtaggttggacatattctgcagtgtccttttcatgtggcaaatgtcagaaaagataaaaggagggaaggaagcagctcagcctgctccagggtggttgtccaggggtcctgcatgctcatttcgcatctactctgagctgagccgcatcctgtgcacttttcattgtcgtgagagggaatgttagggaaactatccctcacaaaaaacccaaaaaaaaaaaaaaaaaaaaaaaaaaagaaaaaccaacccagcttttcttggcaggggaacgatgacttaaggagccagaactggagacatacggtaccctgaatgggagccgcactgcttagctggagccggggccaggcactatttatactgtagcatattcggcagcagattgttaagtcttaatactgaaacagtgcatcattttaatatttttgttctgtttcttccctgttttcaagcattatgtcaggcagtacgtgttcatttatctcacttgggacaggacatgccctcatcagagagttcagcacaaccctctgaattttgccccacagctatggagtcattttgtgaacctttgggtatacaggtgttctctctcatcagtgataaaaatatatgtattccgagagaacagtgtacttagactcacctgtattgtcaaaaggaaaaataaaaatgctatttttcttttatttctaaaacatagcatttttatatgtgacattttctgacatcccatggggaccatcagatttttcatagcatgtaataaaagttttgttacccagtgtcatttgtgaaatgagttctgttatttttcttcatcaaatttctgcataccctgcgctctggaccagaggggcccatagaaggaatgaataagttagctttcaccacaaactgcctgagtatcccatgaatcttcctgaagtagagctcacgtccgtccaaagttgctattctttgcagcctaagctagcacatccaggcttaccacagacaccaggaaaagaacccaggaatataaacagagaggcagctgaaagcaccttaggtgacacctgcaaccagaaagctagggaactctgctccaggggctccaagtactgtgccctaggaatcgtaccctattcacaatatgactgtgtagcccacacagcagtcttttttaaaaatttttcaatccaattcaaaatcaagtcttatatttatatgaagcttgcttatttgagggggtcgtggtctgggaaatcagtggccctgtatatttagcatcagttttaagttagactatgaaacaagactttggggaaaggaaatatcagtatggttttctaagtaatttaagacacaggaaaacataaaagaaccaattgtccatgattaaatcccatccctttcattccttatctctcttgtgtagttcactaacccagttgtcagccagaaagcaatagctcattgcactgggttgtaaatgctcagagtgggcgctcagtgttgactattgaatgaccttcttgacattgaacaactggaagggtttaataaatagcagatacatgtttactgtgcttttcttccctgcgcaggaataatcaagctagggaggtggaaccccctccccctcagttatgtgacagacgcccctgatgcgactgtggccgacatgctgcaagatgtctatcacgttgtgacgctgaagatccaattacaaaggtggggatttctgaaaggctgtctccgctttctctcaggggctgcatggaccatccattcactgtggatatcagcttggctccgttcatttctagacagtgggtaaaaggaagagagggggagagaggtgtggagctggggatgcggcaccaggcatctttatagtccacattccaactgctttacgctgtttgcagaggcagtgaactgctcactcaggggctgcctgataaatcattaaaaatctccagggcaggcgaaggctctctgagtcttctcttggctttctcaggagcttaaggcatagcatctgaagcattgggtccctctgctgtcttctggtttgtctgctgaggggacggttttgtttagagatgtctttctttttgtggtggtcagtcagtgaaagcctatggcctctagggggacctcccaatgtctagggatttgctgtagccttcttatcgtaaactgtctgcaagttgtgtcttaagcaatgttgtccttcaatgtaaggattttaaacaatgatctccttttggagaatttttactttaatagggactgaccaaacccaccctttgctagcaattcttcagggcctttctcaaaagttcttctgtgactgataaagagtcctgtctacttttctctggggaaggtgagccttcacacttgatgttggtggaatacccataatgagttttggctagggaagaccatcaccacagtactgtgtcacttctggggtccactggagactgcagaagcagcagcttgctctccttccctttcttgggaagcttctagatgagacactgacagaggacacagaagccacacagcatttgctgtgtggtcctgggcagccagggccatgggcgagggcctcatgtcactcactctccctctgttttgcagttgttcaaagttggaagacttgcctgcggagcaatggaaccacgccaccgtccgcaatgccttaaaggaactgctcaaagaaatgaaccagagcacattagccaaagaatgccctctctcccaggtcagtgcctccgtcttctctgtgtcctctctgcagatacactgcactgctggaaccctggtctgagaatgaaagttgtcatttccagaaaagctttctaatggcttttaatcagtgagaatgcatgagacatttttgaagcacagtcaccaacttccccattgtgtagatacgtcatggtgatagagggagtcacttaagtttcatgttgaaacttcttctgctggttaagtggcaggtgaggccttgtgccagacctctagttccaaagtccacattccaagtggttgcctttcttcaccggcaggagggattggccatgcttaaccatacatcttggtatgtaggtaattctttgctgtttcatagttagagattgatcttttctatatttatatatggtatataatatacacattatatataatatacataatatacattatatataatgtttgtggaagttttttttttgttttaaaataaagttaccacacaaaaatgcttcattagaaacaatgacaattcacttttgtgtgctcagagactaaaagagactgtgaacataagaaacaagcactccagggaaggtactaaagctaagtcataaccggtttccctgcaggagcttggctattatataaaggtttcagtggatagtatatgttttcttgaacattgcaatggcctatcatttaaaaaagaaaccttgaagacagaagagaaatgtggagaggtccataaaaaggcagcaattgcagaccatgtttaaggggaagtcatgatttagctgttctgtctggccagatgctagcgaagtataggttgttgtgtgtctgtatttatttatttttatttcacctctccaagcatgcataaatcggaatagccactcttgtcccctgatgcttttgtgagtaaccacatctacaaaagcagcctgaatgtgtcacaaatacagcatctggtgtctcatttactctcggctggcttttgactacaaaacttcagtccttgagagttttgatcatttgcctcagcagagcttgctcactcttagcacagcataggctcttatgagggtcaagagggctgagtcatagccagccttagtgacagaagtggaagggaggacatataactctaaagccatgcaccttccactgttcctggattcttgatagaagtctgggtttttgtggtaaaatatctgaaagaaggttagtcttttaaccctttaaagtctgcgggtgagtagtatagcatccattcttgatgctgtataaccaccacccatctctttacaacttctgtcaccctacacagggtcttgaacccctgagtgatgcttcattcttttctctcattaggttgtgctaacctcctttctcacacaagtggggctatgagaagatagtagaggccactagtagtgacactgcatgaattttatgtgacaaataatacctctaaaacaatctttacctttactgttctaaaagtatcattataatcttgagtttagtgtgttctgaaagtgagtaaagagtagacacggtcacccactgcctgccacttgcattagcagagtacagagaagctaggagccacaatcctgtcccccaggatattcccacgagtgcagtggctgccagtcaccacttttaaattctctctcatagcagatacattatgtatctgcatctccccagctctgagaatcacatggcttttcacacagatctatcccactatgcccacaggaatgggtgaagtttatccaatcattttatctttcgttttggaggaaagggaggctctcaggcctccgtctttctgcatttttcttaataaatcatgccatgagtgagtggaggtgtcagcctttgcttgttttctgctgttactctgcctttgtttcagacaagatccctggctgcctggaacatgaggtgctcatcctgctgtcaacccttgagtgttggcattacagatgggtaccacacgccagcctcttattagcttttagaatcctctaggttccttcctttttctggaattctaaatcctttgactgactcatgagggactagaagtcatcattttttgtttgggagacaaggtcacatgttgtaaccttgactggcttgggatgtgcttcatagagatcagactagctttgaacttacagagttcttacacttctgagttctaagtgctcagtcatgggcacgtgccacaaacaacgttcatgtatctcaggctgtcttcaggcaatgtgacagaggtcagccttcattacagtcttttttttttatctctgtttgttacatgggtattacatatgtgaaccccccccaccccaattattcttttttttttgtccccttgtttcttattttgtctgcaaacagttgaagattatgatggaggtagtagggaacattttcttctttttgttagttagcttctccccttaagaaactgagggccagtgagagggttcagtggtaaaggtgcctgtcacccagcttgaaggcctgacttagaccctgagatccacataatggaaggaaagaactggattccaggagtggtcctctaacctacatacccaaactgttgcatgtgcctctacacaagctaaataatgaaaaacaaatgtaattaaaaatctacatgaagtaaagtggagtttgtgtgcgggaggcagcccgtgagcaggagctagctcatggtggcctgcagcggttcctgagcagagcttcccagtgtagctaactttggtcaatgagttttctcattgtcagtctctaagctgtcagtttggaaatcagaccatagttataatcaggtgtgacacaatgtcacctgggcaacttaaaaaaatcaaaccaacaagtgagtttaaaatttatctcaagaatctaaaggcaaacttatttttagacatggcaatctagctaaaataagtatagttggttatatgtcccttaatgatgtagattcatcttgagaaatgagatgattccatcagaatcacatgaacatacagagcatgcatgcagaaatgtagatggggaggtctgtcactcagtgaccttctggtgcaatcgatagttgtagatgtgagagatgtacaaaggtgctattgagacagcatggcatatggttttccagtaatcttcactatgtaggagaacatactcttaaaaaggaggaagaaacaatatagcatttacataaatcaataccaaagatatttgtgattgtcaggcattacatattaatatatagttgtgtgtgctataggtttttttttttttttatgactggcaatgtagtagatttgtttaccagagtatgcctgaaaaacatagcaataacacattttgttacaatgttatggcactgggagattggtgtttttcagttctattatatatagtctttcaggaccattgttgtgtgtgctcactctccccgaggaaagtacccttccacagcacatcattgtgtgttgaatacagtaaggagaatgatatatagtagtgtcagaatggaaggtgggaaggattttaatcaatattcatcccattctgccttcactgtctcacctggtttaagttgttatcgacaggctgtgggaataccaatagcttggcagtagaccacttgcttgacatggaaaggtccaagctggatccccagtaccacaaaaaggaacaggtgataaccgatgagaagatatactctgtgcctgtgatagtaaattgttaaaatggctttagagtgggttgcgtggtacgtgcgcattctctgtgtctcgggacccctggaaagtactggtttccatagaagcagaagtgcatgtgctggatctgtgttagctcctcccacctttgcacatcgctagcaaagtgtggaatttctaaagtactggtggtaccaccacagtaagatcttgtagtacattccaggatctcatgattcagggtcaagccgccataatactcttatctcctttaagtttagtggattctcatgttaaaaatgggatgattccatgcaccatgacctttgctgtacgttatttccgaaagatccctgtgcttttaagttgtcatgagtgtgcatgaagacctacctgtacaactactgagtgtactctgtgcagagagttaagatgaataactgtatcacaaactcaatcagttctttctcatagttaaaagttgtcattacccaaggcatgtctatttttgctacccaactccttggcttagctcatgattgaaatctattctgtgttctgaagcagtagagacactcatgtgtaataatctggggaagagagtttgaccgaggctgttgcccagcctccccccttttaaagcagatgcatgaaatgtgggccctggtggtagaggacaccttctccctgccttctcacagaggctcaagatggcctgtgcagcaccacagaactggtagctggaacagcgtctagagaatggctagagagggagggagggagggagggcttgtctgggaccagagtgttgtgcgttacagcctcacctctggacctggaagggttaaaggacagctctagaaagtccttggatgctttctagactagcttctgaaaggaagtctgactttgacttgtgctgtggctgtctatcctgtgccttcccagaagacaacactcatcgcaggctaaggagatggcgagcgagcatgttttcgagttcacaccccagtgtggctgtggcagctttgattaggtagcttccatgtcagaatttctattattatgacatttcagtttggcatttcggaatttcatccctgtcccttcatgtgttaaatttcaatgactcagacatcccacatcagaactatgtgagacacgaagaagaagaggaaaaaaggaccggagatggcagcttgtcactttcctcaaggtcccactgtctaggaagagcaaatgcatctcagaccagagagggagctcgtgcaacctgctgctgcacagttttatttggttacaaagcagatcttgccaaggcagatcctcgaagggtggtaggcaagacatcataagtcttaggagacacttggatgccagtgggtttttgcattttcagtgttgtgttcagacccaggagagtgaggagctctctctactatcttacctcagagggggagaatgttctttggtgtgatcagctgggtgaggctagccatctgctgtgtggaaaaggccaaagaggtttctgtgcggtgaactggggtccctttctccagatgtgcctagtgatgaaacaaagagtcaagcctgacgttttaaatgtgggtctgtctgctggggcttgaagtcccctgccgtgttgcttactttggttccttgtcatcctctttatctgtgctgtgttatagaaatgtcattagaagctctaagctttcctgagctcctccatttctgaatgactgactttctttctttctttctttctttctttctttctttctttctttctttctttctttnnnnnnnnnnnnnnnnnnnntctttttgggacaggtgagacttatttataggcacaatctcaaacctaatgcaggttattaggaacacttagctaagtgttcatgcccactctctgttacacaacatttatagaaatcaagtgtccatacgaaacagacatgtgtaatgtcagtaagttcaggtatgagtgggtccagtagtttggatcagacatagcatagagtcaggaagtatctctctgtaggacatctaagtcaagatgtgcaattacaatgtaaaatccccagtgcagaatcaacctatgcccccttgcttttttttcctaacctcaggaacaaacagatctgaggcaggaggggaagaagcgccgcagcagtcgtgaatgtgagcgctcagaaagttttagttcagtttttttggttgaaacacagtagaagtgttaggtttggtttcccctgatcgaaaatagcactgttaagtttctcatttggtgaattttcacacaagtgataatcacacgtttctataaattatattaatttaacttatttccctaaacgttgttctgcagtgtgtagcacggatgttctcagattcttggctgtgtaagcttgttgcagttggaagaggaacagagacatctgagaagcattatctggatgctggtgctggagcatctgatgtcaccttgtgctctggctcagcagcctggacgtccctccttctgcatttagtctgtgtgccctaacctctctgtctttgacattactctaggactggcttttgttttagaaagcatcattattatacaagtatacttaagcgatagtgaactccagtcaccctgttttgttattaaatcatttcgtttgtagaggagtcatagctttaagtttaaaagacaaaggaaacctgtatggactgtgtgcagtgtgtctcttctggtcgctaaaataagatattcttgtatatgaaagctaattcatctctcccttcttttcagagtatgatttcatccattgtaaatagcacatactatgccaatgtgtcagcaaccaagtgccaggagtttgggagatggtacaaaaagtataagaagataaaaggtaatcttcttggatttttttgtttttaaaactatgtatagattctcaggtaatgagttattagttctttgctaattgtatatacacatacatacgtacgtaagtatttttaaaggtaagattctaaatatttttatcgtaaaattcaacccttaatttaggaagggttgtaaataagtattaggatcacaaaaacaattcttagcataatttatcaactttgtgatttctccagaaattccctataaaagccaaaatccattaggatggaaatttaaaagttttattccatgttacataacacctaggatttgactactgattaacaagttggaatgagcactgacgcatcaggaaagctttggttagaaacagagttgtgatgtgtttatttaatagagacaaaccctgaatcgtataccaaccaggcttctggcaagtttgaactcaggtctggtcttcaacttactaattacatgaacttggtcaaattatttaatttcaccaagattcaatatcttcatctaaaaattagaaatgaaagtatataggtcagtagttctgaaccttcctaatgctaccaccctttaatacagttcctcatgttgcggtgacccccaaccataagattattttcattgctatcttataactataattttgctactattatgaatcataatataaatatctgatacacaggatatctggtcaacctacagattaagaaccattggtctagatcctttagaagctgtgaggactaaacaagataatattgacacagaattacttctgaataactagtagttaagatatactactactacaatactactagtactactaaatattagtaggaccagaagttatatattacatatgaaattatacgtggccttgaaaacagttcttatacataacaagttagatgctatttagatcagctagccatttatatgagtgttgttttatctttgcaaacatgttaacataaaagtccttttattctgtctgatttaggcagatgtcctcgtctttgaggagatttggggtaatttttgtgacactgatgtttgagaaccgctctagtctatagtttgcaagactgtgacgctgtccatctgactatacgatggtgttcacagtcttgtcaacagctcactgccctcattcaagggccacatgatgatctgctggtaggtagaaatgaaggatgaattctgttttattacttgcaggcttcctcgggggagacaggctatgtatcaaagcaatacttctggctattgagtgtctgagagcttgtttacaagattgcccttgagcaaatgagcttttggattcatcagccacacaagttagatcaagaaaaggggagagcattttatgctaaatatactatgtaaaaggaagtaaaaatcttgaggtatccagaagttaagtgtgctgcaaactgagttaaaattgatttcttttcaacatattctcaaattctttaagtcctttttattctggtagggtatttgcttttcagtattaatacttactcccatgtaagagaaggtaaataactccgcatcacatgatgtgatggtgtggctcagaaggctttcttttcttaaagtgtcctctgcgagttttctttttgaaattggattgttaaaatgcttgaacataaaaatcaaaagaatcatgcagcttcaaggttgtttactgatcacatttacctgctgttgtgagtaaaaagaagcgagtgtgttcttttatatgctggactgtaattattccagcttctggaaacctgggaactatggaagtcacaaccagtgtgtgtgtgtgtgtgtgtgtgtgtgtgtgtgtgtttgctctttcagagactagattctttaagctgtatttttcaagatagtaaatgcacagttaaatctttaagtgccataaaagtagattaaggccttgacttcgttcagtaggtcaaggatctacacctgaagaagctgtcagacactgtgtacacatattcaaagagctagtcattgctgctagaaagtgtgtgtatctctgtgtgtgtgtgtcagtaggaggaaaaaagggaaggttaaggtttgtgtgaagtaaacacaagctgccatcaagcagttcaagtggtgttgattcatcagcccaggaagtgggaggaacaacagagaatgcatggcaggtataatggtgtgcagaaaaccaacaccaaggagagtgtattttgttaactttctaccctcagaaaacagaagtgttgagcctagctggttcttttcatttgatagaggcttcttgctaaggatgggtattgcaggagattcctgtctagatccacttctcatggaagcatcatggtttgctttctaacacttgctggtgaccatgccttttcaaaatgtacagaagtaatgatattcaaatctggaagtctgtagcaaccagagcaaactggtaccttcgcctgcttcctgagaaggcagaagtctgagaggcacttacctcctggtcaagtcatgcagtcaccagcatacatctaccatggcctatgttagctgcagaaggaaatttgcagccagcttaccgatgtcctaaacaaaatgcaggctccatccttaaatatgtttcctattatctgctaatgtctgttttaataaaacagtgggaactaaatggttgcttcttaatcaaaaccatgatttcctaaacataagctctgtgattctgttacaaattgccacatctagatctcccaggtcaattctttttttctattctcatagaaataaataaacagtaaaataattatatactctaaagatcaaagcaaaataagattcaaacctggcaaaaataagagtctactggaaagattaaaaaaaagagaaagatcagatggcaaattctatagttaatacttaaataaatataagaaaaaggaacaatcaataatttgatatcattaaaaacagatgtaaaaactatagacaaatggaattgtctaacttttgaagtaaacattttaatgtgcattttttgaatttgttgttgctgtatctaaactatttacacatactctttaaagggtcctaaattggtttggcttagcttgttgactttattttccccagtgatcacagaagaccttgctctgtttacctttttgcttcaatttcaaagacaatcaaggttgacagggacatatttgagttaacattaccatgactttaggagcaatgaggaaacagtttgtatactctggtttcaatgtcctactgtgaacctagtcccaggactttctgcttctaaggaacatggggtggtgggtggcatgttaggttggtctgtacctgtttttaaaacttgccattcagctcaccctgtctaggctagattttcaagagcactcaactcctctgtataaggaacatggtgtacttttatccaaaaggaaagcaaacagccatctagtgtttaggtgttatattagtgtaggcagagagagaatccatagtcacctagatgtgtttgggttcctgtataatcattttcaaggcttggggatttactcatggatatcatcttagtagttgttttgttaaaaaaaattagcctttaatcaaactgttttttgtaagaactccagatatgaatttaccccatattttttatgaagccaagtggcagttgtatttgcagtgtaacggattccgttctcacacactcacagggcgcataggagaggtaaggaaatgggccgagtgaggcactcacattggttctgagtggatccttgattagtgaattcaaatagcttcatattaaaatattgttactaaaacctcaaattaactatctttgctggaattcatctcaaatatttaatgtgtctcaagaagtgaggggtcatttaaagttcatacaaatactgatggctattacaaaattatttatgtcatagaataatacgaccagaatgactggaccaaatcaaaccctgcattttggttagggtcaaaatcatccccatcactttcctgaatcattgcttaaaacactcttgattgctagttttcttaattttatttgtttacttgagtctgtttagaaaaatattgcaaagctgggagaaaagattcttaaaaccagtgttacttccttgagtctggttgagtctagtaatcagtattttatctgaccccgtctaatctactcttgcaagatcaaacgtccaggccagcaagcagatagtaaacaaagcatgtgaagggtttcagtaaacacaaagattagatgttgaatgaaaattaaactccttgaactagtcctctgtactaaagtggttaagtgggttgtgattaaaagaaataagtaattatgatcattatagccgaaatgatataatgttaccacatttaaagcacctcttgtacccagaaatgattgtgtcatttacagagtggtgcctcagagttgaatagagaaatcagtgcctcctgacctggttctttaaggcgccccttgcttcgccaccgtggtatcggcggtcaggacaatgcctttaatcaactccctgtcctcctgcctctgctgctgtttagctctgatgaggtgaaaggaacttagttttgtctacctgattcttctgagttataaaaggaatttgctttcaccttcaggcctaaacgaaggtaccttgcaaggaagcctatattatccctttttgaaagtaatgccaacatcaagccctttgaatttttgataaatattggatccaggagactagaagcagcactcatacaaccagccatttctatcttgctggttttcaggcttctcaaagagccttgtgcacttttgctgcggccattgctgatgtgtatgtctcagtcaccttggccgcttgctggtccaatcagcagcatatgatagtgacatgaagcagaagaatggtgtgtgagagtgttctgggtgcttggccctcattagctaattccttccttggatctcttgaggctcattttagctaggctggtagttgcttacttttggcttggatgtatttattcatgagtgtttaaagaactataaataatttttcttaataacagaattgatgaagtaaaagaaataaacttttctcctatttaattccatttaaaatgtatttttaaaaagatagatttctgtttccttagctaccagttttctatccatccatccatccatcctggatagttacaatctgacaaactaagctcctggtttctaaaagtttgtaatatatacaaagcagttactagtacaacttgtgttttaacatttgaaaatgaactagaacatctctcttatatagctggaaggattctaatgataggactatcacagggaccattacataggtcttctgtgcccaaaagaaaaagattttaaaaagaaacaaagaattgcagtcataactagataaatgatgtgagtaaacaaatattttgtgaatgcttgccatagtccctctgcaatggtgatgtccacaagaaacacccataatatgtaagatatggtttctccttccatgcgtgttgcctcagactggccatggaagcagcccttgaaatatgtctggacctatacagtcatgttgggagctaatgtggtgggaatacagagaaaggtcctgttctttacctgttgagtgacagtattcatttgcagaaagcaggaatagcggaggtggaatatgggtgtgagaacccatggcttttcagggagaagaaggaaggccatcttaggtgcctgcatatggtgaggacagagcaggacgaatgaagtggtgtaaggagcatggcatgtttagaattgttccctgtgtctaaaatggcagcctattcatcacgacatcataatggctaggacttcggtcatcctgtcagcttgctgccagtataacaagaaccaaagataatgaatgagcctacaaagagaagtttctgtcttggctcacagttttgtgggtttcaattcaagatcctttggtccatcagtgacacatcagctatagtcattgcaggggtatgtggcattgtacttcccactctgccaggaagtgaggaagacagaaagggacaggggtttgaggaaacaccttgatgatctgaagacctcgtgggaggctctacttcctgaagctctgccttccttatagcactgctttagggaaccagtactcatgcctttgaggacattggagattcaagctgaggaagcccatgaacaagaagagagtaagaagctggagtggcactgcattggggtggtgtcagacactggtgatgacataattttggggaccgtttattatggatgacatttgtctataacttgggcattatggctaggaacatagagctcacatattatgggactttggaagtccagatgtaacagtttgaggaaccacagaaggtttttcagtaaaagtgcaatataataaaaatggttttaaaattcttccagagagctgggtatggtgagtcaggcctaaagttctgccaggtgtgtgcatgtcaggaaggagagtgtgaggatgtgaagaggaggcatggcccactcacctggaaataactggatcatacatactgaatctctaatagtaatctatggatatgaaggtgacaagaggcatgacacctggggtgtgtggggcaatggtgagaaagacaggaagccaccaacctgagtggcagagcatcagtaaggcatggcgagagtagatagcaggctgggaaaagaaagaggaattaggtcatcatctaagcttcagaactgagtggctcttggtgtatttgatggaaataggaaatcctgactggagagaaacttgttgatcatttagaagacaaaaattaggtagctagaaatgtcagtgacccaatgaactaaggacagagagaataattagtcgagacttttttctttttttttttttttttggactggatagctcaagtggaaccacaggaagaagaggaggaagagccaccttcttcctcctcctcctcctcctgctccttcttcttctcctcctcctcttcttttcctccccctccttctcttctttagtaattttttatctttgaaaagaataatataattacatttcctcccttccctgtcttctctccagctcctaccatgaccctactcttgacatttctcaagccagcatgtgagaatcagagacctgctttgatttcttgattgctgcctaaccaggtgattcctcaggggattcacaaggtcaaaaatggagatgcgcttgctggaagctcttacctaccagtgctctgtgagatgccaatgctgaagtcccattgcctcacgagggatggttcttcagcctgctacttgctccactgatgttgacctttattctgccttttgcaagaacttgaccttttctgaatccctaaaggaatttccattaatctagggcagtggttgtcaaccttccttaatgccgtgacccattagcacagttcttgttgcgatgattcccaaccataaaattgtttttgttgttacctcataactaataattttgatactgttataaatcttaatataaatgtctgatatctaacccccaaaggtgttccaacccacaagtttcgaaccactaatgtagagttatctctggagtataggtcctagattctggtttatccttcttctaggggaaaaaaacaacctctttgaaaaaacatacagccaaaggagaaggtttaaatgaaaattttaaatgatgaaaattttgtttaattcatacagctaatatccttaggaagctaatactctattaaaataatcccttcctttcccattaattagttattgaactaaagagttaataattgccaattcttctggaaagaataattacaactttactgactataaattgggaattgttcacacaaagaaaaatacctctttgaagttttgtgcttttttttatagctagtttagtatttttccaaaaagtaatggtttataacatttatgcttcatacaatcagggagactgatcttttgaaaagaatggatcaggagtgattatctcctttaacttttcccaataggttgaattaaagaattaacatgtatggagtactaaatggatgaggcaggctctaaatattactgttaagtttctgcaagtatggctaattttttttcatcatgtgctgaatttactttaaaattatagcctagatttgaaagcaagagtgtgggcatcattagatgtaaggagagagagagagagagagagagagagagagagagagagagagagagagagagagagagagagagagaaagagagagagagagagaaaatatgaatataaatatatatataaaaagaaatgatcgatgttatcaaactgcttggagccagggcaattgtgtcaccagagagtgaggctgtggggcagttaagtgaacagtgatcactttttccatggagcttaatggatcctgtgagctttcattgccaaggaaacagaggtgtccatatcccagttcctttatagtggatgcctgtgttctatagatcttaatatgatggggaaaggaagctgataataagtggaaaaatccacctaaggaacccagtcatatgatattatcacagcgccggctggtactcctcacttgtggggctgttttattgggagttaacaagttggctctgaatgtcttgctttaggcagagactttgcaggcaaattcccaacccagagacaaagtctctgtaacaaatttaaagaaagaaaaaaatctgtaggtttggtagacgtaagagacttagcatccctacgcccacatgcctctgccatttggctctttcagtctcctaaatcttttctttaattatatttagtgaactctagttatttgtttcaatggtgtgggacttatatccgatagatgcaggcctcgttgtgtctgtgttgaattaacagaaactgactttgaaataatccattgacttttatttacagttattgaccagaagacaataaatcagaaatacttcataggtgggaatattcaatatagtcccatgggatgctgttttactttgttatgtttacattttaaagaactacttacagcaaaagacttcagggagacaatggagttgttaatgtatattccagctcagagagaggagccaaaataaatactggatttaaccatatgtaattaccattttggagagccaaaacggttgaatgattgcccacttcatgacagtcagtccaacatgaattcactctgattgcttgggaccttaaggtatttgttaacatgtcatgtatgtgcaacacatttaatttactcttggctatttcaactaaataccttcaccttctacatacaaaatttaccaatggtactttttttttttctccctgggtcactcacatctctcattgggtggatggcattctaagatgatgtcatttatattggaacaaagctcttttgactgcaagaaaaataaaataagggggttataatcatggatttttctttactattagtgagcagatgaattgccaatgaaaatagacattgaaaggagattttatttttagatagaaagacacttttcagtcataggctggtattctaagcatttatgtgccaagtggttaatttatccaaagcaaaagaagagatggatttttttaaaatttaaaatctaaggactggcatgattcttggcacataataattaataagtatttttatctgaactgaaacaaacaagaaaacataaatgactattcattagagattagctgattcagctattgttccaccttttttttttttttttgattaaatttttcaagctgtgtcacttcagaaggatttgcatagcacattgtggagagacatcaggcaggacccttgttacttacgtaactcacccagccaccaagtcacttgtatataaactttcaaaagcaggattggcacaagaaggttgaccggtcctaatcctaaccctaacactagtaatgagtgtgtgccagcttgggcagtatagctccagcaacagaccataggtaccaggagcctggaaaatctcttcagtttcactaacttttctacttttgcattttcttttttcctccctccctttctttctttctttctttctttctttctttctttctttctttctttctttctttctttctttctttctttctttcttcttcttcttcttcttcttcttcttcttcttcttcttttttttttttttttttttttttttttttttttttaatttgagacaggttttctctgtgtaatagccctggttgttctgtattcactttgtagatcaggctggctttaaactcagagagtatcaagtgtgcgggaattaaaggtgtgtgtgcccagcctactttggattttctgagcttcaccttcataaatgaactgtttatatctgggtcacacagtagtgagaattaaacaacagggttgagatctggattatgccatagctatagtatagatggcaggctcacctcagctgtgatgtacatggcaggcttgctggtacctgagataccaacacacttttcaagagttgccttggctttatagataagaaaatgtctgtgcctaaggcatcttgtttctgaacgaaacttattaaagaaccagcaagatggttcagtggctaagggcactttccgccaaacttgaggatctgagattagtctccaggacccacatggtacaaggagagaactgacccctgtaagttgtcctttgacatccacatgcatgccttgctgtcctctaggtcaataaataaatctcataattcaaagaaaaagagaagtccatcaaaaccacttgtgaaacattgaggcaacgagccccatcacttcaagttaagcaaagaaggttgggggaggggacccaacacaacaaactcatttttgttgcctacatgatttttaaattttacttaatatgttagaaccaatagctcctatttgaaatattttctgtatctgaaagctatttgaccttgaacacattttctaacttaatttttaacaaggtcgttatctacaatattgccattggagactggcatgatgaatcagagaacttggggtaaagagttagatggtgcttgctagcgctatctttctctgttttatactcaggctttgggtaccaatttaaaatgattgatttggttggcagtgcctctaccgggatgcccaaagcaaacctagccccatgcctgtcttacctctctagggccacttgcagagagtgatggggtctaaagaaacattgagaagttctgtttatttgttttccccctatattcttttacccagggtttccaaatgaggttctggggaattctagagtgttatcttattaaggaatccattagcactcactcatggtaatctgtttacatttgcataagcatcttagtggcttaaagaagaatccacaagccagagattctggaagtttctcaatgcaaagtcttttacccagtttgctgcttttcacccattataataactatggatggattccagagatgatttcacagagcaactgtgttagatctgcattgaaatactgctcaagttttggtctcatattcgtggtaacccttctgcctcagccttctgagtgctcggattgcgggtgtaaatcaccatgttgagagaattagagtatctataatttccttcctagtctactaaaaaggaaaaaaacaaaacaaaacaaaacaaataaaaaaaaccaacctaaactcaagccattgaccagttactttagagaatactccagggtgccatccttccatctgttggttggtacaaatatagcatatatacaaggcaagcaggtttattgcttctcatttgaaaatttgaatcttacaagtatttatattgcatttctgtgaaatttattgttttaaaagtttacatttatccttgtgtgcatgggtgtgcatgtggaaattggaggacagtgtgctgccaatcatttctcttctaccatatggacccaggggactgagctcacattgtcagcttcagaggtaggcaccctcatccactgagccttcctactagccctataaatttggtcatataattgtgggttttatcattttatccaatgtctgtctttccaccttcccattcaaaggtttgagtatgaactccgctgttaagagacggggtcttttgctgtacaggctggctttgctatatagctagcatgaccctgaacttctgttcttcatattcccactttccaagggcttggattaccggtgtgcacggccatcactcccagctcggtgtatgaatggttaatgctcatttggagaaactgagtactaatgtacgtgtcatgattccatttgataatgaattaaagtggaggaataattttcaaaattgatacgctgtaatacagttatgaacacacaagaatgacagaggttctttaggtaatcttgcgggaaacagaagacattggttagcatgtcctaattttaaaaaatgtggactaagaaggtttatgtgttaatcacaattatataagtattttctgaaatttatattaatttaacaaaaatcttaataatattgtacttctaaattttactcctagaattttgagataaaagttttcttacgataagaatgagtataggcctggaaaaatggctcagagcctgctacgaacactggctgttgtgctggaggacccaggtttgattcctagcacccatagagtaactaacaatggtctgaaactcaagttttcggccatccaagtccagttctggcctttgcaggcaccaagcattcataatgtacacagagataaatgcaagtaaaacactcatatacataaaataaaaataaataagcctttaaaaataaaacaataacaaaaaccagaattaggtccacggaatcttctatttgttgaggtactccagccaataatatttatacatacatacacacacacacacacacacacatatatatatataatgtacatacacacacacacacacacacacacacacacacacacacacacacatatataccatatagtatatatatatggtatgtatatacacacacatatatatgtatatgtgtgtgtgtatatatatatatatacacatactgcttgaatatagcttttaaacaccaggttcaatcaatgtttctttataatataattatattgaaaataaaactatcgggaaattttgaatgtttacataagtttaaaatataattaaagttcagtaaaaatcatagcttttctcttaaggattagtgaaaaatggaatctagcaatcagcaaattcaagcactgattatatgacatcatcattttatactcgtactaagatacttccaagcagagatgacatagcatattggttctcaagcttaggctacttacaagtcattagaatcttgacacacataagaaccctaagagattctggctcagtacccataactgtttctaaacatctttcggtgtgccatgcataccaaaggatctcaattggaatatctgctgactcacagacctgtactgtgtgtagatgttggggggcattagctcaaacagtcttcatcaccctggttcatggcaggagacaatcattttggatatgaaaagttccagcacaggaaagtggtcacacacctgccaattgctgtgtgtgtgaataggattcaattgagtaggattctatcctggcctgtggctttgaagtctctgttgagaaccattataacacaccacagtcacaacatctggaaagatttcatgtaaaatttcaataaaatgattcaggtgccagaatattggcatataagcacttgcgctctcccttctccctctccatatatatgtgtgtatatatatacacacatatatatattctatatgcataatctgtatgtaaatattttctaataatctattatatactttaaccctatcatatagccagaaaactatttgttgatgtccctctgccaattaaaagtggactttcatgcttggcaatcatggtgcatgcctttaatcccggagttcaaggccagcctggtctacagaaccagttccaggacatccagggctgcaccgagaaaccctgtcctgaaaggaaaaggggggaaataaaggccaattcctggctatgttctctggctatgcggtgcagttgctcggagtaaagccatacctggggtactaatgtctgctcatagtatggataaactctgaggagagcatgtcatcctgtgccctgaggtggacatcagcgctgaggcctttgtaaggcttctgcaggcacgggctgtaacactgttaaacgatgttctcttgtactggcccctgctctgcagttcttctctgggaccgcagggctctcagaaaccggaggacctctggtctgattcctaagctagaaggcttttggccatgctttcctggggactgtgggagtgaggaaaagccttgcaggaaggagacacaaaggccttaagtctgatcatgcctgggacttcgcagccactttaccctccagcacttctctgctgtacctgggctccacactgcctgtgcgcactgtggacgctggtgctgctccaatttcaaatttttagaagcatttgtgtttcagtagctcctgagtgttttctgttgtgaatgcattcagcactgtcagaggccacactgctttctgtcctcgcttccttcagggtttctgctctcctgatgagcttcacaaggactccctgaaccttataggcgaaacagcggtgttcagtcagtttaagacaaacatgaaataaataggcagaaacaaaggatgcagtgtgaattaaaatcccttagaaagggggtggagggaaagaaaaaatatgggaagacaggaaagaagaaaagatgtggggaaggaacgagagagaggaaaagaaatgactttattgcatgtacttacatagcacgcaagaggctcagggttgcatccccaggaagccaccatccctttcccactctgaaaaataaaagtagctcatggaaataagcaaaactctcttcgaaagaggacagtctgtgccaagtcactgcttccaccgcatgcatccttggttgatggtgggagaagagactgctcatgttcatttgactcgcatcttgttgcttttgatctttagaggtaaagaacctggattttattgataaagctgtcaggagctgataaacacaagagtatctttagtaattgacagaattaaaatagaaaaaaaaatagaaaaaaaacccagatgttttgtctctcttttattgtattttgaaaatgaagctaattgccaacaaatagagatccagagtcatcaggtaaaaataagtagtcttcataaaagtcagaaaaaaagaggaaaacacccaacttgcatcttggatagatttttctgcccctctgaagcgacccttccctggttagccatggccagtactgatatatgtaacccttcctcattactgggtaaatgacactgaaacattattgtttcttcttcttcttcttcttcttcttcttcttcttcttcttcttcttcttcttcttcttcttcttcttcttcttcttcttcttcttcttcttcttcttcttcttcttcttcttcttcttcttcttcttcttcttcttcttcttcttcttcttattctcctcctcctcctcctcctcctcctcctcctcctcctcctcctcccctccttctttcttctttcttctctcttctttcttctttcttgtttttttttttctgagtcagggtttctctgtgtagccctggctgtcctggaactcactctgtatgctccaatcacagctcctgtctataagcattttaaaagacctgggaattcttttttgtttgattggttgctttttgtttggttgggttttctctgtgtagtcctgggtgtcctggaactctctctgtagaccaggcttgccttgaactcagagacctacctgcctctgcccataccctgagtgctggaaataaagatgtgtaccaccatgcctgactgcagatctgggcattcttataggtggagttgttatgtacaaacttaaaacaatatgcactgatcattattttgacacatcacaaactcctgtaggttttcttgatctcttatgcttacacttacttacatgcataatcatgcctagatctgtattttttttaacaatgctatttagctatattacagaaaagtcaactcattcaagtgtagtaagtctttgaaaaagaaaaaaaaacactaaaagtttagacaattagctttggttgaagaatatattctatagagaggtgattctctctctcttcttttttagtagaaaaagtgaggataaaagtttgcttattaagtacttggaaacaatttaaatattgaattgactgaattacaagcaagcacaaacaaaccaatgagtcacatgtttacctgagactgagagtttgtgtctgcgaagtctgcctgcacactggaagcagttcatggtctctttacatcttctttcaataaagaaattacaccaataattcctgtcagtgggaagcctattggattaccttatctaaaggctcatagccatttgcttggtttggatttaaggctctgtactttaatgtttaattaatacaatgattggaagatgcatgcctttagagaagattaaaacaatttgtttcccgtgaaccttatgcaggaaaggtgacgtgtaaactaaatgagttacattcaaagattcagttagaaattaaagaagtttgaagtaaacgtttgccttacttgggaattcgtagaaaagttaaacaaaagtttggttctctagaaaaagaagaaaaaaaaataactgtatgtgtataattatgatcctaagataggttggcttcctacttcctcaaaaaaaccaaaccaaaccaaaccaaaccaaaccaaaccaaaccaaaccaaaccaaaccaaaaaaacccaaagcctttgaaaatgtgcaaaacttttagatagggaataacatggtcaaatgcccagttacgttttgatatgtaaatttacttccacatatattcttttaagaagtcatgttaagttgttattttgggaaaacccccactttcttccatgttcccagttgatgattgtattcggattctgcatatgctgctcagcttgtttcccaggacctgccatttcctttaaagtctctgagcctttgcagtcctttccttccttcttatactggcttctttcagtctaagcagtatatcaacctgtaagtgctctttaatgccaaaaaaaaaaaaagttattttcaaaaggttttcctgaggttacagagctctctaacctcatggttaaaggttaaaagcatgtattcttacagaggtcccacgttctgttcttaagacccacatagggcagctcatgactgcttgtaactttagctctatggggtgtgctgcctccgatttctaagtgcacttgagctcacaggcacatacccttacatacatatacacagttaaagggaatggaaataaacttcaaaaatatttttcttgcaagtaaatagttttgatttctaccatgtaaccaccacaaacagtgcctgttgaatttatctttaatggatttatctttatggttgaggaggcatcttagaacttgatgtgtagttcaggtagcctcgaacttagagtgatctcctttctctgtgccaccatcacacccaacccagcttctttaaacttttttttttttttttgcataattatacctactatttggaagcataagaagtaaggcttacttaccaaggggcattgaaatttgctttgaaacacatttttgaggtgattactataaacacttaaaactagcaatgacctggctgtttctgcctcaggtgttttcttcaaacaacactttgttttagacaataaagtgcaatagtactgggaaatgaacccaggcctggaggaagtgctcttaactgttaggtaaggccatgatccccccttcctgcagacggatcctatatgcttgactctgtgaaacattctctttgttcactcatttaagcttatcctttaaacctttaataatttgcaataacctggagcaggaaagactcttatttaaggactattaaggtgatgttattaatcttgggattattaaaatatctatttttaaaagaagatagcaagtgaggaagtaacacatctatggtagcattttcctgaacttccaccgcagttggggtgctggctatcaaagccttattcaccctctgcgtggtcagtaggcactctgcctttaggtgtatccccagtgcgtttccaacacagaattagaacgtagccagcctttggcaggagacgtggcccttgccgttttcctgatatctatgaactatgctcttagccatgagctgtagtaagttagaggagttggtgttttattactaaggttgtagatagagggagatcacagggcttagaaatgtcttaggctctggtgttggtactagttggtgggtctttctcttgctagtctaggaaatgcttactttttacaaatttaaacaagctgaagtggcaaatattctcactttatcttttatgaaaaaaaaaatgtataactatagcccagtggttctcaaccttcctaacgctgcgagccttttgatgccattcttcatgctgtgctaatccccaaccataaaactattctcattgttacctcataactccaattttgctatgttatgaatcataatataaacatttttggagatagaggcttgtcaaaggggctacgaccctcagattaagaatggctgtttaaatgtaaataaataaaatatccaaaaaaataaaaataaaaaaagaatgacagcttaaccctttaccataaggataactgactcacttttgttttggggtttttcagacttgtatgaaaaatatttgtatcatcagtgtaccaaaaatataaaaattaagtactctatgtagttgcaataaattataatcaagaaaatatatgattgtaatggtgaatttttttttcctttcaacagtggaaagagtggagcgagagaacctttcagactattgtgttctgggccagcggccaatgcatttaccaaatatgaaccagctggcatccctgggcaaaaccaacgaacagtctcctcatagccaaatccaccacagtactccaatccgaaaccaagtgcccgcactccagcccatcatgagccctggtcttctctcaccgcagctcagtcctcagcttgtcaggcagcaaatagccatggcccatctgataaaccaacagatagccgttagccgactcctggctcaccagcatcctcaagccatcaaccagcagttcttgaaccacccacccattcccagagcagttaagccagagccaacaaactcctctgtggaagtctctcctgatatctaccagcaagttagagatgagttgaagagggctagtgtgtctcaagctgtctttgcaagagtggcattcaaccgcacacaggtaggattcacaatattctctctggggagtaagagtcagagtagggaagaaacacgacctgtatttatttctctataatttcttcaaactgttttatgtgatgaggaaatgcctaggagacacttgctgtcaagcatgagagcctgagtccagatcccaggacccacgtcagaagctgggcactgggctcacagatttaagcctagtgagagaaaggtggcagggagagatgagtgggaatctgctgctctctgatgagtaagtctacctaccctgtgagctccagggtcagcgaaaagaccctgccgcacagtaaaacacaaacacacacacacacacacacacacacacacacacacacacacacacaaataaatggagtacagagccagaaggatgacccacaaatgtcaaggtcttgcctccacaagcatgtacacctgtcacgcatatatcatacacacccatgcatgtgcacccctcatatacacatcatacacacccatgcatgtgcacccctcatatacacatcatacacactcatgcatgtgcacccctcatatacatcatacacacccatgcatgtgcacccctcatatacatcatacacactcatacatgtatacccctcatatacatcatacacactcatgcatgtgcacccctcatatacacatcatacacacacaggtaccatagtatacaggaaaaatttcagaactcacataattgaataatagtcttcagtcatgatacaaagtcaccactcatctctacaaaatcttagttaattaatttcagtttccgagaagctgccacccagctcagcaccaagcattttcccactgattggctgggtgttgatgcatgctctgccctcatccttacccgttgtgtttccctggatggccccttgactgtgaatcttgtgattattactactacccttttaaaatatatttgagactacttataaaattatttgtgtatgctcaaataacttgtttttaaatatttttgaacattatgaaagtatttctataaaccttttcaaatgtgcaagttagatttcaggtgttaacatatagattacttatttttaatgttttgaaagaattacctttgactataatgtgaattatagaggtgaacagttccttcacacatgtgttgtcttactgagtgtggcttgtttgattttttttttcttctatttgtgcatcttagtcagtgtatatcagaaaagagtgttgttaaaataagggtttcagcactcatcccagagtttctgagtttaaaaatggggacaagacataaagaattttattctaacaaggtggcgatgcacaggatggaggggtacattctgcaaatcacatgttctctcttatgagggaccatcaagtaaaggggcaagctttgggggactgatgccctcagcagtgagcagagggtagcagagagctgtactgaactatgaagtgtggtgggtactgcaggagagcagatgcagtgatgtggtgggccctggaagctggggctgagggacactcgcaggaggatgggtagggccagtcttcagcaacacagcagggtggagcttaaagaccttactgtacctaaggtagggaaatagaaaaggctctggtgaaaactggaaaaatgtaaatattaggttcctgggggaagcaggatgtgtaggttaatgaagtttaatgaagatcaagaagtatattttagctaatgaaaatcataaggaaaatattgagttaaaaactgttagactgaagctgggcatggtggggcatgcctttaatcccagcactcaggaggcaaaggcaggtggatttttgnnnnnnnnnnnnnnnnnnnnaaaaaaaaaaaaaaaaaaaaaaaaaaaaaaaacccaaaaacaaaaaacaaaaaaaacaaaaaacctgtgagattggttgatagttgataataaaattaaagatattggtgggagatcattggttcaaaaagatattgtaagaacttgctaaacattttgaactttaagcactggaaatgtgtaaggtctcatgtagaaatgtgctctgacttactaaacagaatttgatcatagagaggtttttgcctttttttttttttttttttttttttcttatggaagctgggtagcacttccagttaggagactgccaagagagacccactgaaatgtggggaagggtggacggacggaggctggaggcagcagagtcatcacagaagtgcgttattggatacgggatgaagcagtaatgatggtctcaggatgagcctggtgtctgaaagcaaagtagagagatgctgcagagaagccgagtaaggagggccacagggattttaagggttctagttgtttttactttgaaatattggcaaatttcttataaagattggcaaagaatattgaacctataagtctggcactaaacacagtgggtagggagagagtgagatattagaaaagtggtacagacagagcctggaatttaaactagggaatacaaaggaagagtggtgcaatgctttcaaaagaagccattgtagtttcctgtgtttggacacttgagtggaactgtttgaagaggttgtgggacctttagaagatggagtcctgctggtggaaatatgtcactggggtggacatggaaagtttaaagcttcttgttttcctgtctctgcttaaccatgtgtcttaattcctgctcctgaacgaatctcaggccttcccctgctattatggacttacagctgcctaggaccagcctcagctaggcctgggttcctgagagaaggggtcaaaccaagggttacaagctgatggcctatgttctgcttgctatgtttccctagacagctctgtgtagatagcttttggctctgtagttttctagctttctgcttgagacatctctctctggttgagacagtactctctgctagtaaaaattttaaaagctctctggatagcgcatgggttttctgactagagtcagaaaagttgctataaaaatttcttggatttttcaaccaagtcagaaatcccattagaaaagttctaaaagtaattcttgggttttccaattaaaatccaaaaaccaaaaaaaaaaaaaaaaatctaaaagagctgtgttcgctctttagacagcattctctggatacctgctggaagacattctaaaagatgtgtgttagctctctaagtaattattgggatttccaaccaaggccaggaatcttgttagaaaatgttgtaaaagctatgaaaaattgtaaaagagtccaaccaaaatcagaactcttgttagaagaaaattcttgaagtgttgtgttcactctccagagatgtccagacagctcagctctccctagaaaacattctacaggagatccgactgcactgctctgtgcgagctcgtctcttgcagaccaaaacccacgttgttttatttacaaatcaaatcagttatttattctaggttccctcttcacaggagtcagtattctatgaccttagtccctgattcttaggaaggggacagcaagtgcattctttttaacattgcaaaagaattcagatatctacctgtctttgtaaatttagctctgtgggaccttgtcctgagattaccattctaaccatacttagatctaagttctgtcctagggtgaccttgaactcaggaacctactgctcttgtatctacctatctttttatctttctgaccagctggcttataatgcggttgcttctgcttttctgggtcagtaaatgcccttatataattcatattgtatccttatgttttgcatagttgagaacttatatatttttgaatacctgcatttagagttctttcccatagcctacggggctgccctgaaggtcacagtgcactactattttgctgagaggaagacatacctttgcctcccagactctttttttttttttcctggttttttgagacagggtttctctctgtagccctggctgtcctggaactcactctgtagaccaggctggcctcgaactcagaaatcctgagtgctgggattaaaggtgtgtgccaccactgccctgtgcctaccagactcttgctgtctctgattttcatggaatcattaaccttgccagagaggacattccttgtagtaggaacattaaaatatgtatagtcatatataaataagccttatgcccacagcagccatcaacacttatggaggcccacaccctctggctctgtttcaggggtaggaaaccatgtcatactgtccctgacatggccacgtcggactccaacaaaccaatgaactcttccgtaagttgcttctgtcaggacattttatcccagcaatggaaaaggagctaatgaaggtagaaagcattcccaccttccaaaccagggaaacagaatacatgcccagaggtcggttggccatggagtaggagggagataatagccaaagcaaagagcctctcgaagattccacatggatggaaagccatgatatgtggagaaagagaggctggacattatgccacaagatttggcatgatgtctattggttgggagttgtccttatcaaatttcagagtgcagctccttatagtggtgatgacaagaaccagcacttcagaagtgaggagtgattaattgctcaggatgcagaagccaattgcttttgcaaagctgagtggccaaaaggcaaccaggagcaaatgaggcatttgaatgtgattgggagtcagcttaagataggtgctttgtagcttcagatcagattaagcagcgtgaagcagtcagagtcattgatggtgatctggcaaagaagaggtcctggggctcctggggtgtggtatttatgtgttagatgtagaaggacaggagaggtggaatcctgttccctcggctcttagctaccttttacattgtattaatgacagagtccattcccatcacgtgaaaaatgcattcaacacaagttgcatgcatcttcttgtgacttaaaaaacccaggcaacatttgcttgtcctttggaaaaaaaatctgttgcccactactgaaaatatccagtgaacggatctatcttctgcacttctatatgcgagcgtgttctgtatcatccatgtgtatgagtagacttttcatgcctagccaacattttagtgcctaattatgtgcacagctcttttatttatttatttatttatttatttatttatttatttatttacttttggataagggtaaaattgaaagcatggttgtagtactttagatttttaaagtgattacagtgtatatttcacccaaacagcattgaagcatgaggaaagactctccaatgaggcaggacaaaagacagtcttgctgagaggatacactgagcccactgtgcactgggctcctggaggtctgtcttctcctgaggaatcctttatgtttctctttatggattaaagattttttttttggcattgccacctttgaagtgccaagttacagaaaggtctaattgactcacagaacacattttaatatttttttcttctgccattaagtttgtgagatggctacacccagaaggaaacattcacttccaatcagcatgagctggagttcatgggccagccttgaagatatcaaatggaaactacataggaatgtatgagtatttcctttttaaattctgctttcaatttgggaaagcttttcatccctctgggatcataacctgttgtgtataagcccagcctaatcaaggtagatggtattgacagaatgacatagtttgaacttgcccaggaggtcagcaggcagattgtttttgctgtgtgtgctggactcactaacagcacagatgggcagctaactttaccagctgtattgttaaatgggaaatacagtgtcgtgtacccccatgaaaccagccatggattttccaaatgctgaggcttttttgagtggaatcagtcattttgggtgatagagtaacttgccaggtaaaattcatattaaaaatggttaaattacatatttttttctagaaagaatagttatatgtagccattcgttattgataggcatccaaaggcatcttttcctcagttgctctttttcaagaactaattgttgtctctggcacttatttgttattagtgctaataaaaactggtatgccacatgataggtcgtgttcctggatttcggtttgaagatttaaaaagaagtctccctagtttgtgtatgtgtaggtgtgcagaaattaaaatcacctgcaaacattcatcaatccagcatgaatataaacatagaaaccttgtctgcctgcttttaagatttccagatgaaaacctcatgcttacagtaaacagtatctgaaaaaaaaagcatgttatttaaagagactattcattaccttagattgccgagccgtataccatttgattatgtaaaagtgacatcattagggtctatattttcaagaggttttttattatttatttttgtttttttctaggttaatgtgtagtgatgggtttactatggcatcttcatacataaatgctgttatattaccatagtttgttctcattgttcctcttccccccctgtcttcctgtggcctttgcccttgctgacctctactggttttaaattttcttaattttgattgatgttgtcttagtttgggttttactgcagtgaacagacaccatgaccaaggaaactcttataaggacaacatttaattgaggctggcatataggttcagaggttcagtccattatcatcaaggtgggagcatggtagcatccaggcaggcaagatgtaaaagaagctgagagttctacatcttcaactgaagatagctaggggaaaactggcttcaaggaagcttggaggagggtctcattgcctaccccgcacagtgacacacttcctccaagaaggccacacctactccaacaaggctacacctacgagctccactccctgggccatattcaaaccaccacagatgtctttcaaagtcatttatgtatgtgtttggcagtaccttgttgtgtgtcatgctcatggctctggttttggaaatgataccttttggtatcatcttgtactgttacttgctattgtttttatttttatatttttcttcttgtttaccaacaagacatgtgtcattcaaactaagaacatacaaattgattgtttttttctgcacaagggatttagcatattcatgcctgtagtgccatgatgtgaactctccagtgtcaccatacatagttctgtacatagtgtatttgtatcactgcacttgtataactcttttggaaagaatggctagccctgcttttcatgctattttgtagcaaaagggaccaaaggagaatagtgaggcagcagccatagcagttttcttacctgtccattttaagcaatttctcttatggccctgtggaaccacagaggcaggtacacacccttgctttgtgtgtgttgctccacattcatccttatacttctgatgtgggctcttcgttttaaggactgtccttaggctactaggtgttgataaagagctggaaaagggactgtgtgagaggagccacacagtgacagcccctgcccctgtggaagagactgctctgatatatataatcagcttgaagctccaacatggtctagattttttccccctccttcattgtcccttggaagattttattagcaagcctcttgcataggaatttctatctcaggattacaggcccatgccttttctatgccgctgacatttgctcatgccataagagggtaaagcatagcatctgattggtatccattcattccacacagcaaccgcatatgctgtgtagggctggaatagctggtctctgatactcacctattatcaacatagttactttaaacttgaaaccctgtcgctcttcagttcactgactggaaagtagtatgattgagactgacataaggatattgagtggaagtaggggagagagggagagacggtgaggggggtggggggggtgggaggagagattgagattaggaatgagagaatgtgtgtatgtgtaggaatgagattcaggagagaaatgggacttgaggccttaagaactgtaccaccattgccttgtgaaaaggacctcattggtgtcagctgtggcatgctggtaacatgagtttagagcagctgtgctccctggccctgcccctccctactgctcggtcccagatgcagatggtgtctatttagtcgccatttctgtcaggttttcatttctgttcacgtgttttcttctgcaactgcatcctgaattcatcttaagttggcacctttctctcattaggtctgaacatgaagtaagtcatttggccatttaccccatttatgtctttgcatctttaaatgtgagtttgaatcttaattttaatcattctgtttcctttgttaaagaatagacttgaaagcatcgatcagaggctcatgtaggatgaaaggctcctgaaaatgttttaaggcttaatattactggtgtccactgacctataataagtaatgtttcataaaatatgtacagtgagttttacttaatagataaactattctctaatttacttaaaaatccaatgacctacatattcatatgttcagaagtccccatttaccaacatcacgtcccctctgagaccttccgtctgagcaaatctgttaaatgaagtagaggaatctttgatccaaactagggtaaatccagtggaacggatgcagtggctcatgtgaacaggaacaccggcatgccagcagagggaacttagggctggccctgagcgcaggggccgtccctacaggccggcagtaagacatagacacctttgagaatgagacttatctcatgtcagttgttcatgatcagcttcttttcctctaggagaggggtcaggtaagacttgctgaactgattcttagaaacatattttttggtagaagaatgggtgcatgtaatagaacatgttagtgggtttctgatttggtgacttgctacttcagtttaatggcaatccatgccgtttagcagaggtctctctggagcagcagtgcacgtgccctggccttatttgattgagaacaggaccctgaaaattcagtgaggtctcatttgattgacatgtcctcatttgactactttttagtttttatgagacacacacacacacacacacacacaaccctacagtttactcatcaaagccacatcatttgaagaaacttaagaccagggtcataaatacaatttaatgaagtcactcagcaactggagaatgttttcagcagattggaaaattagattgaatgatgtatcagaaaatttggcaggaaggccagctgctgaaaatgcaaacaccgtgtatgaaacagtgtggattttgatttaagctttatttacattgtgtttggaatatatgcatggccctaactgctcaggttaaaatttctaagaacttgctaaacatcagaatctgaagcaacacagtcagaaagaaagagatatgttacaactacaggaaaaatcatagcttaattctcttaggtgtcttagtgtgagtcccttttggaggaggcagaaaatgtcttttaatgtcatagtttgatttttacactgttagccagagatgggaataatttaattgtacattatagtttatatttgtataaaacgatacctctaagatgctcatattccttgtcggctgacacagtgtcagtcaggatgatttctcagtatctagttgagatccaggctctttgcaagtcatggaccacaatgtaaatctagggtcttgactccatggtccagtgagctggttataaaataacaaggagacatgtgagaaagaggaagtccactccctgaaaggtgggctgtaagtataaagtgttgcatatcaggcatgaacatgttattgaatttttgatataccctctttggatttcagaacattaaattaataaaatagggagcgatgaccttgcttacttcataaaataatctttcatttcaaaatcactggcttgaattctcagatttaaagattataataatattaatatctcccaagatagcagtgtctcaaagttattggatagcataagggggtggctcactagatagcaatcttatttcagcacctccctcacaaataagggattattgttaattagtgccttttaggaaacctcagccaaaactcatgtggttaggccaaggactaaactgcgcaggctcggagctcgctctgtctgcctctggtaaaggagaggctgatttggcaagtagaaaactacacagctcaagctccctccccagtctccctgaaatgggaaatgtaggtaacagatgatggagagattcattttcttctccctctctcacaaaacagagactcagagtgagccagtgtgatgccagctgtgcagtgtgatcctcctattcctaaccgatgaccttatgagttagtcacgagacgcatagcagatctaacattttcatgacttagaaatagaattatgttgcttttcactattgtctaccacacaccggtccattctattggtccattcatttcacacagggaaggaatctccatcttcagtatttgtatctgcctctcctggatttctggtgcgagcatctactgttgtgttcttttaaggcctaggccatattttacagttttgtaaaaatttcacagaggaaatggaaacactacctttagttctcattatttacacatttcatcattgtttagttaataagcattaaaacagtatattcaaggagtgttctttttatggccattagctgaaatgaggaccttggctagggttatatgcatggtcaaataaagtgaattaaggtttagtccagaaatgctgtgatgtaaatacaactgtattcatttgaaatcatttgggcttttccaagcaatttcaatctgtctgtaatttctgtgcccgaaatgatcactatggaccatggcatctccttctgaacttctcttaccaccatgcccacctggagtactttgtaagtcagggttggtagacatttgcttgtgtctagttctatgtactgctatagcaaaatcttcatcaaagagaaaaaaagcccttataaaactatattcatactataattaaagcaatttggtgttctccaatttctataattccaattcattataaacattgggtttgatctataaaattagctttatgatctactaataactatgacccatttgaaatgatgatacagatgaaggcttatttttaattattttatatgttacatagggaaagaaatttacttacctctttgaagtatacagtttatatcttggtgattgctatttttgaagcagtgtcttatatagctcaagctgcccatgaacattccaggcctctgtccgtggcctcgaactcttcatcctcctgtttttaacctcccaagttctggaattgcaggcttgtgccaatgtatccaacaataattactattttaatttcagcttactgaaaaacacacatagtcattccattttatatgagtattacccttctttatattttcctctagcctaaataattttaattatctcacttcctaaaggttattgtttatgtttttgccttatgtatgataagaaaatcagcaaggtataactgacatactttgaatattcaaagctttaaatttaaagtaactatattccaacatgttgtactcattttcacattttacagattcttattttatatttaaaagctatgctaggcattacaccatagctgccatttagtgaaccctgagttcatctctgtattcgtattagtgctgtgagggaagtagaattactttgattttacaggtgagacagtctgccctagggagagtgattgatcggtgtctaattccagtccagttttgagctcaggaagcctgaattcaagctatcatacctgctccattctcagtcacctcagccatcatggagcagggtttggaagacacaccccttcctcaagatggtacaggcagtaaatgcaaacaggtaaccctgttatggaatgtaagtgccacagtcccctatgaagtaggcgagaagaggtgcttttgaccctggaggtggtgataggagttaacgtgtagattttacagcaggaaggagcaccgcactgtggacagctcatgctttacttgtctctaaaagcatctatctaatgcatttgagatagaaatactcaggaattgtactttttgttctgctttgtgtttgggaagcattaattttgctaatgttgtgatagaagagccaaactagtaaatgtggggaatgggttatcaatagtcatttcacagaacattcatggaaatgagggacaaccaggctctagaactttatgaatgagatagccattgtgcctgctacttgcggtgtgtgtagaagccctgtctgtgcccagaactgactgcatcactgacagagcgtttccaaagacaacctgctcattcctctgcttttgctttttggcgctagtgtggtttgaaatgttggctttgaatgtacatgtgtagccctgttgtggtgcttatcatttcctaacgacaagacggagcgaagggtgaggaggagtgacatcaggttggtcagcaaatatgtccgccattgcagagattctgatgttaaaaatggcagccactacaagaactgggctgagcatgttcctctactgggtgtgccagcctgtggcttggacaggaatgctgtattcaagacaggacaggctttttttggccttcagagtgtttaagaatgtcctgctgtacacattatcttgtattgcatgtgtaatattgatatgccaggtaccatggtcgggttttgttgaatgcgccagggaggagcttctcatgacacaagtatttcatttataaattgccaacttaaggtgtatgctgtagttgttccaaagtgagatttgcatgaggcaaagtgttactgtcagtaggttgagtaaaatgatcctgagtgcttcaaaagacagactttaaatatgtggcctgctcaggcctgctacagactctctctctacccaagataagactccctcccagaactgtaatgaataagtgttttcttaaaggtctatattttccatatcactagctcatcaccaagcacaaaatatagagaatcatctctcagtgactttatctgataggaggcagtttttatagtggccaatgtaaaggaaggtgagaggaataattgtgagactgaattagtcctgtgcacctcagtgcaaaggaggactatctgtgctcatatgcacacctttgcagtgctttgaatggtatatctctggcctttagaaaatacttttataagtgcattcttatttgcaaagtacattaattccctgtaggtgttgaattctctctaacacaccatacaaaatatgacatgcataggctgtctttctcaataaagaaattttgtaatacaagagaaattttattaaactaatgcaataacgacatcttctttgaggatttagcccatcatttttaataataaaaatcagattgccattgttgtgcccagtataggttttattcaaatcagactaagtactttgtcttcatggctcagcagagctctgggagttgggggtggggggaatatttttagcattacacaaatgactttcaacacccagaatcacagtacagctgtaggtcatggaaaagctgttctatccgtaagcagagggagaaatgcttcaggagcagctagagagaaacgaggtagggggcagcttcattaggaaggccaactgttagacagtggataccagcaggagccgcctacacgccccggcctcactgcacgggtaactcctaaggaacccccgatggcttaagagtttgctatgtaggatcagactaggaatttgaccttacctggcttcttaagagggcactgatcataactggttataaaatactactactactaataataataataataacaataatttctcttgttaactgagcatggacatcagaactaaatgagaaataaggctgatataagcctgcaaaaaggatagtggaatatgagcaatacacagagatggccttctctacctgtctgatttcaaggagtggtcataagcaggccatacaccctggttcatggaagagtggcccaagtccctggtaaagtctcctctgtctctgcctttctgtcatgttaatctggaaaatggaaatgagcctacagattggttttggggttttatttgtttgtttgttttcttttttgccttcagatttttcgaaatcttgctattggttatgacatcacctgcttcaaacaatatgccattgtaaacacatactttcagaatcactgtaatatatttttgaatcatacattttcataagagatgtcactttatttctggaagggtttgccattaaatgccctgtgaaatgtattcgtccatctcagagttaatgagtaaagcatgctgtgaggaaatagggcgtgcgttttctgacacccccagtctctgtattcctaagtagtatggcctctgtgggtttccttggagcagaggtcacaccacacacgaggggataatgtgacctctcatatctgcccttgccagattggaccccagactttgagactccttgctgtatggccagtgagttgcttttttggattgagttacccctgtctgttgtaataatacataaacaccacaagttgccttttttgtctcccatttcaatggccacaagcagccacatatgtagtttatagggatgaaaatggtctccagctactttaattcttagacaaacaccaggctttggctcttccacatccccctacacacctggtgtatatcactttaaaaaataaattatgcctcattaaattacaattaagtggcatcatgatcatttgtttttctggaaggaagatgttttgcatattgaaagcctaatttgttgcaggtgacaaaaaggcagagcatattatctaacatcgcttcattttgggggcagtgtgtgctgcttggtgtgtgtgcacaccagcacctccagatcttactaacgcgcatggtcattggcccttcagaaggtcttagaccactatatcagttttttacctaagaaagcacacttcccttggttgtctggaaaaagcatggcctcttttctttcagatgttcctctgctgtctttccccttcctggctgtaccattatctctccctgcaggtgctactcatatttaaagattcagtcagaccctatttcaccacctccacaaagcctgcccctccagtcccacagttagcaattcatcttatttttaaccaagatggtactagtggtattttgaatttatggcagttgtcatttcttccctttttcttcctgtttccctctcatctcctagcacctcctctcctctttccacttctctcccctgctcccttctccatttctctttctgtttacctttcttcccttgtttctatttgagacagtgtctcactctatgacccagggatagccttgaccttatgaccttgcttcttcctcctaaatgctgggaccactggtgtgccaataagtgcaaccacagtcaacgccttttccaatggcctcgtagaaaaccttgctcccaccatgcagagagctctgtggaagcaggatctttttccttttgtctttttacccttcccctgagttttcaaaaccaaatcataaacgagaaaagaatgaatggagctcttgttcttcaggacaattatgttaggtttgggggttccctcaacagttgagggatgatatctggcctagtgtttccataattttcttttctgtgatctatgtagcctaactctagaaaggtacccagaacttgaaaactacatatgaagaataactgttcagatccaaccagtcatgacctgctctatggggatctgcacagcacttgttcacattctcttcaggattgaaagctattctgtcaactagccctaagaagataacaaggcttgcatggaagcttgaaggtcaatcactataatgtgtaccacacctttatgagtgtcagtatgtatcctgtacacaatagaaggaaatattgtatcacttgaaactgattgaaactgaaatttcagtgatggaggatgaagctcattcagtgttacttaggaatgttgttttacaacaggtaaacctgtttcttttgctttaaaaatcaactcagttgcttcctttttttttttttttttcctggtttttcgagacagggtttctctgtgtagccctggttgtcctggaactcactctgtagaccaggctggcctagaacacagaaatccacctgcctctgcttcccaagggctgggattaaagacgtgcaccaccactgcccagctagtatcttccttttatctgaagatagcatgtatcatcaggcaagccagattgcatttacagattgtactttgaattatcttaattttagtgagttccttctcaagccatctatcttctgctggtcctagcaatagtctgcaaagctcataaactccccattggcgagccagtggaaagcccccttgaggctgtctttgcccaaacctctttttttttttttttttttctttttctccagtgattttgaacccaggaactaatgtggcccggtatgtgcacattgtattccctgcccttgcaggcagcatgtttccttgtcttatgaacgtaggctctcccaccgctgaggagactgttattatgtctccctggaaaatgttctgtaccctacaatgaggcaaatacttagtggccactttactcactactggcagtgtattttaatatgattactgatatgaaagtttaataagcattatcctggttaatttattaattcccttctatgactttcctattgataggagcacatctttttttttttttttcttccagagcccaggagccccaacacattttctatatctcaggctacataatggtactgtccaaatgatacctcctgcttagctggttgataattagaatgccagatgacacagtagcaaaggctttagaaatattgatgtgagataaattattaatttatgttccattcaagacagattcaatatggtaaacatttactcatcttgataattagtgggtggtggattgggttggggtgtttgtgtgtgtgtgtgtgtgtgtgtgtgtgtgtgtgtgtggtgtgtgtgtgtgatgatttccaacaaactggattcacttcacacctatatctgcagaatttacaacacatctttaaaatcgtactttacagcatttaaatggacacaaagtgaaagtagtcaaagtgaaaaaatcaaaaccaaacagctaaggtctcgttcactctagttagtcacttaccattgaaaatgtccccagtggaaagaatgcactttgggactacggccatacttatgagagttgaggtaagggatttggagcaatgttgtaattttctggaagctgtgtatgaaggtgatactggccaagtttgttcattgagactgtatctgcagttaggtaaattacttgacagaagcaatatattccaccagccacctaacttccaaatgctgtctgtctgtctacctgtcttttgcttcaacagtgatgttgaccagcagccatcatcaagggtgctctctatgagagatgagtgaattttcctagaagactatctagaatgtgaccgatgtagaacatggaccctatgcagttttaaagtaaaaccataaagcaaactcaagaaacaaataaaaacaacactcagtgattttaatgacgtctttttttgtttgtttgggaacctgcatagtttttagatatggtatattaggacaatagtattttatatcactatttcatatgtaagagcctttgttgtaacactatgtgactccataattttatggagaaagaataagttaaactctacctctaaagatattttgatttataatttatatttttacacataccacctaccttgctctttccttgagcacatatgtgcatgcccatatgtgcatgagtatctccatgatgaccctaaaattcctttattacaatcttgaagaaggtgggtagaggagacagaagggaggaaggctggggaggagggagaaaaccaactcgttctttctatgcatggctcattatgagagaaagcgcagaggagtatcaatcttactgtcttactgaccttggaaagtgggagcaatttaaaatccacttcctttcttcatattaatttagagatgtttaaaaaaaaatctttgaagcaaatccattatgaacatttcaggttgctcagttaaaatgggaagcagggtgacccaaggcacaagtgactcttaatttcgggagaatcgattcatggaatgcacactttccaggaagacaagtgcctcacttgttgctcctaaaagcatgccgtgagatctggattttcctttaatcatttcagcagtaggatatttttacacataccacctaccttgctctttccttgagcacatatgtgcatgcccacatactaactagcacacagccccctcctccgccacacatacataccttacatacacacacacacacacacacacacacactttctctctctctctctcacacacacacatttcttctagcttcattatgtggtatattttatccctattcacattctgacctcaagccaacaccatgtgcttcctagctatgtttgtgtaggcacttacccaggtattaggattcctctaatcacagtaatgtgacctctacgttcagagctagcagatggcacactgtcggtagcttccttgcagtagagttgttttgtatgattttaaaaactaggtttatttatgtatctctctgtatgtgtatggtatgttgtgtgcacacccatgcatgtgcatgcatgtgcacatggttgcaggagtcagttctcttcacctaccatgtaagccccaagaatcaaaccaaggtcatcaggcaagtgcttttacccactgagccacctttccagtccctgtgtggtatattttatccctgaatgatgactatacttccttgattgttggcaactgtgtgacatgcctccctataaatggtatttgccatactacggcacaatatagtaatttgtatgaaaatgcccactataccctgcagacttctgtccagccagaggataattctccttacagccactgctgttttatatgtgagctgcatctcctgcacttatattaatttccctcagtgcaaagcatcgttggcacgtgcagagctttaccacagtctatagaagtgactttttgtgtgatcaaagtacaggattagcatcttagctcttcttggagaaacagttgtaaaagttagtgccctgcaaaaggataaaataagaatgagaatatgaaatgatgcttctgtgtgataacccaacaagtgcatgcgacagtaatggatctgcctctgtcttagtatctctctagctcagtggttctcaactttcctaatggctcaaccctttaatagttgctcatgttgtggcaccccatccataaaattatttttgttgctacttcattactgtaattttgcacctgttctaagttgtgatgtaaatatctcacctgcaggatacctggtaggcaacccctgtgaaagggttattctgctctatcagggtcaaagcctgtatgttaagagccatttctctagctcatctcctactctcctcttaggccatgctgctgtagagtatcgacaaaatctttgtgaattctgtgtcactagagtacacaaaaaccctgcttttaaaacccccatattgagttgagtcacaaactcagaaaacatcaagtcgatcaagacatcagagcctatcagcactacagttagcacatgccccggtccctagctaatgtaaccacattttcatcacttgacattagagtttcccatgtggtaccccacaaaagtctggggtgcctcatggtacctatgaaagcatagctgctatgcgtgaaggctgggaagttatcagagttgacaggttatgtgtgctttctattcgccacctccctttaccttaggaaacatctatattgaaaccagtgtccggtcatacagaaattcagccaaacttttattatttttttaaaatcgatgtaaatctcccatgctgtttaaatgtcggaactaaatttaccaaacttggcagattcgtaaagctaagcaggactgccaagagttcccagtttcaagcagagagagttctaacagctcctgaaatacttgctggaggcacctggtggttaattgcagctccatatttcctcctgagcgcctaccttgctcgctggcattggcgcacataggattattacagcgatgatgaggtggcagaatagaagtcctaaaataaggcacagccccggaaagggaacacattcatacagactcctccctaaggaattaggcatgttcctgatattctctcaagctggttatgccaaacaagtagaggggcagttggcaagggagacggaaaccatacccgtaaatccgtagacatgactttgcctattttttccccactctaccagggattattgtcagagatactgcgtaaggaagaagatcccaggactgcgtctcagtctcttctagtaaacctgagggccatgcagaacttcctcaacctgcctgaagtggagcgtgatcgcatttaccaggatgagcgagagaggagcatgaaccccaatgtgagcatggtctcctctgcctctagcagtcccagctcctcccgaaccccacaggtgagctgtctgctccacacttcacatacttcactcgtgcttcatggacattgtgtttttccttgaaaaccaagaaacatcattgaacaggtcaaaggatataacctctggctatatcatgaggtaaccctgtgctgtggaggtgtgttattcccttctctttaggataaccccattcttccacataagcaggtgaggggacagggcaagagtaggaggtgagttcctgtcttttttacagtttcagaagaagaagaagaagtggggttcctgtgggggttgtgtttgtataagagctactttattttccttacattgcttgtttatttttctgggggtggaatgtggttgagggcaagaaacagcagttcagatgctgctgtgagcaattcagaaagataaaatggaaggcaggagagatggctctgcggttaagatggattatcatctttgtttgtaattccacctccagggggatcctgcactcatgtgtacctatgccacccagacccccagtaacaatacaataaaaaaatttccctttccctttcccttttcccttttcccttttcccttttcccttttcccttttcccttttccttttcccttttcccttttcccttttccttttcccttttcccttttttcccttttccctttcccctttccccttttccctttcccctttcccctttcccctttcccctttccccttttcccttttcccttttcccttttcccttttcccttttccctttcccttttcccttttccctttcctttcctttcctttcctctctctctccctctctctctctctctctctctctctctctctctccctctctctctctctctctccatctctctttctttctttctttagagaaacacagtggaaaagttctgtgtgtgtgggtgcagtagctaggccagagcaaagggtcctggtgacagggagcctcatattttgtcactctaggatttgggaatttctggcctccctgtctgctgcacacttctgaagtattcagagctcacagtaggcagggcacacttccagttcaaacgtaagctgctcatctccacttactccctgcttcccctaatttctcactactctgttgacatagataaaaccatttcactctctggttctctgggttgcataaattctgagtgatggttctcaaagctgaaggttaattggatcataccaatttgtgcaaacctgaaaactgggtacaataaaatcaaaggttgctttgctaagaaactatagtttcattcttcttggtttgctttctgataagttccaagaagttgactaaacacagaattagaactttattctggtaggaatattagggccttctcaggtatattgtcattttcttcccacatatcttgactctattttagcaccctacagtagatttgtaatcgtggatcaccttctgtcacgtcctgccaaattgttttacttgtaaattacgactcatactgctaaggacttggctacttactttggacatctgcaagcaagccttttaatttatttctctttaaatatcaaagaatacatagtgaactgttgttaggacattgacaatttgcgttaatactgactgctaataaattcaatagtacttttacaacgtttagccattattggagagtccagtcacatttcctactccgtgtcgttccccccacccccacccctcaagcagctctcttggaagaaggccacttgtacttgttagaaaatggcacaggtcagtttgttttgttttcagagtctttgtaatatttttcaaacaagattgtatcaccagcacctttccaaagacctgatcacttccagagcctgagtagcttaacatggtttcacattagggcattttccttgtctgagttaggatccaatcttgaaatttcctagataaaacgtcctttatggataagtacaggaagttgtgcatttaattttactgctttttttatttctgaaaatacatatgaaatattcagacctacttttgaggattataatcctagaaccacgcttgtacattcattaccattttattctgtatctgttgctgaagattgggaaaagaaagttatttgaaactttcaacatttaatgcatacctatgtgtttatgtatttaaaattcgctctgacatatctcaataataaagatgctttgtacaaacaacagcagcagaaaatggtgatacatgcctgctgtcttggcacttaggagttggaggtgggaggacaataatttcatggtcagtagttacaaagcaggttcaaggccagcatgacaccctgtcttgtaactggaaaaaaaaatgatgcaaatttctacagatctcttgtttgagggtggatgtgagtgggagctacactgtcctcatttggaggagcatctttgtacatgccagcagctttaaacaaatcattttccagaatcctccattcttcagtggccagtatcttcaatgtccttggtaacaagatggcatggggtgagaatggtcctttactccttctccctggtggcacagcaagtactgtgagcattctgcacaaattccaccactgctggtttgtggtgacattcttgtgtttccagtgaggaaacaggcttctctgggctaaacagctcatataagtgagttcacatgactgcgtggtagagtgggaatttgaactgtagtttttctgatgccagaattcagaatcttacccatgcaccatagttaccactgtgttttagctctaagtgttcaagtgaagatttaagcactgaggtacacctcgacaatgaacgacaggtgagaaatggtctatcattctcttagcaaggagtgtgcagtgggtgaggtacatagtttgattagaaaaaaacgaatctagaggattgagttattgtgggaagagaatacttgccacagcaacctctcccatgtcgaaatggagttgcatagtagaccggaggctctgaagtcaaggtgttcgttgaacacccttactattgcatggcctttataccaagtgaagacctctgtcatttcagcttttttacctgcaaataaaaattcagataaaacactactggatttttataagagctacaagataaaataggagttagcagtcttcctagagagcctggcacacagaagtccataaattatagtcactctgacttggcagtaactagtaaagaagttggggtgaggagggtaaaaggaagatggtaagtgccaccgtgctctctcaggaagccaagcctccatgggaacttagagcaggtagggcaggcttatgacatccttgcacaagtcggccatgtcccaactgcacgctgtcttccaccagacctgtatagtgccagcctaggggaggtgcagctcagaacaccaacacagggagagttgtgatttacagacatcattcttgttatgggattttagagtgagtgaggtcagaaagaaccaaacttaggcccatttagtcagcaatgcctgtgtaccccggggtgggctggcttgtccctgagttgtggcgccagggttaggaaatctgcttggaccttccaggttggcagcttagggatcagactaagcaaggccactctgggagtctttcggaccaggttgagtgggatagtttaaggtattcgtaccccagcaagcacgacaccttctgcgttgtccttcatttgtctctgaaactaatgggaaatcattcgattaaaacgcacacggcagaatgcatgaaaccacaatatgagtttaaggaaatgaaagctgctcgtggaaggcatctgaagccgaattgtatgaaatgaaattttgtttcatttccagtgatttcctaggtgaaattaggtgactgtctgggtagcataatgacgataatgacaggagccgcacatactcaaataacatacatgaagccttaataaagagcgagaggtactcgcgggagtgcattaaattgagtaataatttattatttagagacctctacccatttactcaggttttttttttttcttggagaactagctcttctgtaaggtgtgtcatgttttacaaagaaaaaggtgagtgtgttctgtgtgcttgcttgtggatagatgtcatactttggtgtgctcagggttgccttcctacctgtgagctaccaggctactgtgaggggaagcaagagcggacaggattctgtatgtcctataggaatgcattgcaattatttccaatcacaattaacctgattagaataatggacaggaagtgcccctctgtagctaatgtggtttggcatcagctgactgaaaccctctgataatttctgcacagatggtcgctctgaatgcagcactttttaaattattattttcatggtctcttggtaggccaaaacctcgacaccgacaacagacctccctattaaggtggacggcgccaacgtcaacatcacagctgccatttatgacgagatccaacaggagatgaaaagagccaaggtgtctcaagccctgtttgccaaagtggctgcaaacaaaagtcaggtgagtgggtgggtgtttttttgttttttgttttgtttcttttaaagagcaaaatggagggctgggaccattctccttcgcctccaataaaaacacatctgtttttataataataataacagtaataacccctggggagcccatcatgttctgccttctgccccatggcttcgctgcaactcccatcggagttcagaggagagacaatgccagaacctgcctttattctcttaaataagtatttgatattaaggaataagggttaaaataatttttcccttatccaaagcttcccacactcattgaaaatttttttctcttcctcaggaagcaattttttaattaaaaaaaaatttagcctgtgcataacagccccttccttgagaccacgtttaactagggctcatcaccttcctattcccaccaggggaagggctgagtttgctataataaccacttttgcctagccccagagacacgttgtgattgtcaggtgtttcgttcacgtcttgaatacagttgtttttccaggagaaaacacacgtgggggttccagaataagtgctaaaatcttttagcagaaaaacatagatgcttatccagtaaaagtgttcagcaccggagctgcagggagtgcgatgctcaggggacccagcacacagatgcgtggcttccgttctgaaagcagcaccagttgatgggaccctcccccccaaccccccactctctgcctgtttgtttaagggggcagctaccgcctttggtctgctcaagggcactcctctttatcccacagataaaggattactatagggcagaggaaatggaagttagctgcagcttcattttgggagcctttgattttgagcttgatttccactgtgctttgcatgacaaatgctttcattcctacatatgcaaatggtcaaatggtctgtgccctctccctaacagatctgttgtatgctatagttactactaaatattacatggtactgagctactactgagtgctatagtgctaagttattggttgtcacatttttattaagcaagaaagagttcaataaaaattaagtccttaaaatgacaaatgtcatctttagtatatttagactaattgtttgcatattgccctcttttgtgacctgcagttttacagtatctcaccttcagtttttagtgaagagagagagagagagagagagagagagagagagagagagagagagaaccaaaggcgttggaagaggattgaaatatttatttcccttttcagtttccatggagtcattcttgaaaatgactctgatgcccttcatcaaggaaactagggggccgagtttgctaagatatgtctaactgtaggatgaaaaatccatgaagagaaaacaccacagaacctccctaaactgttaaacacacaaaaatcccatgtaccacatggcaaaatataatgagagttggaactgttaaacaaagaagttgttaaatgctaacgccacttggcaaaactactgtgcatttaatggttttccagcaggtaataaggggcatatgtgtgaatgtgcagtgggggtaagagctgcaccagtgattttgcagacctgaccctctctgtgtcctgacacccatttcacagttttacttgggccttcttttataagagtaaactgaagaccagcgtctgagacctagcttggagggcacacaagcctctcattgccatggcaccgtggctgttgggagtagcaaggcctcccgctgtcccacattaactcaggtggctgtttgagagttggtgtttgccagctggctgttcccaatcttgagggattcctgaggaatcagaagtcctgatttcatacaatctggaaaagtggttctgaatattccaaaggataaaattgagcacgcgtgcgggtgagacacttggaagtctctctgtttcctcagaagaatggtctcttttttaaaatttttggacagagaaccatatttcaaatagctgaccagataagtatttcaggaatgatgtttcttaaaaaggtggtggtggggggagggttctgccaagtaagatagctttagagacagttcagcataaaagaaactccgtcgtggaagcaccagcattcatccaacagcaaactcaattgtttgagttgctacatacatttaatgtatgtttccagtgcagctatggctcttggccagattttacctccccaagacgtacacacgtctttgggttgtgagagatgagagaacaaagctttccccactccctttcctaaactgtcattttgttatttttctcggagggtttgggagttttcagggtgcctgaggaggctaatgcctctccagggctttctgatcatgcagagatcaaattagtgaagttgttgattaagaactcttaagaactggaggagactaagagccctgaagcttagatataggtcctcagtcctccacttcattagaaattaactttaaatagaactcaagcatcatctagtccattcctacttgctgtgaattggctgcaatcagttattaaagataatgttgaccactaccctgtatgcagggaagtgaagagtcaaggctgctgggataaagcaaaggaggtgatctgaaaacaaacagctgacccagaggttgtcggtgaaatggccctggtttgaagactacagggtgggggtgggggtaggggtggaactctccactgtgtcttctgcctttacccaaaaaaaaaaggcaagatttgattatctccgctgcatcagccaagacagcaacaccagctgttctcattgtgcagcctcctcctcgcggcctccatgttaataacctgatcattccattttccccttcaactgccggctgcagcaccgagaggagacaaaaacccaggcctgtgtgcagcagctgtgggcactgaactgtgaagccactggggatttataaactaatctgtaacacaacactgccttgtttttacannnnnnnnnnnnnnnnnnnnggggtggggcgcgtctccctgttacccacaccctgtcaggcctgggggctctgcagctctagccagagggagggtgggagggtcctcctcatgcaagaggacaggagggtgcagggttaggaaggtcttctctccagcaagagcagacgagacaagatgctgagctctctgtagctagcgcaagaagactttctagacacagtgacgagttctaccatcgtagtttcacaaagcctgtgttttgcatgcgaggggttctactgtgtctgctcacatgtaagtgggtttctgtgtgctctgtgcttcatatgcactacttctcgatataggcctgtaaaccttatttccgcatttccattaaaaatgtgtgttctgaattttcaactaacagcttaacaaattacagtttgacttgcctgtttcttgtcttagagttgggtctttcccccaccaatttgagttgatttctatgtggcataagcgtctgacttcattcttctagatatgaagatccagttttctggaacattttttaatgattgattgattggttggttggttggttgtttggttggttaatagggtctcagtacgtagctggccttgaacttatgaacctcatcccactaaacttccatatccccattgtgtttttttggtatcctagttgaaatatcagttttgtacgtttggatttagttccaagccctctgttctgttccttcagcccatgcgtttgtgtttacagccacattctgaaattctgactattagctttgtaacaaaagttgattgttggaggtgctagggatcaacctctgggccctgtgtgtgacaggcaagtgctttatcactgagatagtgcctcggctcctgtagtgtacttttaaatcaagaagtatgatgtctctgacttttggctctttaggggacttttgtagttccttacaaaaagagaattcatctccatttctgtgaagaatgtacatggaatttgtttgtttgcctgtttcctggtgccagagattgacttgaggtctcacacatgtcaaggaggttatctaccactgagctacactccccacaccaaccattggggttttgatcgggattatatggagtgtatctattgccttcagtagtgtagattttaaaaatatgctataaggtatctcttaaaggcaagatctccatatgggaaagtaaacttacaaaatatcaattgttttctttagtttcactattggagtttcttagcctttattccttatgctgcatgagactaaactgttgccattttgtatatattcaaaagaaatgatttaacattattttaaggtctcatccttgggagggtgttggaaataaatatgtggctgtgctcatttctgtggtatgggaagtgccaggaagcacagccaaaaggcagatgactcctggctttgttgtgtcgcttacccttagcagaagtcggctaatactgagtgtgctttgcctgtccagcaaggcctttgggacagctcatggaagtggtccttgaaaccacagtatgtggacagtgagcacaggattgcctccacatcggtgtgagtctctggttgccagtctttccttcttttgacataacctgaaggaatgctgcggagcatcagcaaacattgcccatgggtttgttttaatagcaagctcataataaagaattgtcttcccagcccccatctgttttatggtataaaactagtttttgtttatttggtcttcttgttgtctaatggcattgttaactagataacaatggaagttggtcacagtattcataaatttctcaaaattggaatgtcatttaagttggtattggtatttaaccctttttttctttctgtattttgagttgacatgttttgcctgtttatggtatggttcctttggaaacttgggtgtgactttgaagctaatctggcttccctgttaaagggccttctctgaggcttgagccacgccaaggttcttccagagaagaacatgggtatctagcagtgcttccagccatggaaactgttttacgcgttattttcccagggccaggacaaggaggaggaagcaagctaagtacctagggtacaccacatgatttagcatccactggcagccatactcccttcaaattgggcactacttgttagcttccctccatatagtccttgctctgacctagcacaagtcttacatatgcccctgctttcctaggtcctgaaggaagtttgctaagcataaagtttaacacttctgctagagtaagaacctgaagtagcctgaagtaaggaggtggaaacatcacggttatttattgtttaatatggtagtaaggtacattttgctattaataagtttctgatatgaatggagacaacaaggtttcacacttattcttttgtacacatatgaatggcttttcatgtatgtgtacccatgtgtacatgtgtatgtgtatacatttaaacaaagcagcaaaataaacctccagagacttgtgaagttgagcacattcccatggatttgtggcagtagaggtgacacatttttatgcaatcccttctagatttaagccctgcacagcagaggttaaagaatcattttaaaaaatttttttcattactctcaattacagactcaatctttgtaaacacatccatagaaatgtgaaagatatgcttaaggcagcccagagaaagctgaaaattgatccccatgaggactcagcttaggacttagtatacaattgtggacactaggaaaagcagcactcactcacttcaagcaaggtaaaacgtaattaaccttgaactgtaaccaagtactgagtacattccttttttcaggtttagatgacatcctcagcagagactcattgaagtccttgacaggtctcccccgtatttagcctcttatctatttcagctttcttgattaggttatcttgaatcattaggggggttatttattttaatagacacttattggattcatgaaaagagaattcagtgacgaagaaacaagagcagaatactatctggctcatttcacacttgaggagagtctcaaccagctgaagagaaatccttccacagttacacaagtttgtttggggactttctgtgcttccatttagaaagcgaactgtctgtggttaataatatgaatttccctttaagaaactcagaaaacattcccttttggttgcatatgctgacattttctgtattgaagatgtgggtgaggaaatggcctgttagatttctgcagcaagaagcttgagtcattccgagggactgttcatttgctgagtttcccattcattagagttcctagaggggcagaagggtggtgcagcttcctgtttagtagctggagttcactctccagctctctcccagacacatcaggaagggggaacatcaccatgacaaggtcctcccttctgggatctcccagccttcttccctgggggactggaggaggtaactttaccttcttttgctggagactagagcaagatatgagccaagaatactttttgaagcaaaatccagactgacttaagacttgccactcttctccctctgcctccccagtgctggaatattattgctttgtttcaagaagaggacctgatgagtggtggaagagtcctaaccagtgtctagatacaggaaaaatagcaaagtcatacacaggcatttcagtaccatggacaggactccacgttctatgtcctctggggtcccctccatctcctgtagtacttagacttaaactttagagattgaattcaaactcatacctgatgagtacccactcaagctaggccttgttagtgttctatagatgccttggtaatttgaacattctcagcctgtggtagttagaaactgaaatggacattgtcagtttccatttagttttgatccagggaaactctaaggacccctatgtgagcagtaacagaaagttctcaccagtgcccacatagaaggtgctcaaaaggataagtccagcttgttaagtggtcagtttggtgttagcgatgtatgtcattctttttagacaacccccaacagtacagctcgggcaaaacatgcttcactctcaggtcatgtgcattttctttaatgtgcaacagcatggtctcaatgtgcaaaaaaaggtatctaggctaaatggtgtctttgactgtgtcatatactaccccacccccccaaggactccttgctaaatagaaaaaagtgtgacaggaaaccaaagaagagttgattctctatcttaacagtctaaatgccttcagtagctccccgaggctatagaacatgaagatgagatgttcacatattgagatgggcaagaacccagatgcccctcaacagaggaatggatacaaaaaatgtggtacatttacacaatggagtactactcagctattaaaaagaatgaatttatgaaattcctaggcaaatggttggacctggagggcatcatcctgagtgaggtaacccaatcacaaaagaactcaaatgatatgtactcactgataagtggatattagcccagaagcttagtatacccgagatataagagacaatttgtaaaacacatgaaactgaagaagagcgaagaccaaagtgtggacactttgccccttcttagaattggaaacaatcacccatggaaggagttacagaggcaaagtttggagctgagacaaaaaggatggaccatctagagactgccatatccaggaatccatcccataattagcctccaaacgatgacaccattgcatacactagcaagcgtttgctgaaaggaccctgatatagctgtctcttgtgagactaggccggggcctagcaaacacagaagtggatgctcacagtcagctattggatggatcatagggcccccaatggaggggctagagaaagtaaccaaggagctaaagagatctgcaaccctgtaggtgcaacaatattatgaactaaccagtagcctggagctcttgactctagctgcatatgtatcaaaagatggcctagccggccatcactggaaagagaggcccattggtcgtgcaaactttatatgccccagtacaggggaacgtcagggccaaaaagtgggagtgggagggtaggggagtgggggggagggtatgggggacttttggcatagcattggaaatgtaattgaggaaaatacgtaataaaaaaaaatctgaaaaaaaaaagagagatgggcaaatagaccttgtcgtggctgcttttggaaattggtgttcctctttaacaaactgactttgaggtgacaaaatagtccccacatgctactttctgtataacccatcaagaagaggccagccagccctattgatgaaggtacatcagacacatctacacctaacataacactcatcacacagtgaaagagtatgcaacgtgctggaggctcagacaggagtgagcaaaaagttttcaaaggagattaggcgaagccaggtgacaagagccttgaagaacagtatctccagggattattgatctgggcaggaggtattacagctaagagggtagcatggcaaagcgaggagatggtaatgtgcatttaccaaatgtctgctgggactgagtaattcactgtgtctggataaaaaggttgcctggggaattgttgagggatggggcaagaagcagcagtttgtggtcttaactgtcacctcctctagcggtctccttcctgcaacttagcaataaaaccctcttttctgaaagataaacgagagttaacttgttttccaaaaagaattggtgggatattttttcaagtagtacagagtcctaatatatttacatgatttgcttagtaaattcagaatggcatccaactctctgggacatgtggattgtaaacaaaggataccttgaccgctgtgactgtcacctcacctgcagagttagagagggccatcagacttgtttttgctaccaagggaaatttgcttaagaggctgaagagatggctaaaatataatgttaataaaaacagtttgcttattttctgagtgtttaggcactcattaactgttggttgccaggaatcagtctttgaactgctgccccctcactgggtcccactgtaaagatgcagtctctggaatcatattcatgggctctgtgtatattttcaatatgtaggttctagtgctctctggaagtttttaaactttttaaaactcattttggacacaccaatgtttaaagcaaaaagcatagaactaatgctgctgtgtcctgtaccagccttaccccttaatgctgacattgtccatcaccgtagggaaattttatagcagtgcaattagcaaaaccaggaaattagcagttctcccatggacagtgtgatcccgttgccttagttcttctgctcacatcttttttcttggatgcccagatctgtttggtgacttttattagtctttactctgcgattcttcctccgtcttttatggctgtgccacatctgaagagtactgactgattattgcatcaagcttatcttggttttgatttgtgtgctttttttttcttttttttcctttttttttttcatcatttgtctgaggttatgcatttgggccaagaccactttctgaatgacagtctgcccattgtggtatttcatgtgacagtctgcctttttgtggtacgtattgtgacagtcatggtgtcaatatagcttcagtagtgaagctggccttgaccaattggtacttccttacatgtctactagccaattggtcaaggtcatttcttctttgtatttttgaactctgacagctaattactgtctgctgtttatgacaggaatgagataacagatcctagagataagaaccaggggacaccaccgtttttgtgaggctcccctttaatactcagtatcttccacagagcagccacttactctagggttgtccatttcagggcagggcaagaactgagaagtcagatctcagggctgcaaatctgagtgctatctgccattctgtgccatgctcacacccttgaaactcatagaatcccagtttattagactgtaaacattaactggactgcctgaatattcagctaatctctaatcagaacttaaaatcaaatcagacttaaaataagagggaagccacagaggacaggaaggagctactggttgctggagatcagatgaactgtgttagtgtttgaaaatgaaaatacttcaggaatgttccacacaacacacagggaacaacaacaaaaaacctacttgagatttttaacagaaaaaggagatttgtttattaataattcatgagttcccattgaacatgcatgacagaaacagtgctattcaatagagaatacagtcatctgtcactgttttatttgacatttacacttttttttttgcctgatactgcaaaactttcttggatggtatgcaaaaattatataaatgaaaaaaaaaaccaacataggaaccctttatttcttctgtgatgggttctctcacagttacacaggtacggatgtgttcatgcaagagcatgacacttctttacacgatcactagccactagacaagcaaatatgaggccctattaacaaaaaggagccagtgtccaaatggcctcctggagagatggcgtaaacaaaaagatgctgggtgggatgggaggtgaggaggaaggctagcgtgcaaatgtgcagagggagccagtgaggagacagcaaatcatggccactgagaagaacattggccaaagaatgaactgccatttcagataagaaataaatatttataaatggcatcacaggagtcctgctggtgggaatatcagcattttgtagagcaaattagagttaggagctccttaccactttgtactagtgcgggctctcaacaagctttctgctctgtgggttagttattatttataaaaatcacagaaccagctgatacattcataagctaattattgaagcagctgggtacacatggtgcaatatggccaaggctgtgaagtatcacagatttcttggggcctgctgtggtgggggtgcactgttgaagactccttcccttaatctgatcagccaagcaaacactttgtggggaaacttgattaataaccctctaaataccatgaatgtgcttcatcttccaaactaggttcccttaaacatgccattagctcagcccatcagggatttgaggaagttctctgctgccctaagaacatggccttgttggctacttccttatgccagaaattaatttggtttgcttatgtctgtacacatgatcacacttgtgtctaatccactccctaatagcttcaaggtcaagaccttgcatgtcagtgggcaaattgagcactacacttcttaaagaccgatggcagatagcacacagtccataacaacaagcctatagtgagttctaagtgagtgtaatgagcacagattataacagcgcatataaatcaaacgtggcaatggatgttgtgcgagacattccaagtgtcataagtggagataccactcagctgtcacctgtcttccttcaagctgtggcttcccacaatgcaatgtgcatccttgaagccgaacagcaggtgctgtcttccttaaggtctggctatctcagaacttcatcttttaacagatgtaggtttttgtttttattttccattcagtgattggtctccatgctattgcctcccctgggagatgttaaacatacctgtttgaaacatttgaaagagttcactagagacttaattcagatctgtgaaaagacacagaaatgggagcttaatttttccacagatggcttattttccatctcaagaattctttcctttgtataaagaacccccgagaaaacactttgggaccaggagatttttattaaaatataatttattttctggtagtgataaaaatttatcttcattttttcatgtgcatggcacttgaaaattaaccattacctgtctcttgagttgtggggggaagggctatagaagtacttggaaaacacatttgcaagcaagtggtaagataccttgttttcattcttcctaactctctaactctcccaagctcccagtttattgcaagaaaagatcaggtctgcgcaaatgtggcctctcacttgtaaaaacaaggcagtgttgtgttacagattagtttataaatccccagtggcttcacagttcagtgcccacagctgctgcacacaggcctgggtttttgtctcctctcggtgctgcagccggcagttgaaggggaaaatggaatgatcaggttattaacatggaggccgcgaggaggaggctgcacaatgagaacagctggtgttgctgtcttggctgatgcagcggagataatcaaatcttgccttttttttttgggtaaaggcagaagacacagtggagagttagacaaacaacagcttatgatatgatatggggtttttacaatgcgtgtcaggagctttcgttggcttacagtgatgatggagagtatgtggagacttgggatttgtttctcgcaacctcagttgtgtttatgcaccttttaagaagaaaaaaaattctacccttttgcaagagatgaattgtgggacagttcttggtgttaaaattagcgacgtagcttggaagtgatgggttagaaagctactgggtaaaatattttgacacgagtcagtgagcgatgttgacagcctctgtattattttcatataagccatcatttgcattgcatttccttcctcatgcagttgtaagagagggaacatccggctggcagagttgggacaaggcacttgcaggtgcaggttgacccactgtctcccttcctgcaggtgtggccaagggggctctgagcccagcgtgtccacagatgaagcaaatgtaccttggtctttgactctagccgaggaggatgtttctattagcagggttacaaatgatgagaaggacattaactgcctagaagacgcagtgctattggcacccaagacattctttttttctttcttttaatttgccatctcataatatatgtctgtttgtctttcctctcttcttagagtagaacactaacaagttgggtattgtaaaaatttatggctgaaaataaaaaacaatccttttttggagaaagtgtaactataatctcacttgtacatctagaagaatctgttatatggattgttaagaaattcatcgggaatgtattctataggaatgtgttaagaaatttcaataggaataaagattttgtggctggggatatagcccagttggtagagtgcttgcctagcatgtgggaggtcctgagtttgatctccaggcctctccatcctataaacagacattacagcacaaacctgcaatcccggtacttgggagttgtcgacaaaaggatcaggaattgaaggttatccttgactatactatgaatctgaggttagccttggcttagctcaaaataatgacaatgatgacgatgatgatgatgtaaaaagtaaaaacaaaacatgtgaagactcttgaccattggcctaagcatcaacatagtcattggttggatttaagagttggaccatttcagtagcttctaccattggtgggaataattctgacataaaaacatggtttgggtgtccaatgggcctctctttccagtgatggccgactaggccatcttttgatacatatgcagctaaagtcaagagctccggnnnnnnnnnnnnnnnnnnnnnnnnnnnnnnnnnnnnnnnnnnnnnnnnnnnnnnnnnnnacactcaataaatgttggttgaaatgatcccccccccccaaaaaaaaccatggtttggggatggcagttgacttggagtctaagcccatatagctgctgaacaccctgcagtcctaagtcccacgatctccttccctccagggctggctttgcgaactgcttcgttggaaggagaaccccagcccagaaaaccgcaccctttgggagaatctctgcaccatccgccgtttcctgaatcttccccaacatgagcgggatgtgatctatgaggaagaatctcgacatcaccacagtgaacgcatgcagcatgtggtccagctcccacctgagcccgtgcaggtcagtgtctccccagccccagccttagagaagctttctgctggcagcacctgctcagggtctgggagagtatcatgtcctgtgagaggaggtcacagaatgaccaggaaatccatgccaatgacaatggctcttctgacagcaggtcgctaagataattaaatagagtgtccatcagattctcctattattttctaacttttatttgagtatatgtacatctaaatgtatgcacacacacacacatacacacacacactgagtggagaacttgccttttcctaactgggccctgggaatccaacttaaagctctgggcttggcatcaaatgccttcaccctctgagttgctggcccatcagtttgtttttaaaagaaaatctgaggtaaattttgatctaaaattcttcagggaatatttgttgggggcaaagcaaagaaatagccttctgacccaaggaatacctttaactctcaccgatgccctgagagaaattgtgctacatcctcagagttttaagatgagccttttctgtctccagttcccacttttccaagtcttccttatttgggtagcatgctttgttgggttagttttctaatttcgttgaaactagtatttcttttggaaataactgagcttcttggtctcctcctgaatccagtaccactttcaagaagtattaactagtgtattggtagaatgtggcacatcaataggtttggccctgcagcccagtaacagaaattttgactgcaacaaaggggctcgtgtaagacctctctcggacttagtttctgtgtagaagagtaaagctggggcggaacacgtgtgtgtgcacaggtgtgtaaagtctatgataggagatggtagtgaaggaaggctggttaggtaacgtttatgacacagacaaaatagaagaaaggtgaaggatgtggaggaatagcccctcagctatctggctctcatctctttgctccttactatatgcctggggaatagccagaagtaaaggggcctatccgatctcaatttatcagtattgacatctcagccaaaactgtcgtgcttttacaagtcagtttctctggtcagagtcatgctctgactcatgtgactcctggactcactgaggcagtgtttacaaagttctcagtgaacccagggtaggtaggcaggaggatgcagggtcaataaacagcagagccacttattcagggaggctgaaccacagtgcttactctcctttctccctattctgatcttttcctgtccaggcttcatccaaacagcaaggagcatccctacagataattagaccagtgtactgagtcacacagaacagtggctttccaacttttaacttcttcaaattaaagagagctcggcagagtttaccaaccatctatttcagaaaataaaccgattcaaacacttccagagaagtgccctgtcatttgaagtaccactctgtatttttcagtactgtggaacactgagcatatccaggaaatagcaccaggcaaaaggccatagcaagagtagacattccaccctctaggaaactcctcatcacctgccacccttatttttctcattttctgcagcctgggttcagtcttctgatttaaaccaatagaacaccaaagattgcttcagcaaccagggacttttcgtggccttatattcaaggtctgtcttagtccaatacaaaagcaaattttttttctgtaaaattttattcttgagagtagcagcaggtagaaccatctcagccacatgtcagtgatgaaagtggaaactcacagctttttgggtttgctgtggtttttatttatttttttattactattttttttttttgacttttggagacagggtttcactatacagcacgagtcaaccccaaatttgagatcctcctacttcagcatactcagtgccatcatgcctagaaacagaaatttgaaataaccccatggagactcactattcactgcagtgaggagcacttcccttgggtaatagctctcatcacacctgtctggattcctatgcagacgttatcatctatgtggctctagctagatgagagagcatccagatgagtagtcacacagttgaccagtctaagaggactaactctcagccaggcagttcactcatttgttcttttgtgttttccatatcagagctagttcatgggtaagccaaatcagcctttgtgattttcagtgtgctgtgctgtgccagtttatgtcgacttccggtatttctaagacaaattcccttacattctggacttttattcctatcacatagctcttcactaaggaatttacaaacaaggccattttttctacactgaatttgccctgtgtatcagtcttgactctcccactacagtaaaacctgagcctccctgtgagtgatgatgctacttcagtgaatttataatgtcagaaaaatacaaatctatggattcattatttattacaatcatgatataaaaatgagggataatcactggaaacggctgggaatgcttttaaactagagaatgcagccaacacagcctccttagaagtgccactgtgcctggtagaagactgacttgaaatatacctagccataatggcattgtctgtggctgagcacatgccagggcattggacttaagagttggggtttaacttgtacctttctatcatttgtaattttaaaaagataggtatgcttacatattttaggaattttaaaattcatctataagcttactattggtttagcaatgctgcattttgtctaattgggtaggaaatgtaccatcactaaatcattaacgatgatggcgtctcatatatacagcataaaatgcagagggggtttctcttggtgggcatggaagaataccaattgatttcattgtaactgggtatactagtctccagttttccttaaatggtgaagatcaagagacagtttttgagtataatgactcactattttggtctgttaacctgggtgctatggttaccctggctctgtctctgccttcatcgggagttgtctgtgaggttcttcagctcaaagccctggtttcttaccagttgtttgcagacagaatttagaaatgcaccagtcttatgtgcactgggaatacacttctcttaggatcatgaagatttaaaaatttaaacccacagttataaattatcaggttctacataaaatttagagagtcagaagatgcggtccaccaagctcaagaagtccccacatagctgaagctacaccgtttccatggggatccacaccgtcatgtcacttcataccagccacaccctgtgcatttgtacacacttcattccactttattaatgcaaactctgcatacattatgcctctttgccactgttgatcacctgaccctggtggtcatgtctctacatttgaagcggctgcatcagagccatgatactgcctttcggtatggctttaatttttttccctacatactacttagttctttagaatatcacacaatatgttctgatcatttttacttaaccctttgcttgttggctgataagtatgtctttgatgtaacttcccatcacagatgaatcaaggttacagctgagcctctgctgagtttagggcccatgtaggaatgttgtcattcctagacttgatcgtgatagaagaatgacatgtctcctccttggaattcatatttccccagcaatatgtaattttcaggtcatgtggaagtatctggccttacaaagtattctgtggctattagaaacaccagttaacctacctgagtagaaactggctttaactctgaactcactttgtaaagccatatataacccatgtccacaggaagagatatattgtcccaaggcaaatgaacactgggccttggggaaaataaaaaagcatagattcacaatagtgtatggttgtctgtatcaattcagcatataaagagacagtgagcatatctctggcattaaaatttatgaagaggggagattttttttaactttctttttttttctttttttctttcttaatattttttattatgtattttcctcatttacatttccaatgctatcccaaaagtcccccataccctccccccccccccgatacctctacccacccactcccactttttggccctggtgttcccctgtactgggacatataaagtttgcaagtccaatgggcctctctttccagtgatggccgactaggccatcttttgatacatatgcagctagagccaggagctccggggtactggttaattcataatgttgttccacctatagagttgcagatccttttagctccttgggtactttctctagctcctccattgggggccctgtgatccagccaatagctgactgtgagcatccacttctgtgtttgctaggccccggcatagtctcacaagagacagctatatctgggtcctttcagcaaaatcttgttagtgtatggaatggtgtcagcgnnnnnnnnnnnnnnnnnnnnctccccccccactcccctacccacccagtcccaccttttggccctgtagttcccctgtactggggcatataaagtttgcaacaccaaggagcttcccttcccagtgatggctgactaggccatcttctgatacatatgcagctagagacacgagctctgggggtactggttagttcatattgttgttccacctatagggttgcagacccctttagctccttgggtactttctctagctcctccattaggggccctgtgatccatccaatagctgactgtgagcatccacttctgtgtttgctaggccctggcatagtctcacaagagacagctatatataaagggtcctttcagcaaattcttgctagtgtatgcaatggtgtcagtgtttggaggctgattatgggatggatccctggatatggcagtctctagatgttccatccttttcgtctcagctccaaactttgtctctgtaactcctttcatgggtgttttgttcccaattctaagaaggggcaaagtgtccatactttggtcttcgttcttcttgagtttcatgtgttttgtaaattgtatcttatatcttgggtattctaagtttctgggctagtatccacttatcagtgagaacatatcatttgagttcttttgtgattgggttacctcactcaggatgatgccctccaggtccaaccatttgcttaggaatttcataaattcattctttttaatagctgagtagtactccattgtgtaaatgtaccacattttctgtatccattcctctgttgagaggcatctgggttttaagaaagaataatataaaaagcctcatggtgagttgataatggggagaaacattaagaaattctaatctactgagtgctgctggttcaagagtagatagcacagagaagatcaagagagtgagacaagggatggagacatggcttgtcagttaagatcacttattcttgcagagaacccaggttcaattcccagcatccacataatggctcacaatggccaggacaccagttccagggtgtcctgacaatgatgctctcttctgacctccatgggtaccaggtacatacatggtacataggcatacacacttaagcacataacactcatacacataaaatataataacttagagggcagggcacatgacaagggaaacaatgcaaaactaaaacattttgtaaaaaaggcaagtacgttttatatttcactgcagcaggttgagacaaagtttcttgtggttaatgttttctcccacatggttactatggcctgaggcactggaccagtggttctcagccttcccagtgctgaagtccttcaataccgtccctcatgttgtagtgacactcaaccctaagatcatttcatcgctacttcttttgcagctgttaagaatcataatgcgaatatctgtgtttctgatggccctaggcaaccactgtgaaaagatcacttaacccccaaaaggttgagaaccactgccctagagcaaatggaaatcctcagcttagaataaaaaacactacttgtattcaggccttcatagtaacaactatactttacaattggaaatatctgagtagctattaagccctgctgaagccaggatcaccagaacaccagtgagaacacaggcatttgttagcatccctgcttgcctctgtctgaccacacttgcctctgagaatgcaataaaaagaaaggccattgctcattctatgactagtctctgagcagggttgattggggagcatccaccaaattgttgatggagtccgtggtttactgttttattgtatttccactgcacagtttccgtgggttgttttctaagttcagggatttgtagttagctgctgtatggtttcttgagaagtacttgttttaaaattttaaagttccgtgcagcacactgagtgagaacatgagacctagtgtcgagcaaacaccaccattgtgcctttgttcatctggacaaaggctcagagaactcttggcatcttctaagccacagccttcatgttgctggtagtcaccaatggtttgcaaccagggcagtgttgtccccaggggatatttaatagtgtgtggaaacatttttgattgtttcaattcgaggatactactagtgtgtaagcaaatgctgccaaacacccaacaatatgttagagcatcccctaaaccagacttcggtgacatgttattagtgcctcagttacagtttctggtctagactcaccattggtgcctcacctgtaaaacagaacactgtatctccaggctgattctgaattttcgctatatgaaatccaatattagtaataacagtgatatttctgcatcttccccctccctttcacttccctctcctccttcctctcctctcatcctccctttcttcttctccctgctcctcctcctcttccctcctccctcctcttctttttttcctccttcctttttctttctcttctcccttcttcctcctcctctttctcctgacccttttccttcccttccttttcccatcccctctcttctttcctctttctattccatccttccttcttctctggcagcaattagtctttttgaaacctagaccctccaaatgtgagatttaaatttttatcatctgtactcattgtaaaaaaccaagagagtggttcgtttttatcttcttagtaagctgagaaattggagtttaaagaagttgggtaacttgctccaagtgagaacttgaattcacatctgcctaccttccaagtctgacttttatttgtatgttgcaaaacagcatttccagaatgcctactgttagctgtctggtattgtacacaattttttgcatatattttattttcaattatttagctgaataggtatagatttgtgagctttcctttttacaagccacacagtttgatgaaacttgtaacttactggtgtgatgtcaaagtcctgggatcactgaactcttgtggttagctgcctttgagccaacttggaatgtggcttctcttgctagagttgaagatgttctcagcaccgagaaagatatcctgtgttcctactccagttggatagactctctgtcttgatttatgaattcacttccaaaagaacagcttctaggaaaataaatagataagccaattaattaattaaggatgtttgcaaattcgctaaccaggttactacaatttttttcccatcttggatacgttccaagcgcctatgcaaaacctgctgtttgaatgtagtttccgttctcagcccttgctgtgctattaaggagctatggcaacgaagttttgccctatttactacattggggcaggtgagtataaagaagttggtcctcataaggaggattcttgttttctgtgtcaccagttaggattgcagtatgtttaattaaaaaaaaaaatgtgctgcacaggaatagatagaaatagaaatttgggggttttgctttttgggttttttgtttttttgttttttgctaccagttctttttaggcaactgctgtgttcatcccaatgttcatagccctaactgtgctgaaaagttttccccagggagctggagccagagtcagcttcttaggcagttgctatattagacttgggttttagcacacatttgagaatggaggcctgcttgctatggttaaatttaaagttccattatgaggtatataaatctgtatttggttgctgtgtttggaaacatagtagaggaaacagacagtgaagaacttcgtggaaatccatgactctgagtgtggttagctgtgtagaaggcagagggatgttcagtcaaaagttcgtgatctcacctcactgaccgtctttcacacagactcttccttctctaataagcttttcttccaaaccatcacctgctttgccctcatggcctgtgcgtctccacactgtaacctctgtgtaccattcataatttctctgcattctaattactcctcatcagaacccaggcctgtctttgtcccctactctacttcaaggtgtttccctagtcctggctcaagccagtgtattgtgttcatccatatatactaccttagataactcccaaagagaaattgacctgtccactttatccctctgaaggcagattttcgaggcatgaatttccaagcagtaccacagacgcttggttgaaaaggcgctgcattagaatgcgtctggaagacccttcttttgcaaagcatcagaacaaccttaagaagttgactgggaagtagaaaagctgtggttctggactattcataagtaaagagcccctcccccctagtcagaaaattagtcacatttaggagaatatgttccttgggactattttttttttttttgtcagaatagatgttttgcaagtgtgatagacaagctcaacaaaatcatattgaaggggattcatattgcctgctttttgcataatggtttatgagtacatcctggaaacccggtgctggagggggactgccagccctgtgtgcttgtgcttccccccacccccactgacctccacgcccgctcctttcattgcaggtttcctggcatcgtctccatgtttcttttcgtcaatcagggtagatactgaatgaacataatcttcacttctatcttaatttgtatctgggtctgctatttgttctctttacactgggttcgacatctccttgagctcattgttttaataattggagcacctgctgcacatgaaaacatccgtacacataaagtaaaatacatctaaactaaaaagcccaagtagtacttaaaagcataaagcttttgagttcttttctttttcaacccaagaagatagagaggaaatgacttataaattttgaggtgggacaaactgatcccatatgaatgacacagccatgagaaaaaaagacatgcagcagagacaaggcggagtgtgtactagaagtgtccttcctgtctccctcctataaaagtagcaatgattaaccaaagctgacatgaaggctgttgtcgatactgaccagttactgttctaagcccaggccctctcaagaagtccacctgaggcaaggaaagtacattcctttatacttcctgagatgtcctccacccctttatactgcccgagatgtcctccaatgcaacttttgaaagtggccagtaaacctgttcacaaagtgcaagttgttaagagattccagtggtttttattcatggtttttatctcttcacctgacaactactgaactcgtccacggtagcagggtagcagatgttcttctaagctgtacatattcagtctcatgatggcacacaagtcctgttccaacagggtggtatctccttgcttcaggccttttccttgttgttgttgttgttgttgttgttgttttcagaatgaatctagtagcaactctaaaatatatggagcctctcaggaatgccattaccttaagatgcacactcacacacacttgggcacacacatgcatacatgtttgaaggtgtgaagccagcagacattctgagtcacttctggaggccagagtaatttacatagctctacaaaatcacatctgctgattagtaatcaagtggtgtttttaaaaaatggttttgatggaaaacagatacataaatagtatgtctgctcctcccttaatttatccctgaccacacagacactttgttcgtgtctatgtcctggctgtattcactcttaccacccagagtgacttctccaaccttttcatgtggcactagggaagggctaattcattgtcagggtgccagccaagccacctggctcactgggcatgccttgaccaaggctgtccctctgtattgagtatgggaaacacctcaggagacccgctccacagagtgctgttcactcatggaccactgctgattcggagggactcttggtctttatagaagaaacacaggacagtctgcagagaaaggctttcccatctgggaacttcccaccaattgcctctgttgattgcgggtgatgctttcacgtattttggtttaggcttcattactcaaataatgtcacaaatcctagagctaatcccaaccaaaatgacatagaaagtgtctggaaagtcaagcccagttgcctttctgagtttaggaagtgtatcctaggtacctgatgaaatctacaaacctgttccataaatttaaatattgaaatatttccaaatacatccaaatgaaagggctattgtgcttcccctgctcccattctaaaagagatataaaattgtcaaggggctttatttaactagcccatggatccccagctctgccatatcacagtgagtgcataggtaaggggaaaactatctccccaacccctggaactctggcctgatgtctaaggccaccactgtaagttgagagaatacagtggctgctgaaatatttttgggaatagtgataatcacccttatcctgagattcattgcagctgaaatgagctggtgtttgcttgagggtatctaagaaatgttgataaactctgagtaataattttaggaaaaagttttatgttatatgtatgagtgttctgtctacatgtttatcagtgcatgacatgatgcctactgccatcaggcccagaagaggattttgggtccataaaactgtagttatagacagttgtagggtatcatgtagatgctgggaactgatcttgggtcctctcaaaagcaaccagtgcttctagccactaagccatctttccagtccctcagtggtagtctttttttttttttttttttttttttagatattttttcatttgcatttcaaatgctatcccaaaagtcccctataccctcctcctgccctgctcccctacccactcactccaacttcttggctctggctttcccctgtactggggcatataaagtttgctagaccaaggggcctctcttcccaatgatggccaactaggccatcttctgctacatatgcaactagagacatgagttctgggagtactgattagttcatattgttgttccacctatagggttgcagaccccttcagctcttgggtactttctctagctcctacactgggggccctgtgttccatcctatagatgactgtgagcatccacttctgtatttgccaagtactggcatagcctcacatgagacagctatatcagggtcctttcagcaaaatcttagtggcatatgcactagtgtctgaatttggtggctgattatgggatggacccctgggtggggcagtctctggatggtccatcctttcatcttagctccaaactttgtctctgcaattcctatggatattttattccctattctagggaggaatgaagtatccacgagctggtcttccttcttgattttcttgtgttttggaagttgtatcttaggtattctaggtttctgagctaatatccacttatcagtgaatgcatatcaagtgacttcttttgtgattggcctcagtagtagtcttattcatcttcactaaggataaggaaaataatttttagtccaatgagtccagtattgagttgagggtagtgccagtgaatggtttcctaacaggaatatctgagagtggtctgcttgttatatagttgttttgagacagattgaaagacttcagttactctggtctctcctgactgtctatgtcttaaagtcctcccaaagtcaaagtaagacttctttgctcaataaataccctctgtggggaagagttaaatgacattcgtagaaggtaaatttagttagtagctgtttcctcttccccttcttcctcctcctcctcctctttttctacttgtttcttctccatctcctcttccttcttcaatgctttcactctttaaaaagcaaaaagatgcacccacttgataaccactaggaacctggctgctttgagactgtagagttataaggccatgcagtggctaagcttgaatatctttggtccaatattaaacagacatctgaagcagttccatgttcgtctttgtggacttgaaggaaaatattaactggtcttgaggaaagaaatgtattcaaaaagagctattttggctcatagttctaaaggttcccagctaagaagtggcccatcacttgctaagaagtggcccatcacttaagttgtctggctggaacagcagagtagggtgcagattgcttacttcataagccaggaggcagaagagagagaggacagagtttcccacaatacatttggaatagacaactccagggacctaaggaggccctgctccttcagttttcactgcctcctattagcaccgccttggtgacctcgcctctaacacataggcctttggagtttgctcatccaaatcgcagcattccataaatatttactattttctgcatgcttgtcaccacctaggactttggtgcatgctttcagcaaccaaagtgtcacccgtaccagttttgtaaactattaataacacgaggaggtgatcatggggctctttatttgatacactcacaccttggtttgcttcatctattttatctcagtgagtgtcaaacgcaaaacaaaataaaataaaaacccattgctcctgggagagtcaagtacacagggaatggaactctgtaatgcaagaatataatgactctgaacagcctacattagttagactctgacccaatcactttgctcgtgactgagaattcggacgacagcaggagaaagccagcaccgagtttgaaactccgagccaaacctacctacagtaggtctcttttggaggtctctcttcagctgtttttgcttagtgaggaaatctaatgtagctgaaaactactgctgatttttattaagtggaagtctggaagttcctcttgtaatgatagaaaagcacacttccaattaaagagaaactgccaaagttctgacattcatttattttattattacttggcttgaccctagaaatgggggggaatcaagcaaactggctaggctaacagtcccaaggccacaagttcaatttcctcacaagctgttttgtgatcaaattcactgtaaatcatataacccttcaccttttgatatacaatcttctgtggaaatatgtattgcatgagagtcatcataatcacgttgcattgggaaaatgacagcttagccaggccaagcaaagggattgcagagagaaaggtcacgaagcactatgtgcctcatcaaaggagggatgtagtataactttccgcagcagagttggggggattctgtagtgagttataggcagcctgttacaattttagaaatttggtaggcttgttggtacacctttgagagcataaaacccatcatggtggccttaccttgagaatttgctaaggagacaatgaggactgttaattccagagaatcaatctttttttttaaaacaccaatacagaactgaatacatgtcagtaaactttagaaaagaataaaataaaaacttgtttgccattcacatctttgattttttataaataaattttgtcaagcaccatggtatgtatgtatgtatgtatgtatgtacataaaatatatatattttaaaagtcatctatttctaaaaccaaccacagtgacaacactgtaggcacaattgtcccctctgttatgaagaggaagcagaatgactgagtctcctgtgtgtgaggtacagtccgaaccagttgcctcatcctgtcccacgggtagatcatcctttgatacatctttacattagatgtattgagtgaccagaactagaggcgctgtcattgtatctgtaagaagatagccaatatgttctgccttccaagaacagagttggaattgtgccctggtggtctgcaccccagccatctctgtctatttgcccacatggaccggaggagtgcattacaccacatggacaagtaatgtcccccgtgcttcgtgttgccagccctcaacacagaatgcgtctgtaatcagtccttatcccatgtcctattcatctgcacttgcagcttttcaaagcctagtctgaaacatcttggcacagatggaaaagcacaggcacttctaagttccagagctacaaagacacagaccagacatctgatattaataaatagcttgggtgcagggagaattaaaaatcagattatttatttagaaagttgaaagtctgcattttgattattattctgctctcaagaggaagtaggtgcgcgtttaggggtttgctgtttttctttctcatccacacatttccccccttctccccctctctcgtgttttgaattaaaaacctaaagacagcctgcaaggctgtatacataactgcaagaaggatgcagtaatcacagagtggtttgtgatctcagacatggtggtgtcagagtcggaagaccaaatggtgaattcctcacttccaatcggcttccttggaaaaccttaccactgtagtatcatggataatagcttatcatggataattacatttttacaaacggtagagaaaatcattttgctacacacatagtactttccagccgggccagcttctcaatcttttacagctttcatgtgttaaggctcatgttttctttgtttgttttaaaatatactatcactaataataggtctgtcctatgatcagtctccaagtagaagataccacggaagataccctttcctactgccccaagtcaaacatctgatacttttgtaaaacatggtagtcctcatgcttctcattaaatgggctatggcaaccaaatttttatgcagatttctaaaagctttggtcatttttcagcttgttgctgtgtataatagaatgaactgtgtttagtggcaagtcattgaaaagtttaaaaataaaaataaaaattggggagatggccagaggagaaaaactgccattgatgtctttgccactgctatccagtggtgtgaattttggcgggcctgccacctgctctgctaacccattacctgcagtcaggttctacggagcaggaaaaactaccttagggacaggactctttccttaaccctttctgagcagatacagtacttcattttgaaaatgaaactgactcccccgaggcctttgaaactttaataatacacaataaataaaatcatatctaataactcagtgctttcgtttgacatcaccaccctctcagtgcgcagcaactagaaacataaatactcgcaggcttcgagagcccagtttctatttgctaaataaacttggctggctttaaattcctctgtgtacagtcattaatacaatccactttgacagcatttaattaaagtgcttttctctattaaattcattaaaagcccccctccctctatataactgctttccagatgctgagaggcacagggttgtcaggctccctttgaagaactcctcattcctctttgtaaagtgtttattatgctccatttaggaactgttaaatatgacttagaagggaaggcagggtccaggacacactctctatccctttagcaatctcttagaaaacaaatgttagtttactcatgtgaacaagcatctctgtatacatatttctcttacactgagtgacacttcagggcattcagagtagcataatgaagatacatttccatatcagggctgaggaatttgcattggttctaaacaaggtatttggcttgaatctatttgcctgcagattcagggagagtaagtgtagctattcagtattaatagattattgacagtttaatgtcttggcacctacttagcccatgaagtataataaccaggaagctgtgcgatatgaaggcagtcaatagcattttcaatcaaaacctttcagttaattgctggttgaccttagagatttccttgaggcagtactgttcttcgtttagagcgatggggccatattgatttgtggagtttattccgagatgattctttaatgcccattgctacagtctacatggtaaattgtgctttctctgcatctgctgtctgaattgcctcttggccgaaattctctctgccagctccactttaaaaatatttcattaaatccattctcagaaatagaaagtcagggttcttgaagtcgtacacaatcaagtgttttaatatgataatagcattttattcatcagtttggaattataattctgacagagactctgtcaaggctaaaaactgtacaataccttaagaggatagcaccttaaaacaaaagtgttctttgatggcgtcccagtgccttttgatctctgtagatatgggaggtggcttatgtttagctatctatgcttagcttccatgacttatttagttttagttgaatattttaaaaaaacagattttaataaaatataaataaatgacaaagtggtaagaaagcagcaaagaatttattttgacccatttgctcactttgaaatgtgtggcgtggaagctggagaggctgggtgaaaataaagcaagaatgcatctttgaattgattttgttactttctttattcgctcagatgtacttcattcattccactctaaggaaaaccacatcaacatttgatgttcgttttggaaaagatgttcagtgtttttccaccgcattttatagctagataacactctcatatatctcagtgaggagccagggccctctcaagaggtcactgggacccataggcttcattagaaaacgtgggctgcttttgtagattctttcttggttcaagattcccttcctttgtcttatatggattctccaagttttgtttgctgtttgctgtttgcctgaagcaacttctctggtcatagcagctgcctgctataagctttttgagatctgttgagaacacaaatatttttacatgtgaggagggacagagagagaagcaaatgagtaagtatgtcagtttcagtgaccaacaacagtaatgccctacgtgtcagtcacctccagcccagtgatgtgggagacttggaaagctgtatgtgttgtatgcatgcaaggagttactacaaactactctaattcaagtcttttccgaaagcatataactctttcaccaagatttcagtttaattaatgtgacattcattactacaaaagtattctggacattttatgataaattttaagttctgactatctattgaaggctgtgtgccttgtcctatgaagtgtttggtattcaagaatagatgactgtcaccagcaggtaagcacctagtgaaccacagaaaaacaatgtcagggtgctaaactcgactggtgagaggactcagaagggccccagaaagggactgtctagggtcccttacaggagtttcctagaagagaaacagcagaaggtagactaaggaataggagggttctgaccacagaggtctggttggtgtgtagcctgcaagtcaggggctgagcagcaagacttgggcagaggaataagctacagtcaggtgacaatcttcttggacactcaaagagactttggcctgacttaaggccacagaaggcctttggcaaggtgttttgtgggctttggcagggaggcctgttaggaaaagaggtcattcaagaaagagacctcagtggcatgcatatatatatatatatatgtatatatnnnnnnnnnnnnnnnnnnnnnnnnnnnnnnnnnnnnnnttctgtggcctaaatcaggccaaagtctgtccaagaaaattgtcaccggactgacaatcttcctctgcccaagtcttgctgctcagcccctggctttcatgttctttctctatatatatttggagagtggaaccttcccacaagagctctttagaaggtagtcctcttcagcacatggggtgggctgcatgttgactttaagatgaaggaatcagtcagtgggaactccatgatcttggctgtagccaacgtaggggtttggtcttggaacaccaatcgagagtgttaatgattaattccccgctaatgtcatttgtaagtatatttgttttgtactgagttctcagctattaaattaaatccacccttaagcaaattcacatttaaaagtataatcactcaacagttccagcttatgaggatgaccagcatggggtaagcaaatatgctcagaagagccaacgtggcatgtagacaatgtggacttgctgtgtgaattcaagtagataaggatggtgaataactggcctcatgggaacaccatagtcctcttcagcttagagactagaatctttcttgtgggaaaaggaaccttgagtccagtcactttgccctagggaattaggaactgaggattttgttcccagtcaccatcctgggaggaggagactggtgttcttgtctcatttttcatggttaaataagagagcctggtccttcaagcccccacctcttactgagggtcctagcccaaagctgagatgcaagagtctccccttaccttgtttcagttagagcaatcattaatatggaggatacaaagctaatatccccatagtggagtttagcactgaaaaagaatgctcctggactgacagctcgttaacttttaggaagccttatctcacaccagttagtctctctgtgttcttttctgggaattagcaaggaggcctgccactgatgggagtaaatgaaggctgaaaagtagccccgcctttgatgcgccctcatctgacactttttaggcactaagttaccaggaatcttggctaagagacctctgcttcatggtctgagaaactgccctgcttagatcatctgacttggtttacccagtctggtcttcagggtataataaactataatatctcagtggtgtggtaatgcaatagagtttgtcctttaccagagccactgattataatgtcctgcctaagatctgctttctataaaaggcatgtccatacttttatgtgtttgattcacgcagtgcagttttcctaagtcctgttattaagtggttatatccagaaagcagaaatatgctgaggtcatatattattggtgagcatctaatattttcactaaccataactgtcaaattgttctgcctttagagtgtcccaactgtaagaattatacagaaaatgtggcccattccatatcctacacaggcctcagacacacagtaacctgcctgtgccccttggccccaaataaggaaccaaatgtgttcagcattctcttcaaataatttacaccctctgctgtaacactgtgactggcattggctagtaccacccccattttgttattttagtaaaacccaacttgagagttcacaaatcgcatctcccaggcgttaacaaggttgtttgcatttcggtcacatttttacttctcttgagaattatttagccacctagattaactgcttcagaattctggtggtcattttaacctgaaaacttagcacatctttcttttttggcctttggccatccagaagccattctggtttttcaggctgtttctctggatgctgtttgaattcctgttactcaagccatcctaacctttcaccctgctagtcagtgactctgcttatctttaactcaacaacttctttcctgtgggctgggacaagaaccacccttccccacttacaccactgaagcaagacatgttgacttaaaaatcaggttctcagagtaactgccagccatttccttgttcctccttactgttttaacataaatatgaaatctttgcagcaccttatcattgtctgtgccttaaatctatcttcaaaggataggcctttttttttctttgaaagtgcaggccaagttttatcctctaagaagacatgataacagtgatagtggtgtgcaaacgggagaaaatggaagagtgcttggtaggcattcgagactgctcaatgggccaggctcttctcaggcatcaagatatatatatacagtcatgggttagacatgctaaagagcctcatcttccttactccttgtctagattttgttgtcatgtttatggaattgtttttcacttacattattactaaatgatcaataaacttgactctcagatgaggctgatgaacgggaggatggaatttccattaggttcaaggtgtggccaatgttttgcctttcttaacgtctaacttggaaaaggatcttctttgcttgatctgcttgtttttaatttttagattttaaaattgtattttatgtatatgagtatttacctacaagtatatatttgcaccatatgaatgcctggtacctacagagatccgaaaagggcattgggtcccctggaactggtttacagttgcttgtgagcctttgtattggtcctgggaattgacccaacctcctctataagagcagcaagggctctgaagcactgagttcatctctctagatccctctgcttatttagctttggttctgatgtgtttcttggtatcatagccactctatgccagaaatataaacaaacatttctgtctttctacaatgttgtaatttattgaataagactatatacatcaagtttatccatttcaacaataagtttgtcacataatcctgtttaggcaaattattattattattatcattggtggtggttttattccactcataattgctcatattagcttacttcatagcatacagcacaccaaaaatatatctgtagacatgtttgcatttacagaatgagtacaacctaaagaggcttcagtcattccttttaaaatggaatcaaaagctgttcttaaaatggtgtgtctggggcaaggaagagcctgaaaaaacaaaccaacaaacaaacaaacccatgtttatgcaatatgaaataccttagagcagtggttctcaacctgtgggtgaccccttttggctggggatcagacatccctttcagagggtatccaaagaacattggaaaatacagatatttgcattataatctataacagtagcaatataacagttatgaggtacaacacaaataattttaggtttgtggggtcaccacaacatgaggaactgtactaaagggttgcaccattaggaaggttgagaactatgtcttagaggaaggtatggactaattttaacatttggtggccatttaattgagacatagttattcacctcaactttgctgttcttaccttagcagctcattcagttgtatgaaagaattacttcactgggctgcctcttggatggtcatagattctggccattcctaagaccattattaataactgcaacatatttattttaccccaaactattccaaagttgttggtatggttgttctcaatttattattgaggagaaaatgctataagccgaaggctgttttaagtcccatgtttcctccaaaaccaagtttattttaacggattattgtgtcacagcgttgttatgcttttatctttgaccaaagtgtttattgtgagaaacagttattaagctgcattaaaagcatacacagtcgtcccatagtatcttggttacaatattacaggaaagccagactaaggctcgaggatattgaacatggatttccatgttggacttcctatcagtttgcttgtttgtattgatttcttttgacatggtcttcctttattgagcttcacacattctctgtcttttttttaaatccccttcctacagttgtatgtgctaagagcaattgtacaaagaaaaccaacttatattaaacctgcccggagtcaaaatgtaatctaacacctgtagtctgcagtttgtcatcgcttcatgggtactcttttttaataacatatttcctgcgttttgaccttaggatactgtataatcgcccaaaaagcaacagaactaagccatagtttttaataagccttataatgttaggatgtgaaattacagccataagagccaacacaagtaacatcatttgaagctaaaaatagtgctgagttgtgtctaagagaatatgttttgcctgtgaaaatgtctccgaatgataaagtcaagaggcaaatcataacgtgtgtgtgatttccctacagccctgctctcgaccttacatgatttgactcaagcaaggatgctttcaactgcagaatctattttgaatgttctagtaaaaagcttgataatcattagggagagtcaggctcacgtctcaagtgtgattcaaatagtatggaagtttccaatccttttggtcttgtgacccactttcatttttgcaattgatgacctcagtaatgtgtcatgtatatcagtcttacccaactggtaactaacctttacaaatgaagagtctgctaagttttaaataactgtacatggtacacatgtgtgcaatatacagtcttttatatacatttgaagatattttaatgtcagatatttaatgtctgataattaatgctttggtgaacagcaactagattctcagaattgcttgtgtgcttgatgtaatatgtgcttctggttgaagctgataaaagaattattatagcaagagatagtttaacaggcattccagataattgagaaattctttttgatattttagcgagactttgaaagtgacatgtttttgtttgcaaaatggagtttgccaaatggaattgagccaacatattggtgaatatttcatatttttgtattttatttattggtctccatttaactttgaatggatcttttaccagtttataactttacagtattatatattagtcacttgggaaatactagtttgttcatttatgcagatttataaatgttgaggcttcttaatatagcatttctaaaagcatcttttaaaccaatactaattttcatctgtagtttttgtctttggtgtctttggtgcaaattttagcacaatcaaagcaatgagaagtaccttagttttgcttggaagtaggcttgatgtcatgggtgtcttcatgcagcatatagtttcaccgaggttcatggatcttggcttttcgaaagagggtttctctgcgtagccctggctgtcctggaactcactctgtagaccaggctggcctcagagatccgcctgaatctcattttaagaagcactagtgaggactaggtccctaagagtccacacagcttatggctggagatatcatttcaaaggtggactctggctttgaggttcagttctgtgtgacagatccttccagggcagcttccatgtgccaggtaccatggtaagaacatgtattcatgaagtctgatgaaggaaggaagagaagttactagcagagctgttctcttatccatgtggacccttaaggtgaaagggccagttactgaaattgttgctggttttaataatagacatattgacaaaaaatacatgaagaatttagtattgatctttaagtattactcacattttaaaaatgaaacttgcttgaagctggaaagatggcttagtggttacaaacacatactgttctcttccggacactcagatttgattcctggcactaacattgggcagctcattactgcctgtactccaggggtcacctacattcaacatgcacatattcacatatacatatgtacatagttaataaaaataaatctttttaaaatgaaaattgctcttttaaaaggctttagttatgatcagacctctgccaaatacttcatacagaggatctcacttaatcttttttcttaattctgcagaagagatctttcaaggtgctaaacactgcatcttagagaagagcttgctcaagagtctcaaggctgcaaacagtggtacttggagtaggaactgccttgaaacgagaattttataaccccaaacttgcttgaaacttctacacagttgtatgttatgagttatctagtgcccgtttttgagaagagaggaaatagcaacaacattaatacacacacaaacacatccctgtttttggtgacaatgttgttacttattatatgtagattaaccaagaagagccagtgctcagcaggggtaagagtaaaactagaaataaagtcgagaggctgtgggattggctcagtgcagctatcaaagaagtcctgagctctcagctaggcatgagatatgcaatccacagttcacagcccagtgggcaagctacgtgggccatatacttaattcctgctgtttataatcaccaatgttaggtgtttcccctgatgaatctttagactcaaattaatagtctctactactggtttggatggggtggagggaaacttgccactaagttgttgaagcctcaagtacaggacattatatatatagtaatgggtaaaaataatagcatgcaatcattcttgtgtttggtatgctatagcagacttatgccaaaggactgttaaccattgttcttgttggttcatgtgtttttttcttggaatttttgatgcaggaatactttcctctttttttttttttattttttgaactgagtatttcgtgtttattggcacagatgaggtaaaacaaagtgagtaaaagatattttgacttttttgactttaacacccagtagatgtggacagaagatatcttgtccttgttgtcacctcctgctgctgtgccttatgctgcaagcaaggcttccttctgtgagtgaatcttgtcctagagacctacatgcagccacctggaaagctgctttaacctgttcccgtgccccaccaccaccaccaccaccctctacagtcacctccgtaatcatttctcattttctctatataaaaacgaccacaaagtcttggcttattataagtaatccagttcaccccgtaatgatacactgaattatatactttcctaaacttaatcattcaagatctgccttccttccctgcaggccagaaccattatatgttgcacatggctcccagctggttctcattgaggccttcagaatctgtttgagcgctgagagctttaagaagagggctttatctctctccttcggcttttgtcatggttccatgagctccttctgttttccaagtttctcatgttaagacagagaagcagcatgtgtccatgttataactgtgcattgtaactgggcaagaaggctttagggctctatttgaaagatggcatctcttccaaatatatttacaacttttcttcctgtgttgttagtctcatgtccattcatgtacatacatgttatgtctcagctcagagagatttcagaaaataaaaagaaaggaactttatcaggctttgaacttgtaatttgtttgtatcctgcccatagcttacttattcaccaaccctcaactgttggacctagaactccttatttagaagccttctaaatgaatgggaccaattgttgtaggtaccccataagtacccagatatttgatgcatggatctactttgttctctgtgaattcaaggctgattgttgtaaacacagttccttttaggtgtggtatgtgccacagctgacaaaggcagccatcaattaaatgtagagtaattatttcttccagggctcagttctggctactttacactaatgtttccattttggataatttaacaatgatctagtaacagtatatgctgaatacttcggatttagtacatgggcatacaggtatttgcccttctgccttagtgtagtattttacagctcaagctctgcttttagctagaataaattgtaggatcacaggtttctcaggggtattgtatcaccctgatgttagaatgctaagctctccatgatccaggactggatctgtctctctctattgtcactgcatgaaagtgcaggaccagtactttgagttttgaagcaccttggtctttgcggttcatcttagcattgcacgcaggaggcacccaagcacctgtgatgtggctaatgggactgaagaactgaaggatttttttaaaaatatattttattaatttaaatgtaagggggagtgtctgaaaaaatagctcatttgctaatgtgcttgctacatgaactaggacatgagtttatatccagaccccgtggtatcgtgcttctaatcccagtacctgagaggttgagacctgtggattcctgcagctgaatggccaggcagtctagcttcctcagtgcattctagacctgtgagcaatcctgtgtcagaaaagggggcatgaggagtaaatggtgcctgggactagacattcagagctgacctctgacctccctccacagacaggcacacacattggcacacatgtaaaataaataaatgtaaagctgcctgcagccatggccactgcatgggagagcgtcctccattgagctggccttgttgtttttcagatgctgcgtgcttgtcctttcctcccagcctttttgcttgcttcctttgtctggaacacttttctgcgtgtgccacctcccccacccctgcctccctctctctccccaccccagacctcagacctcacacctacgatgcttccttcatgtgctttccccattcacctctctgaagcacctgctccacctgtatactgcatcattgtcactcatcatcctactctggggtgtttgacttagggttttgcttcctgtctattctaaggatcaactcagcttacctctgtacactctgctcataggcttcacattcagttagagagatgaagaatgcaagctctgttatttacaagctggggtccctcgacatatttggattgatttttttgttttgttttgtttttataaaacaggtcaaaacatgggattaccatgaaatagagtatatatttgagctatatcatatataacacatataaaacatatatatttggagcatttggcttagatttcatggatgctaatatccaatccaactgctgttgttctaccactggaatttgtatatttcatactatgggcctctcccaccatattcatgttgaaagcaaatgatactgagaaaaagagagaggttttaacttatgctttctggtaatctcattatagagataccataaatgcatttgtgacagaaaaatccaaaacccaaaagaaccaaggagaattaatgggtacatagaggtggagagtaaaggcatagctgtcttgacaaagtgatgcattttattatgttagaaaatcacaggaacttggtgctgcaccttaaagattaaagattgactactggactctaaaagttttgcctagttgtaagaacaagtctcaatatgtaccccaagctagccttggattctcagacctcttgcttgatatatttcacagctgcacaacatcacactgttctagacccacaaactttttttttttttggagatgtacaatttgcacatagtaaaaatcatagctcttaaacatacagctgaataatctttcagacatattttcattcctttaatcaatgcccagagaatattttcagcatctcccaaagactgtgtcctaatctttcagtcagtaactctcaaagacaatgtactcatggtgttgctgctggtcctagaacttgctctgtagaccaggctggcctcgaactgagaaagatctgcctactctgcctcctgagggctggaattaaaggtgtgtaccaccatgctgaactgtttcaggctttcttactgcagtatgtgttttgctttttttttctttctttcttgactctcgcacaagtagaatctttagtctttcacatctgactcctttcaaccaacactaagtttgtgacagttccccgtggtgggctagttggcctgacatctctgttaatataatacccgctttaccctttctgtccctgaggaacactgtttcctttcaacgttggggcttttatgactgaaactactaggacatacctttcagaggttgcagacttctttctggctctagacagtgcacctttgtgtttgttacttaggttttatgtgactgtagatgttcaaaaccagccagaacaaggatggcatcaagtgccatgccaacatagaaggaggaaagctccagggcctcactcctacaccagaactgaaggcagtgaaggaatgaggagagcaggaggagtcttccctccgcaggggcataccagtggacagccagccctgaaatcacacacacataatagtatacagcgtgagcagtgtgtacagatttggaaatatgcatgtcctctctctcctctcctctcctccctctctctctctctccctctctctctctctctctctctctctctctttctctctctcatacacacacacgaacaagtaaagaaaaaaaaaaagagtccagagaagagagtggatgggaggctttggagagaatagaaaagtgatataatctcaaaaagaaattaaaataacccagttagtcatatataaatgcaaaaactgcccagtgaactcaggaatgggattgcttgcaagtgtgtcaatcaagaataactggagtgacttacatggtatttgctggagacagaccataccttgacccattctacttactaaaagggaacagagagcatgctgtaacaaattcagtcaggaaaaccaaggctgattgaagtagtttataaacctgtcctgtgagaaagaggagggagaggcaggggctaaaattattagtgggagaagtaggggggagaaatggagggagagagatggatgggtggatggatggatggatgggtggatggatggatggatggatggatggatggatggatggatggatggatgaatgggtggatggatgggtggatgggtggatggatgggtggatggatggatggatggatggatggatggatggatgggtggatggatggacggatgggtggatggatggatgggtgggtgggtggatggatggatggatggatggatgggtggatggatggatggatggatgggtggatggatgggtggatgggtggatggatgggtggatagataatactgaatgaattgctgctaacctttagatgagagctactggagagtgcttggattagtgtcctcttgacaaagatcattttgtaagcgagacagtcttggcggtgtggaggtgtttcctctgtgtactctgtctatcatggaaacactacccagtaagaatacacagaccctggagagatgaaacgttattcagatcttttgctagaaactatctagagattgtagttctttgtctagaggaggtagaacattttggaaaagtgaagatagttgtagtagacatcactggagatcattcttttctaagcattttacgcgcagtggttgggaggcagacagccattggcaagtaccagcatacaagccaaagactcagtcctttatgtaacttaaaagcagatcacttttagagacgttcattttgtcttgtgtattttgactgatcttttcgagtctgttagaaaatactagaacttacttcatgcctgtattgtcatgcccaccagcccactcttctgtattgcttggtcagaaagtacatttcattttatggggaatttttattgccagtatttctttttcaaaatgcttttctagtctatgatctgtaaagtcccctgggagcaccccccaccccccttttcagcctgacttctccctatactcctgacagtgcactccaatgcagtgtgttcctagttagttcttgatccagattacaccttcatgaagaattgtaggattacgtttatatttatctattttagactgcctgtaaccaaataagcagtgagcgagcccgcgctgttattctcgctattgggtgtttcacatttgtcttctttgtacattggtattgcggtgctctgttctaggaaacgaggggaagtggagtagcccaactgtaggggcctaaggagaacaaatgctatcgtgcagaaagattatagtaacttcaaagtagagttttggaaaatctctttaaatctactcagtgcacaatggaaagccccttaagaaccaatctaattattcaattaaatggaaccgttctgctggcttttactacagaaggcaagcataatttagaaaatggagcattttaattctcttttgttttccaattaacgcagttgctctaatagggaccactcgtgcttgagcacatgtccggctagagtgtgctttgtccctgattccagtcccctttctcaccagaagccgagcccctaacctgttgaagcagaggtttatttattagcatgctcacactgcccacatcataggcccccgagcacacatcttcctgttgtcaaagccaccaagaaccatgggagcctgcaatgcaggcccactctccctggcggggataattaggacgttggaataagggagctctcacttattttgctgatgccagcttaccacatcagaccacacgagtttgttcttagttgaaagtggtaacaaaaaacgctaagaacattgcctctaattggtcggcactgtttggacagacgctagtccactgttttatagtcctttgtttttgacttctttctgctaccagccaccagcttattacagtaggtagtctcattatgtagcccaggctggcctagtgtttgtggttcttcattctccaagcctcccacatgcttatacagctgtgggccaccatgctgagcccctcatcagtgtttactaggtagcagtagtaattggaaaagaaaacctgccgtattttatctctactatttattatctctataaagagctggcattttcacttgggtgagaaaggatgcttttcatcataggcctctgcagtggtgtggatagcaggctctcttaactttagctgctcatgctgacgtctgtgctggttctcagctaagcagtgggccacacggctagtcctgtggtgggacacaccacaggggtgtgataccatgggtgatttttttttttaagggtggctacatacatttctttttctgtgttgcttgggtctgattctctatggactctggaaaaatgtgtaatttgggatcctaacttgggagaacatttcatgaagcattagaaagttgtaaagcagaaatgtgtgttgttttgaagtgaacttgagagggcacaggaagctgggcgctactgagcacagacatcgtggatctcaactccacacttgacttcacaggtctcagcagggatggccgtgactgctttttaattctatgacacgcagctgcgggtcaactgccagtgctggccaagtctccccactgggtcacattctcccttccagtcttcatagagttaataagttcatattagagtggaagttatttcatgcagtggtaatggtggagggtgaggctcagggtaaagttgcccacttagggttttcttttatgaatgtgtagcataggtagagataaaaagaggggtacttacaaagaaaaagaaaaggagaaatatttaaattttaacatctagctagtaaaccttgcaattaaaaattaaaaaatagaaatttggaagtatgttcaaaacagagggttaattagtttatagggatattaaaatgcctatctaaatgcggttaaatcagtcaattaaaatttaaaacatacagaagttatatctttaaattgcttgaaaaatttacatatattacttaaaataatcatatttaaagagcaaaatcagaactaaaagaagataaagtatttttttaatttgacaaagggtaagttatccagttcaaagtcctatccatctctctataccacctgaggaacagtgaggctgagaagacaatgattaccactgactagaggcttcaccaagccagcggtaagctagccgtgacgtccggggccaaatccactcccagtgggcagaggtgagctcattcgcttacactgagaagcactgagcaatggctgtggccccttactgaaaaggttcccctgtcccttctcccttcagaatgctgtattgtatatacactatgcagttaatatatgagccatgcttgtaacaccactttctttttttattttgaaaaaaataatttttttttggtttttcgagacagggtttctctgtatagtcctggttgtcctggaactcactttgtagaccaggctggcttcaaactcagaaatctgcctgcctctgcctcccaagtgctgggattaaaggcatgcgccaccacgcccactgaaaaatatttttaaaaaatgttttgttaatcattttatttgtttacatttcaaataatagttcccttcctggttttccctccacaaccctgcccatcccatcctccctctccccccgcccccacccctttgactctatgaggttgctcccccacccactgctgccttatccgtctagcatccccttgtgctggagcatcaaacttccacaggaccaagggcctgcactcccattgatgccagataaggctatcctctgctacacatgaggctggagccatgggtccctccatgtatactccttggttgatggtttagttcctgggagctctgggggatctggttggttgatattgttattcttcctgtggggttgcaaaccccttcagctcctctagtccttcccctagctcttccattggggtccccaggctcagtctgatgcttggctatgagtatcagtattggtcaggtgctggaagaacaactaagagaacagccccaccaggctcttgtcagcaagcacttcttggtatcagcagtagtgtgggggtttggaatctgcagataggatagatccctgggtggggttggtctctggatggcctttgtttcagtctctgttcatttttttgtccctgtctttcctttggacagaaacgattctgggttaaaaattttgagatggccccattcctcaattgggggccatgcagatctactggaggtggcctctacaggttctatctcctctttgttgcttatttcggctaatgtcatcccagttgggtcctgggagcctgaggcttcccaggcaggatgctacttccttaatccttctctgacacaggatgagatggaggctcaaagacttgcccagctccgccagctatgcagagagtctaacgttgaactgcggtgtctgccattagtgcaatggctatctttacaagtagaggtgatctaaataaagcgaagcccctcgaaactctgcttggtatgaccttacgcttaaccactcagtgccccacaatctcagtgctggcttagtgtatacagttctttccttctttcctttcctctctctctctctctctctctctctctctctctctctctctctgtctctctctctctgtctctctctctctctctctctctctctctctctttgttgttgtttttgaaacaaagtcttgctaatacagtctaggcagggattaaattgcagtgtagcccaatgaacttaaattcatggatatcttcctgcctctgcctcctacatgctgggagtataagtgtgtaccaccttacccggcccaggtgactctcatgaatcacgtgtttcatagttgagaatctaaatcttcagaaatgatttccgctttcccaagatttggctttatctaagtgcggtctgagggagataatacatgccgcaaaggactggtggccttgcaaatgtaatcccagtcacactaatttcctccgccttctgattttcaggtccttcatcgacagcagtcccagccaactaaggagagctcccctcccagagaagaagcacccccaccgcctcctccaacagaagacagctgtgccaaaaagcctcggtctcgcacaaagatctctttggaagccctgggcatccttcaaagcttcatccatgatgtaggcctctatcccgaccaggaagccatccacacactctccgcccagctggatctccccaaacacaccatcatcaagttcttccagaaccagaggtaccacgtgaagcaccatggcaagctgaaggagcacctgggctccgccgtggacgtggcagagtataaggacgaggagctgctgaccgagtccgaggagaatgacagtgaggaaggctcggaggagatgtacaaggtggaggccgaggaagagaatgccgacaagagcaaggctgcaccggccgaaaccgaccagagataatgtgaactccgcaggcagagcaatagatgggtccaaggactttctgttttagtttctttcaagttcctctcggctttgttttattttgttttggttttgtctgttttatttttcttacccttaatggcattcctctgttgcacaggatagcctatagactgagtaagctcagagtttctgaatcagacgtcaccttggcaaagacactaagtgttaaacttttacaattgactcgaccatagtaattctagtcacgggcgaccctgccgtcattcctgccaacttatggaagcgataccaggcaaattccaggatgggaagacccacgagataaatgaaggaagctgcaagtgtgtatatgtatatgtacatatctctatatttacatatatatattaaaattgcatgggacagagaactttacaatccgaaggactagactgtgaaatgagttcttaaagaaaagacttgtttatgtataaaaactaataccacttcacagtgagtcactttgac

SEQ ID NO: 124 - DNA, 3000 bp, Mus Musculus
cgcccccatcatcataacaaccatctccgaaccagaagaagacaccctgacccaggaccttaaacgctaggaccggggaagaggaaaaggaaaggggaaggaggaaagagaaaggaagactaggacaacactacaattcaccaaaaactttccaccctggattctctacttttgctccatggacagagccccagccagccaagtttcagacagaccgtgagcagtccctgcgcgttttattgcgacctgccggtgggaactttgtctccaaatcggagcagcatggagcggcggagcgagagcccgtgtcttcgggacagccccgaccgaagaagcggcagccccgacgtcaaggggcctcccccggtgaaggtggcccggctggagcagaacggcagccccatgggagcccgcgggaggcccaacggcgccgtggccaaggccgtgggaggtttgatgattccagttttctgtgtggtggagcagttggatggctctcttgaatacgacaaccgagaagagcacgctgagttcgtcttggtgcggaaagatgtgctttttagccagctggtggagaccgcgctcctggccctggggtattcccacagctctgcagcgcaggcccaaggaataatcaagctagggaggtggaaccccctccccctcagttatgtgacagacgcccctgatgcgactgtggccgacatgctgcaagatgtctatcacgttgtgacgctgaagatccaattacaaagttgttcaaagttggaagacttgcctgcggagcaatggaaccacgccaccgtccgcaatgccttaaaggaactgctcaaagaaatgaaccagagcacattagccaaagaatgccctctctcccagagtatgatttcatccattgtaaatagcacatactatgccaatgtgtcagcaaccaagtgccaggagtttgggagatggtacaaaaagtataagaagataaaagtggaaagagtggagcgagagaacctttcagactattgtgttctgggccagcggccaatgcatttaccaaatatgaaccagctggcatccctgggcaaaaccaacgaacagtctcctcatagccaaatccaccacagtactccaatccgaaaccaagtgcccgcactccagcccatcatgagccctggtcttctctcaccgcagctcagtcctcagcttgtcaggcagcaaatagccatggcccatctgataaaccaacagatagccgttagccgactcctggctcaccagcatcctcaagccatcaaccagcagttcttgaaccacccacccattcccagagcagttaagccagagccaacaaactcctctgtggaagtctctcctgatatctaccagcaagttagagatgagttgaagagggctagtgtgtctcaagctgtctttgcaagagtggcattcaaccgcacacagggattattgtcagagatactgcgtaaggaagaagatcccaggactgcgtctcagtctcttctagtaaacctgagggccatgcagaacttcctcaacctgcctgaagtggagcgtgatcgcatttaccaggatgagcgagagaggagcatgaaccccaatgtgagcatggtctcctctgcctctagcagtcccagctcctcccgaaccccacaggccaaaacctcgacaccgacaacagacctccctattaaggtggacggcgccaacgtcaacatcacagctgccatttatgacgagatccaacaggagatgaaaagagccaaggtgtctcaagccctgtttgccaaagtggctgcaaacaaaagtcagggctggctttgcgaactgcttcgttggaaggagaaccccagcccagaaaaccgcaccctttgggagaatctctgcaccatccgccgtttcctgaatcttccccaacatgagcgggatgtgatctatgaggaagaatctcgacatcaccacagtgaacgcatgcagcatgtggtccagctcccacctgagcccgtgcaggtccttcatcgacagcagtcccagccaactaaggagagctcccctcccagagaagaagcacccccaccgcctcctccaacagaagacagctgtgccaaaaagcctcggtctcgcacaaagatctctttggaagccctgggcatccttcaaagcttcatccatgatgtaggcctctatcccgaccaggaagccatccacacactctccgcccagctggatctccccaaacacaccatcatcaagttcttccagaaccagaggtaccacgtgaagcaccatggcaagctgaaggagcacctgggctccgccgtggacgtggcagagtataaggacgaggagctgctgaccgagtccgaggagaatgacagtgaggaaggctcggaggagatgtacaaggtggaggccgaggaagagaatgccgacaagagcaaggctgcaccggccgaaaccgaccagagataatgtgaactccgcaggcagagcaatagatgggtccaaggactttctgttttagtttctttcaagttcctctcggctttgttttattttgttttggttttgtctgttttatttttcttacccttaatggcattcctctgttgcacaggatagcctatagactgagtaagctcagagtttctgaatcagacgtcaccttggcaaagacactaagtgttaaacttttacaattgactcgaccatagtaattctagtcacgggcgaccctgccgtcattcctgccaacttatggaagcgataccaggcaaattccaggatgggaagacccacgagataaatgaaggaagctgcaagtgtgtatatgtatatgtacatatctctatatttacatatatatattaaaattgcatgggacagagaactttacaatccgaaggactagactgtgaaatgagttcttaaagaaaagacttgtttatgtataaaaactaataccacttcacagtgagtcactttgac

SEQ ID NO: 125 - protein, 733 aa, Mus Musculus
MERRSESPCLRDSPDRRSGSPDVKGPPPVKVARLEQNGSPMGARGRPNGAVAKAVGGLMIPVFCVVEQLDGSLEYDNREEHAEFVLVRKDVLFSQLVETALLALGYSHSSAAQAQGIIKLGRWNPLPLSYVTDAPDATVADMLQDVYHVVTLKIQLQSCSKLEDLPAEQWNHATVRNALKELLKEMNQSTLAKECPLSQSMISSIVNSTYYANVSATKCQEFGRWYKKYKKIKVERVERENLSDYCVLGQRPMHLPNMNQLASLGKTNEQSPHSQIHHSTPIRNQVPALQPIMSPGLLSPQLSPQLVRQQIAMAHLINQQIAVSRLLAHQHPQAINQQFLNHPPIPRAVKPEPTNSSVEVSPDIYQQVRDELKRASVSQAVFARVAFNRTQGLLSEILRKEEDPRTASQSLLVNLRAMQNFLNLPEVERDRIYQDERERSMNPNVSMVSSASSSPSSSRTPQAKTSTPTTDLPIKVDGANVNITAAIYDEIQQEMKRAKVSQALFAKVAANKSQGWLCELLRWKENPSPENRTLWENLCTIRRFLNLPQHERDVIYEEESRHHHSERMQHVVQLPPEPVQVLHRQQSQPTKESSPPREEAPPPPPPTEDSCAKKPRSRTKISLEALGILQSFIHDVGLYPDQEAIHTLSAQLDLPKHTIIKFFQNQRYHVKHHGKLKEHLGSAVDVAEYKDEELLTESEENDSEEGSEEMYKVEAEEENADKSKAAPAETDQR

SEQ ID NO: 126 - DNA, 190708 bp, Homo Sapiens
gaggaggattcgcagttcaacatcaaggtaaggaaggatacagcattgttatcgttgttgagatattagtaagaaatacgcctttccccatgttgtaaacgggctaagtttgacagtggtagttggcttttgcaacacccccttcccatttcgacatattacagattgaagaaaaagtttgttgctcaaaacttacagtttgtttctttgcagccccaaaccttttagctaccaccacgggttgatttactagacccatttttgctctcaccgacttcgaactgtgcattttctcccactcttttgactgggggtggtatgcggggggaggatggggcttggtgaagaaaaccagggaaaggcaaacgctgcctaaaactcccagggtggctcccctaagaattgctatcctgcttgtttcttttctcggctgggatccgaccgactcccaggtcgcctcggacttctttggaacttggtgggcggcgcctaggtgcggggttcgtggtgatctgggcgccgacacttaggccgggggcaggtttccttcctgggaccctttctcttccagaggctctcaagcctctaagcccgtgcgcatgccgcctaccaggtagatgcggcgagtggaaggcagccttgtcccgggcacgatcggcggactcagcttttcgcagtctctgctcccagcagggatttacagaactgctcccgagagcgtttcccgaaaccgaacttagtttggccctctggcgccgccgtacagtcaacgcttcttaagggggatcggtggctcttgctgcgggagatgtgggagagccctcggggtcctggggattaggagggagagtcaacgtgtgcgggagggacatgaggtgcaaccagttgaggggggattctctggcctcagggccggcggggatgcgtccacattttctcgcctaaggtcctagcggctaatgtccgccgacgccccgggtatctcgcgggggctgcggcccctgcccacgtgcttttccttaaggaggcagcgcgcccaagcggaatcgcagggacaaaagcgcggccagaggccagcctgctcggctagtgcccgcgccaccttaaatgagcaccgcggccggagtcgggctgccggcggccgcggccgcgggagtcggcaaaagtttgtggctctgttacgccttcgcgggacctgctggggacgctcctgtgcggcctccccccgggcggggaggccgggtcctcagggcacagctctgttggcgccagcagccctgggctcgagcagcttggggtccccaggagccccagtcctgtagcccgaggacaggcagccccaccgccctcgccgccaccgcgtcacgggctccaggcggcccggtttgcaccgctcgcgatgtcgccggagcggcgagcgctccagcgatgccatccagggatgcaccccgctctgcatccaccacgcaacccccattcctgtgccacccacagcccggcgggcagtggccgtgctcctggcattcgggacaccccgactattgttccggactcgcggccgtgccagctttgaaggagaagcggccttccctgcgcgcgcggcggcacgaagcgcggcgggccgggacgttcggctcggcgcggagggggagctcgcaggcaccgggaaaagttgctcggaggggcggaggcggtgggtggtgggcggaggcggtgggtgggggaggcgatcgccctcctatctccaaagtcgaaagtactccgcgcagttaacagagctgggagccgaggcagccgcggtcgcctcttgcgcgtcggtctgcgtctccgccggcagacgcggcacccagcgactgccttgtcgccgccgcctccgcgccgggacgagtgcgcctaggggctgggcgaggcggccgcgccctggacccgccacaaggaggaggaccagaccctgggccccggtgcccgcctgcgcccagacgcacccacccgctggccgcggccaccgcctcgcgccgcactcggttctctgccatcggtccttcgccgcctcgtgcatgaggtcctcgtcaccccgctccgaccgccgactctccccttcctcttccctcctccctgcctcccacccgcccctcgcctgtccctctgcctccttcgcagccccgccgccgttgggtcgccgtgctcacagcgattgattgattgatgtttaatttcctgccaggcggggcccccctccccccgcaacctccccagccctcctccccgccccccactcccctcttttcttgcggtggaccagtctggcttgggtttagatccatcccccccacccccatcccgaaataatccagagacttcccctacccccaccccaaattattattttgaaggcgctagatctggggaccgaaagggggagggggagaaatcggaaaccgaggacaacccaaaaggactcactttgcctgatgactcaacgcaactaataatcatctccctctcagtgtgtctctctctgcggcttgtcagtgagtccggctctggctgctggcagaggcggccgagaggggagaggctggaggtgacagcttgggcggccgccgcgtttcctcccgcgcgcggtcccgggtccctgcgtcttctcggctcttggtgttaccggtcccaccgctctggccgcgcctcctcgcgagctagccgccctgcgaaccagcagccccggctcgccgccgccgccgccgcctccgggttctcagccctttctctccagaacgggtctccttcccgaaggtgtgaaaaggctctttcagcctccttctcttcccccctcctccgccgtcccctcccccgctcgctcgggtgtccctttggaggagtcctttccctctcctcctcctccccctcctccctccccccatcatcatcataacaaccatctccgcaccagaagaagacaccctgacccaggaccttaaacattaggacctggggaagagggaaggggaaggagtaaagaggaagactaggagaacactgcaaagccaagcaccagaaactttccaccctggattctctacttttgctccatggacagagccccagtcagccaagtttcagacagaccgtgagcagtaagtacgcagggcgagggctcccgcgccgcgctcgggagttcggggaagcccagggccaacgaagtcccctccccgccgctctcggcctctcggaccgcgaagtcggggaatgcaggcggaagcctcgccctcagccctcctgctccgtgtcttcatctcgcatccttcctttcacctccccctgccacccccaccttgtctccttgacccgtggcgccgacactgctcgcgcggccagagcgcccacgaggattcccagcgcgcacgcagtacggtgccggggtcttgcttcttgcgggtgtcagtgacaacgcgagcgccgtttcatcaggtgtttcccctccttccccgcccccccccacccccccaatccaggggtgtcgagacctgcggcttccgtggggagcgcactgccaacctagtgacccagaggaaaactttctggagcgatgttaaaattggggcggatgaaggctgctcttgcactaagaattcaaatgctttttgcttttgtgttttatattgaagagctttaaaaaagcactcgggatcagatgaagataagaacgctccaaaataataacgattgtagcgcccgcctttgtgatggaggttattctgataaatacctccaagtgttttcggatgcttattaatgtggaattagggttgattttatgcaggtgtgtgcttatctcaggacttgctccgtataggtaaaaagcgggtattcaaggggttctttcgcccggcctttggctcctgcctggccattcacagcgcatttaccgggtggttaattcggttatggacttgcgcacacccccaactcccttcccatgtgggtggaacgtctttttctgaagttcacttattccgcaaccctgaccccgggacgggctaggctgtagcacccaggaacggtttatgccaaccccgtcccaatgaatggaccacttctaggcgcccctgggtgccaaccccggccgcgaccccgagggctgacttctggggagctgcgactgggcagagtcgccgaaccgaggcgctgggcttcctgggggccgcccagtgtaaggttgggaccggcttcccggctcgggcccctcgggcagcgtgggaggaagtttgtgtggctgtggtgcagcgctctgccactggcctgaacgtctatcacgtgtatgagcggttttccctcttttttctccctcccccttcctccccccaccccctccctaggtccctgtgcgttttattgcgacctgccggtgggaactttgtctccgagtcggagcagcatggagcggcggagcgagagcccgtgtctgcgggacagccccgaccggcggagcggcagcccggacgtcaaggggcctcccccagtgaaggtggcccggctggagcagaacggcagccccatgggagcccgcgggaggcccaacggcgccgtggccaaggccgtgggaggtaacagcccggagcagggaggcgcgcagcccgcggcccagtgataatggcccgggtgtcagggttcaggttgattaggcgctgtcgcggtgtaggattacaggaagtgaattccaggttgccaaataatgcccccgtcgcctctcatctgcaactggtagcttcatctccagttaaaacaagaaagtggttttacccagagggtggcattttttgggcattttgccactgtgtgctgaggtgttggcaggtttatgtcacagccagctaactgtttctagattttcctagagagctttttagtgatttaactcttttgccttgcctcggagtgtctgttgtagggatgaagttcacgtgcgttcgcttttagggaataaaatagtcattaatgctcaggcgagtacaggaacaaggagagttgatgttactttgtagtgaggacagtgcttcaagacagatgaatgacaactgggaatatttcctgccacgtgaaatgtgggaaataaagaatcaccatgaatccatcaggcccttagaagcttaaatgctgctgttgtctataaagtttagtcatatgcattcgtaactttattatgaattataggagaacagataaaaatagcaaagtagccttatcaactagatgtagtttcccctccaaagaatttattaataattttatttaaagaaaatcttttgtagtttttactacttaagcaactactttcttttaaagtggtcaggaaaagcaatcatacaaaataaagatatgggagaaatttaaacattgaaatattttggagtttgtatgccatttgcttagttgtcttttacatgtaaaatccacaattccacatggcatgcaggttttctgtgtgtttggcataaatcactagtttaattttttttgcctctaacgttttttctctaataatttcaacagtagcccatttaatattcaatatattaacttgtcttaaatgatataaaaccttggcaaaccttaatgataagctcccacccccttgttgtaagtgtctattgtgtgtatttcaaaatagttacttacatctaaaaatgttcattcctccttaaagagttgaacacatacgttttataaaatcgtatttttttctttttacttattttgctatttctatttcttcatggtaaatacttaggatggtttgtctcagtctttcatattaatcgtctcacttgagaagtattcatcctttcaatgttgtgagttaaaaagtttggtgatggattctggcttgtttatctcccctttttgggacttgaaaatatactttattgaagcaaaagaaaacagttctgtgacccactttttaaaagagaggtttattaatttgttgtcctgatactggagcaaataatgtcagacttttggcataatcagttagtatatgcatataagaaataaaaattcatagagtatgatggtaccaattatgagatatgctaagtgctgaaaatgtttgaaaaagttctgaaactccttggagacagtgtgttccaaagtggcctttgtggacagaaaaggcttggacttaaaattttggtatctttctgaagatctaataaaattcactaaattgaaaggagctgtaaacattttagaatgtaattgttaacaacgtgcttccctaaaacaagttttttcccctcctctatatcatgttgaactatgaaagaaagtgccttgttctgttgaccagggataactttagtgttaaatagtggttggttttcaaattttctgagactatagttcacatttgagcccttatatgtttaatataaactaaaattattatcttggtgaagaataatagatttgtttcaaccagctgccttagacactttctcttgattaacttaatttagtaatagcagaggtcttattagctgcttcccaaattgaaaataaagatgacattattttgtctcaatacatatcgtttataatacacgatagtaaactggttaaaattgtttagtggaatttaaatttttttaaaaaagacagcataatagtgtgtaaagagattaatttagacaactttagaatataacaacttagaagataagattttgatagtacaaaggtttctaattgaatgttaacaaaattatgagtttaagtttatataatttccaaatgtatgttaagatgttaatagtttctttgtaactgttaaccatgtatacagtttggagcaaagccaggccttttgaaaaatgcacattctaaattttaaaaaatgtttaaaatacatttctagttagtttttttataattaaaggatttttttgaacatagagtaaatataaagtagattatatttctaccattctatgttcttttgtttaaattttctttataaagcaatataataagcatagataactacacaagtatttatagctctgtatcatttattaccgttttcagatatattgcagtcttttcaatggtgtaaagatggatacaataaaatttgtcttaaaagtggagccaaaaatttgggagtacatatttgttaatctttagtgttcctctttcttaaaagctgttcttttaaaaataagggagatcaagttaattggttgtcaaatcaaatagcaatttatcttactgtttttgataagcagtgaggtaaatatagtttaaatatacttctgaatgcattggttgcagtaataaattctgctgttactctacttatttaggtagagggaatttactgtgttttttgatgagaactaagtattcataaaagaaggggcattactttagtgtctcaatttaaatagaagagagggtagatacactgtcactgtctttaaggttgtgttttaacaggggacttaaaagtggattgtttactatgtggttagctttagaagactgttagaaactagatgttttgctttgtctttccaacactttctgggatgtttttactcttatctgagcagtgtgttttaaagcatgtatgtaataaaatgtaagtgctcagatgtgtatgtcagtcagcttttacagacggtccttaggaaaaaaaaaaggctaatatctctttaaaaaacatatgaaggctaggagagagtttagagctagcaagagcaccatggtgttgacagctttatatccctgctgggtaacattcacttactagaattggcgtcccctctcagctagtaattcactccataaggattttgaaaaaggatgattaatggtggggaaatttatatttgtgaaattgttgattaaaacttacagatctatttgaagatttaggaaaagaagggattattaaggatgatgaaaataagaatcagatgatcctttttaccactattagcataagtacctaaaatgttctgctgtatggaatgcttcagccatgcaacttacagcataaaatgaaagtgatgccaatcaagtttccagaggaagcaaggcattctgcttttctcctggactgctgaaaggtgctggccagttgtgctttaatagcaataaattattgtgcttcattcattgttaacacaagcattttcattttttaatgtttggcttaaagaagaactttcagacagctttatttaaactgaatgaacagcgcttgaatataccagatggtgtatttgctgataggagacattaaacatcagaaatctttttgatatttttcattttcctatgaatttttatgattttttggtgttaaatgttctacattttagggaaaaatatttaaacattgaaaatatcttttagagagatttgctttttttattaaaaaaacttgcttatttctgaaaaataatttatgttttataaataacaatttaattttgttggcatactgtctgttaaagttatcttataactagtctacctgaagtagacctattcgtgctaccaggcagccctttcaagaacataactgtcttgttgcaaggggaaaaaaatcattatgcagtacacactgatgtattcaaatagggaagcaaatgtgatcaagattgttagtcagggcctcatttaaagctgaacattgtctacaacaacagttagtttaattgtctacatgtggaacacttccttttagatgaaaagaaatgcagttcgggtcaggtgtagtcaccatatcagcaacagtagagagacatttaactttttgaaaggaatgcagatatgaaagtatagataggtatatattgagattataaaatacttagaaatatattgttaacatgggcaaaatggagaaaactccatttccaaggatgaatatcataatatttgtaggaagtacacattacttcaaaagagaaaagattgtatttctccctcctcactttttttttttttttttaaggttttaagatcttttaaatagaatgaacttaggctttggggtcatccaacaatctagcctgtcctctgtagttttgctgaggtagaaaaataactcttctctaaagtgtttttagttcttggcctgttattaaaataaagatatacttggttaaaaaaatatatgcagtggaacatacacattaaacagaacatagggtatccgcccctcaaagtcctgagcataatttgatgtttcaagtaattttggaagccttatgttccatcagaagaaacccactgaccattgtatactcaagatcatctgtagtgcagtgtgtgtgtgtgtgtgtgtgtgtgtgtgtgtgtgtgtgtgttggaactacatagatgtcccttaaggcatctgttttttaacccctgcagaaaataagcaatatcatcctttcccagagggttgtaaccagcaaagtctgtacatatgagatatcctgtttgaattcttcttttctttcttgaattttgttttaaccaatctatctctgtagagaagggaaaacagactaatcatcatttattagatagctaagaatatgaatttgagtcattttaagtatacggaaatcagttttattccaggaaagactacagtaattatttggtatatctgacaaagtagtaagcagtgaagtttgatggttataatttaaaacccctatttttctttctttttaaaaagtatttattatagaatcagcatatgtgtatatatttaaaaagacatgttaaatttacagggctagatgaattccaaatagtattattttcttgggttatacttatcttttaaagctttttaggtttctgttggaataaaatttctcaccattaaaatgtttcttatgactaagaacccacattaggtgtgtaaaatatgtacattgttttatttcagaaagccaaactttatcctatatagcatgtaaattaataaagaattctttatattgtttaatcagtaggcttttaaaaaacctatataactaatatatggtaacatagtaatttttactatcttccttacatgaatactgagatacaatggcattttggaacatatttaaagatggagcatttgacaaaagttgtatgtgtaacagtttgtcagtgaaaagtgacaagtgggaaatgacaaatgaaatgttggcatcatcactctttattttgataaaaatgtctcaatttgcagtgatataatactgtttcatattatttcatgagttgtgtgagaatgcataaggggaatttagattttgtgaacggaaaattagcagcccaaagtctcttttcagaagctttggcagcaagttccccgtctcccccactccccaagaataagaacagcagtgaaatgttggatctaacccatacattttaactcattattttttggaaaaaacagagaaataacctaaaatggtttcgagtaggagacctttatgcttaactcaaaaaaatgaagaaaagagtttgccttttagtttctattcttttctttgtagcaatttttaaatgaatgatttgcctctactgactttgattgtatggtcttttttcacttccaatcaacactgctctccagcattaatttagggtgccagtaaggagagctgtgaattcctgttattttaaaatgcaatagaggttttgaaaatgtctgtggtgaaaatggatttttatatacaaaagattcatcatcctactacttaaatgtaatgtgataaatatttcaaagtcaaagtagatgccctgagtggaactgaggtatgactaaaacaaaaaccagttgaggacttacagagtttgaaaaaagcacagttgtagtcattatagtatgctattttccgttgctctttattgttagcaattaaccaaacattatttttcttcttttatgtagaaacaagccctgtaagcataacatgctacagtgtttttgtaaaaatgttccatggtggagttttcaaaattatggaactctagctatatatatttgtttcaattaacagaattattttgctttttagtagcaagtgatttaagaattgtggtaaaatcagtataattaagtggcactgaaaggctacatcagaaattgcattctacaacttctgtatctttgctgctcaattaaaaagttttacttatttcagatttttaaaaaactagataaaaagacataatatggaacaagtgtgctttagatatataattatgacaatagagtttatggcatgcattttttttcccctttttaattgatgtcctttaacttaaacaagtggatgttatggttattagtttgacaaatgcctaaaatgcagataaaagcatgaatagaaattttaagaatttgaaacttgcaataaagttatcagcaaactatgtcagttttatagtaagcatattctttattaatgattatgacacataggacaggaaaaccttctggggaaatatatttcaattttagttgctcctggtactgttactcactaatagtgtgtgggcagattcagttctgctcttacctagtagccgtatcattggaatggagttctatcgtagtacagttggttattaaactgtaaaataacaaaaaagatcaaaaaattaaggggaggcactgcaagctactatttatcaaaagggatccatttcaaaccagggtaactggtgcccactgatggttgcacagttactgaaatgtgcacagcagctcagtgtctttcttttgtttatttgactgaagacttacacagatatttatgtatataatatataaaataagagactctagttagagcaaatgttttccaaagtgctaagatctgacagaggtgatttgcaggggtttgtcgtagaaacagcgtgaatttcatcacgttaaccacatatatctttttctttctttaaaaaatactttttacttgtttttgcatttggctggaaagcaagtgtatcagttctttcataactgattgtgattgattttttttttaacacaagaaaatattttctttgcaaagagagcaaatttgattggatgccatgcccaagactcctgggaaaggaccaaaggaccaaaggcataaagtaaaaataactgtatttttagatttcccaattatgtcctatattaaaattgagtacttttattgcatttgtttcaattattattacatataaggaaaggcaaaattgatatatttaatagcttactgacgatgcattcatatcaaaacacttgaaatagcaatagcatttttgaaatattattttttgggggttaacagaacaagaactttcttttgtcataatccaaagatgctaacagagcagcatgataaatgtctctttaagtgtcgtagtaaaagaaaatgacttgtcttctgaggcagtggagagtttatgttgttttggacccatttcccaagcagtgatcgaaaacacttccctgggaagttcaaagaggagcccatggaaagtggttgcccaggagacattacaaatgaccattgactttgtcttcatacacagtttgaccaggaaaatcccattttcttaaattctacctgaggtggaactactctctccccctcctttttttttgtctctgtaaatggaagtcagaagtaatgaatgttcctcttgttacaaagcccagccaagtaagggttagatggggttcctaggcctgctgttcttcctcttcccaaagtccaaactaggctgaaggggagagagttgaggctgaataatgagcaccctcatttcttctcagcacacaccggggtaacctgagttgctctgtgggcacatcacctgaggtgtactcacctgactgtcacctgaaatgcagaggctcttgcttcgacctgcaatcctctgaattatgaaatcgatgtccttaacattgctgagactctggctctcattccacagagctatgctttcagcaactccgaatgaaccgccaggcagcaggggctgcctggggctcgttttgcctcactctgggctgtatttgttactctattaatagaaactgtgagctcctgaagaaacctaggtggtgacggtggagttcacccgggaaccttgacttagggtggggatacctgaggtggggataactcgggttacccccatgtgtggtggggatactaaaactgcagataatgtcggccatcagagtagtcagagctccaggttttactcagttgacagacttaggggggaatatttctttcatctgtcgctgagtttcttggatttaatatttaaaaaccttcctgaggtgacaaaatgaaagaaacaagataggcagtacatcctcctggtggaggtctcataatttcagaactctcccgagcatttatcatcccttttagagtgggatgtatatcaaacagccccaaaaaagcttttttaaaaaagttatttaatccatagagcctagttaatagtgccttcattaaaatgcttttgtcagcaaagggttttcagttttaacatttgcgtaacctaacagtgttgatgaaggccatgagctttaagggtctattagtggttccgtttcttctggactttataatttaaacctaaacattaattctgggtggaacttggcataatgtctttttgccttggaaggaatttttgttgtacaattaaaagaaagtgttttggtttttttttcatacgatcaccttctccatgtccctcttccccaagtaaacagcaattaaatagtcaaggttttaaaagggtttctttagtttaaaaaaaggagtagttattttaggtgaatttaacaattttccattagttcacattgcaaaatagtgctttggtattaacaaggaagttctgtgaggctgataatgtagtgaaaatatttttcttttctgtccctctcccctgtatacaagaaaaccctgtggtaaaattttttaataaaaccattttgcatgacagttgaaacttataaatcagttgctattcttctttattagaagctgagagacaaacatgttttaagttttttgtcacctgtaattgtaacattgactagaaaggaagaaattggaatcttaatattaagtcattacgtgactgaatttttcagtattgtttattttggaaaataaactgtgatccttaatatgatctttttgatgtattaatactatgttaaagttgagttattataggaatctaattacatgttaagtgggaaattagaaagcactaaagaaaccttgcaatgataaattgtcttcatccgaaaaccagaaggtattcagagtgaaggtgcctgtcaggagagaagcattcctagagtctccattcagacatctccattcagatgttgccctttagatttgggaaatgtggtattagaacaccccaaaccctttagtatcgacggagtataagaagagcaaattgttccctgaataggaagttattacacctttaataaccaggtaaagtcactttacaagggtaaataaggtgatcctgacttttttccttctcaaatgaatctctaggtaatatgcagcaaaactacctctatttacagcctctttcatatggcaagtttgagccttaagcacgtttttacagctaacttataaactcccccaaaactggggcttaccattgaaagtctgccaacactgttacaaatggtcattagttcccaagaaactttgaggaggaaaagaactgtatgaaaatgccgtgactttagtaagaaccattttgtttcatgtgtattttttgctgccatggcagaactggggactgacctgcatgttcaggattgatactgaacattctcctgtggaaatgtataggattccaattagcgcagggtcagagcataaatgtacctcttttttcacactgttccaggtggttagtgggaaacaagctgcaaagtaattcccttggccccccaataaaaagatttatagcaaaataattctcagctccataacgggactgttgtaggtttgtgtttgatatttgtaggactgaaatacagtccatgtacccaaactaagcatttattgtaaacaagttaactgccaagagcttatattctgtcaaacataattatattgaagattgatgtatagcttgaaagtgagtttgtgggagacagttctttttaaccaaggcaggcttctgagatgcagctctcttcttcctttgctagaatgactcagtaaagccatctttctcgccgccagcctctcatatatagaataaacacaggcttgctctttgaaaacatagctgtttgtcgatcctatttgtgttaacaaaataaatgaacttatagaaactgtcatgtatagtttcttctatcatctccatctagatgtagcgtgatggtgccaagataaaatagtagctcttacctcttgggtgatactcgagttcacccacaaactttaaacgtatactattaagttaaccccagatgaaattctttcctccttcaatatggagtttgaaataatgtttgacttgtgtttctgttattttgtattgggcttgtcagaatagaactgttttgaaactggctttctagggggagggggacaacaccaatacctttattttgtggctcagaaattattaatattttatccttaaataatttatgaaccaaggactctagggaaaatgaaatctttttgagattaaggtgttaatacttggaattactcccaatttaaaatgctgcagtagtcttccagggtttttgctttgaggaaggtagactcttacattttatttagggtaaaagatttctcacttttttgtccaggagacaaatcactttaggctttgataacacttctcaaaggcagtaaaaagtggaataactctttcattggctgggtgatagcctttggataaacatattcaggatgaacataaggtttccaagagatttatatgcagagacttaaatagtctctttcatttttaaaatatttattttaatattttattttggaaattatataaattataaagaggatgtattagaaccataaagtgaaaaaaatgctagttttctctgttctgtttttctgattaatttctataaattacacaggcactacatatatacttaaaatattttgtctgggaagtattccatcagaccctggtttccctggtctgtaggctgggttttattaacttgatctgagtcacaataataatatcctatgtattgcaaaccagagatctcagtcagatcccctaaggggactggagaatacacactatgattttgactttcttgctctttctccctcttgcttttttttctctttctcctttcagcgttagccctttcaccagcttggttgttattgagtcttgatggatgcatttgttgaatataagaatgagagtggcttttaatggctgagaaatggtggtggtagttgcctgtctgcttaagctcggctttgtgaaatctgcattcattgcacagtgttgctttctacacatctattaagtatccgtaaatgttttgctgtttgaactctaaacatagacagtaggattttctttttgtgagggagaaagcctttttttttttttttttgctataactttacttttcagtttttatttgataaaaatctctccattctagtatgatttcctttgaggctctgcaccagtgtttgatctcaatttttaataatttttgtgagttaaactccccaaagaaaacatgcttgtgctatgaaatattcccactagaaatctgggtagtcttgtcttattgagagctgagcacttgattcctttattaattcctttcaagaggacctcagtactgttaacctttccttaacactacactggagaaattaatcaagctttttttttttaattgtttgaattagataaaataacatttaggcagagctcaaaacctgaagtaaatgttagtataaggacaattttcattgactccttttttgatgcatgggactctgagttgcaaatagcttttccagagaggatgatgagaataaggtggggaggtgaatcgatctctgcttaaatactattttcgacagagtgagactctgtctcaaaaaaaaaaaaaaaaaaaattctcagaaacctccagaatgaaattttacttaacaaaggacagaaaccctagcattcataaatatggtagagtcatttttaacatgtggtcgagtctcaggacttatacatatatgcatttttaacctatcgtaaaaagaacctgaagaatttaggcttgaactaaggatacttcaacaatatgccatacccttgaacttttctgttatattcaaacttgtatatcctgtttttttcctttctatttttaaaagttatttaattatttattttagagatggatctggctctgtaactctggctggagtgcagtggtgagatcattgctcactgtagcctcgaactcctaagctcaactgatccttccacttcagccttccaagtagctgggtttaacaggctctggccactgtgcccggctcttttgtccttataacattttttgttgttgttttttaaattctaggatcattaaacattttgtctttctgtagttactaaatttagaaaagatactgtagtctttcagtgcaggacatgggtaggactgccgacaagacccccgtggctctagggtgtatacagagcatggtgcagcatgccactttgttacgcacccatccatgcgatgcccgtggtgataccctgacaagttctgtcaatagtggtcacgcacagcgctgtgatctggccaacatcccctggacaacatggagcaagctcctgaatccacttatgtggatcatttcctagaaagctttccttgtttgctgatgctgagtgcagtgcaatggggccagagtgatatggacaagtttgacagctaggcagacactgcctattaatggtggtgattaatatctaactggaattggcattttgttagattaaccaacatttattttgggcctactatataggtcaggctcagggttgggaggggcatgaggcagctaagtccagcccatgtttgaggaggaaaacggtgggcctctcctctacacccactagagccttggcattcctgacatcagagaatttagttccgtaggtcaggcttgctgtggcagagttcccaggtgtggctcaggcttcttttgtttagataagctgccacaaattgcctcctatgtgcccatgaaatactgttttgcaaactgcctggccaatttgatcttgccactaaatttctataaccgaaggatgtttagagacctggagtttctccttcagccttcggacctgacttcaggttgaattgtgattgctttgcctggagtcaggcctggaatcagagatgtggaaggccagaactcatctcccttccctaccactttaggcccagtttgatccttcggggtggtcagtgagcgaggactagcgtccactctcccatcctcatccctgcctatttttgttcttattgtccaaagttaagattggcctcaggggttgcaaagtagtatctggttttactagagagaattctgagaataagctatttcttgatatcattctcaaccccattgcccccacaaatagtgggagagccatcaaggagtttattatcaaataaatcaatattaaatgttattgaatattatttcataataaataataaaattgagaaataatattcaatatattgtaaagtacacattctctgaaaaattcacttgtttttctagttggttttttcttaactcttattcaatatttcttaactcttaatttcttactcttattcaatattattgaatattatttattatttagttggaggtctaatcctgagttgcacctgggtcatgggtaaatatgaaattgaattattgtatgtatggctcagtttgtacctaagagtaattatgatggctgggcaaggtggctcacacctataatcccagcgctttgggaggtcgaggcaggcggatcacctgaggttgggagttcaagaccagcctgaccaacatggagaaaccctgtctctacaaaaatacaaaattagccgggcacggtggcacatgcctataatcccagctacttgggaggctgaggcaggagaatcgcttgaacctgaggtggaggttgcagtgagtcgagattgcaccattgcactccagcctgggcaataagagtgaaattccatctaaaaaaaaaaaaaaagtaattatgatgcagagtttgccttcctcataactggaaaattgactgatctctacctgtaaaccacttagaacttgctgctgtcccacctctgtcttggcttctgcttcctctacgataagagttaagaaaaagccaactagaaaaacaagtgaattaatgtttcagggaatgtgtagtttacaagcaaaggacagggaggagcgttgaaaactggagcagctgggggagcctagagggcctctggtccacctgtggacctgtgggtggctccctttgcatccaaatgattgctctgctctctcctttaaaattggtgaaattttttttctactgtttcttattatactacctgaaatttcttccatgagaaatttatttgaaataaaatatatattatactgtgaagacctagctgaggagattaaggagaacactaaaccattcaaacagtgtagcaagcatctttttatctattaatctgtggaatttttgagatcagcccctggggggagtaggaggctggagtggaatgtagagcctgtggctgccttagcccagggggctgggtgcctagtagaggacagcagggccacaaagaggagattaggaaggacacactgcatcccttttagaaatttttcctgagaccccaacagggaggtgagaaacaccctattctttctttctatttatggttgcaattttaggcactcaggcttttcttcattattattattattatttgaggcagagtctctttctgttgcccaggctggggtgcagtggcatggtctcggctcactgcaacctctgtctcctgggttcaagccattctcctgccctcagcctcccaagtagctgggattacaggcgcctgccaccatgtccggctagtttttgtatttttagtagatacgggggtctcaccatgttggtcaggctggtctcgaactcctgacctcaggtgatccgcctgccttggcctcccaaattgctgagattacaggtgtgagccactgcgcccagcctctattattttaggatggaaagaaggggctagtggttaatgttggcaagttacttctcttcttgtctgtgactcagtatgtatgtgtatgattgtgtcagtgtgagagagagagagacagagagagataatgagaatatgaggttatagaacaagtaaatcgttgttttgattttctggtaaatttacaataagaaaaaatagtagccatccctcactttttctctctgtcctcttgaagactgttattcactcagtttatgtggtaaagtttgtttcagtatttcaaacagattgttctttggtacttcaggttcagttttatacgaagaaaagatatgcaaggctttgccctacagtctttataatctccagttagccctcggaccttctcaggtgatagaactagataagctgcaggctccagggaagggagtgggccctgtctgctgccttccttcaagagacagatgggcttcaggagctctttgaaagaggggaggcgaaagcctggcctcctctcatctcaaactggctcctgtcattcaggagtgctggtggaccaaggagacaaaggagctagggaggaggctggagacagtgctgatttacactagagtatgaccattcatgtgagcctttgtttctttctttgtctgtgaataacggaagggcaggagccctcttagtttccccctccatgcctagcatggtgccagacacctggtaggcagacaaaaggtgaattcacttacaagtagtacaggtcacccattggacatagcaagtggtaaagggtcctttttattaagaggccaagcccttagatttcaatggatgtggattctggagtgttgttttcaactctcaggaaagcagcctgcttgggatttagagctggataacctgaactattctgcccttgccttgctgtgttttttggggcatgttacttctcccatagtttcagtttcctaatttattaactgaaaataatgctaaccctgtcacagagtaaatgtgagaagataaaggtgtgtatgttagactacatgatgatctaggaagtgcagtgcaaagcaggggtttatttcatgtcccaactttggcgcaagcccattgaatcctgtcacctagacgccctgctgcagctgcaccatctttcgtctttcattgttgggttaaacattcagagccttccagaatacgcattcctcaggtcactttcatagccagtgttgtgacatttcctgaagtctattctttaaaatgaaggcaagggggaaagagctgttccctaataaaagaagttggattaatatagttagtaataaaacagcagcctgcaattgcagagaaggtaacacgttggattttggaatttaaccaagagtgcttctgtcttcaggactcctaagagctggaacacagaggaaagacagctaaagggctcacgacagtcacactattggcctagtatcagtttgtgataaatgtatcctgtgtgagaaaaaattatatattgttattgggcagattcattagaacagtgctctctgatactaatacaagccacatgtataattttaaattttctagtagctacactaaaagttaaacaggtgaagttaattttaataatatattttatttaactcaatatattcaagatattctacacacaattacttttaaaaaataattttattttatttgtttttgttattaagtcattaaaatctagtatgtatacttacgacacatctcaatttgagactagctatgtttcaagtactcaattgctacatgaagttagaggctactgtgatggacaggtagttttactgtgcttttaagcactttcaccttttttgccatggggcatgttaaacactttaagccagttgtcatttgcataataggccattcaataattattagtatcatctttattctgaagaaatgccttttagtatcgtgaacattgattataggccttgaaaaaaattactggttaatttttttcctctgtaaaatggtattaataccgattttgaaaaaaaggaaaacaaatagattccattgtttgagagctatctgtcagacaacttaaatatgtaaaattgtttaatcttcacaacagatctatgatgtagatattgtttgcattttggctaggaggaattggagcttcagagaggtaagatgaactactcaaggtcacacacaggtaaaaagggacagtgccaggacttgaccctgacctggtgctgttcatcaccacatctaaccattttcccacatgtctcagttctcacagctgttgctgtgaacagtggcagttacaatggttaacgctttataaattatacacacttctttagaaataatgtcagaatgaaaatgacagtttcagtatcatcactaatgacagttggaaaaatgcatttttctagtgtagagagggtaccaggcttgttttgcctctttgacaacagaattcatcatttatcccaattaccagaacaactcttcatttttagcaaatggctgaggccgagcgcctgtcctctagattaaagtacctgcttacctcctgtgattgtaaaaggcttagtaaggcttatgatcagaaggttcaaagttctctactagatcatctgaaaatgggtctgtgctacaataaaagaaaaataatattggaagctcaagatatagggctagagcaagattttcttttttcttcaccatttctaaattttgttgaaaatggatttcagttttacatttttattcttttattggaacttttaaattctccccactcttaatttattctgtgaagtgcttttcaagcacctccctatctttctatccattgtcacttttctctctcttttttttttctttctttttccctctttttgcctgggacgagttgttaataagatggacaaatctctctctctctctctctctttcttggcatatatttttactcatccttttatagtttgcttcccttagggatttctggtttttaaaggccttttaaacctgtgccttaattttcttctttctacacttgacctcaatgatactattttactattttttatttctcttgttattgtcattagtaattgcatctatttttcctcctttattcttcttttgtaaaacttgcatttcattataaaaaccataattgtttagatgggtcaaattctagtaagaaggtaaatttttctaagaataagccctttatgatattcttcagtatctcatgtatatgttctgcagaagaaaccctattatcatacatacgttcctggttagtactgttttattttataaatgaccacaaagttttgttttgttttgttttgtttttttttaaatagatgatgccagtaggggattgttgcatgctttctgtaagaagtcattactgttgtcagctaacaattgcttccttcaatcactgaaccaaaatgtttaggaactatttcagtaattgacggttataaaacgtaagtccctacatgttatagatccctgtgctttcatgttatatttcatatctaactgaacagttaatattatttttaaaaattaatatggtcttaagttttttcagttgaccatagacttgagaaagatttatagtttctaagtaatggagacatgatagcttatggagcaattggattcatttaaagatcttatctttgattcccagatgtgtgacactcagatgttgacattaggaactgcacatggattttcagcatcgaaacttatgtacacacaggtattagtggtgaagtagcttatggcaccatggactatatggccttatgtgtgcatatgcttaaatcattagaaataaaaatctacctacttccttgggcaaagattatatgccagcatgtaagagttaaaagctctaaatgggggctattccttgctggtagggactctcatgaatgagtcctataaaatgccattatgcttgcttaggaaggttttacaactcctttaactacattgagggcaggagtgatatcagacttgttcttacttgtatccctggagccactggtggtgatacctgtcacatagtaggtgttcagtgaataaatcctggatacatgaatgactacaaagataatttggggccaggcacggtggctcatgcctgtaatcccagcactttgggaggccaaggcaggtggatcacctgaggttaggagttcgagaccagcctggccaacatggagaaacctctactaaaagtacaaaaattagccaggcgtgttgacgggcgcctgtaatcccagcttctcaggaggctgaggcaggagaatcgcttgaacccgagaggtggaggttgcagtgagccgagattgcaccattgccctccagcctgggcaacaagagcgagaaaaaaaaaaaaagataatttgaaggaaatctaatttatattattcgctacatgtcctatatatatttgggaataaacttggtataaataaataagcatttcatataccagtaatgatcacaattaaaaaatatatcttacaaggcattgtgtagctgtcctaaatcttcttctttgtctaaaaaatcagtctactccactcgtatcttatatttttaaataaatctacaccatggagagtgtatttgctatagacaataatactgctttcttgttctcaggagtgaacactgagttgtcttgtgtgtgatatggtttgacttgttacactgttgtgcagtcttaataataattaccatgatctttaatgataacaattcttaatgagtattattattgttaataaggattatatttaataattacacccaatacttattatctttaataataataattagcacatgggaaccagttgcaccattgtattatctttagaacaaatacctcaatctgtaacccagtagtttgcagagtatctgctcccacccttggctttccagatcagagtgagtcaggaggcttctagggttgaggccacagggagggggttctggaaaactcctatgcattctatgtgtcaggggccatactcccatctagtcatttcacacagaggtcttctttttgttgtgaagtaccttcaccatgaccatgtgactttctacctcccccgtctgcctactcacccagtcttcataagttttaatttttcttgcacaaaaagaagacccataacatactaatttgtgtgaattacattaggcagggtccatgtttattacttgtatgttggtaaaactttgatcttcttctgccttggttatgtttagatttaagtgcctgtatgacttttttaaaaataaaaaaaaagtttaaaaaaatctttggtgaattaaacattttttagcttttcacactttgatacaaagcagagaaatatttcagtgacaacagatttcaacagattttcaactagactaatttgctttattctttagggtagtttacttattttctctgaaaacacaagaaaagatactccctttccagtaactgatgttaatgtataaaataattttacataggcaaacttttgtatttggatgcatattttgacataaatgtaaattaagatgtttatgatcatgttattttcaggctagttgataacctatttactaggatttaaaaaaacaacagcacgtaagagggacttattttaaatttctattgactttattatattcacataacagcttaggccttaaaatcaataccaccttagtaggaaggagctggaagctttgaaatatatttccagacaagagaaatatattacttttacacgtaaaagtaatatatttaaagagaaatatattacttttacgtgtaaaagtaatatatttattacaactggaagctttgaaatagatttttagacaagagcagatctgatctgaaaatactagtgctgatagttaatgataaaactatagacattaaaagattcgagtgtctgtgtggtcaccttcatctcacctatgtaccaggacacctctaattggtgaaaatgacgggaatctaagggcttctgccactgccctgggcaattctgtaataatagagggggaaaacccacagctttccattagacctatatgactaagaggcttgtttaatctaaaccactgtcgatcacagatgactgacttttataactgtcgcttcccttctcatcgtggtgactgagatttgctttttaatgtttgtgttttgctcttgaattttgtcccttcaggtttgatgattcctgtcttttgtgtcgtggagcagttggacggctctcttgaatatgacaacagagaagaacacgccgagtttgtcctggtgcggaaagatgtgctttttagccagctggtggagactgcgctcctggccctggggtattctcacagctctgcggcccaggcccaaggtattaatgcctctcccctctcctcccaagtctcttgtgtgtcataatttgaggaagaatatgttttctgaaatagttctccaaacaaaggttgaaggagaattgtcagatttagcatttcctagtgagcagtagaatatttcttgtagaaggtcttgtttcttgttttgggaagcatttgaccagcacttctggagccacaaaatcaacttgcatttcaaaccgatcatagatttttttgcatttataacactgttattttctctaagttaggaccaatgttgagatatttaactcctgacttatccaaacttataatacatgacttataaagcattcagttttccaaatttatttattgctttgggcctgtggcttctgcactttgcaataagcttttaattaaacagaaaaaaaaatggatgtcttttatccttttgtttctttgaaaactgttttgtagttttgatgcagtccatttagttaaaaaatattgccatgtctttatgatcaattcctttcacttatttgattaaatattaaaattgcatcattatttcagtgcgtattgtacaatactggggagcccgttgtgagcttctgttgtttcattttgaagtatagcccattgttctgtcatgccaaagaattgacaaaacaaataataacaaaaattctccccaaaccttgagtgatgaaaaaaaaaaattgatctgatggaatttattgttcttgtttttcagctgaaatggttgaattgtattgtttatgattatggttataaccaaaggagagaaatccgtaacttccagatcttagtttatatgttagtgtcctgtattactatctttagttaacatttgtgaagatgccaaggatgtttgttattttttaaaatgagtttctcttcatataattcctaagaactatcagtcagagcctcatttgtaccaataaggatactatgagagattaaacattgatataaagttacagatgtggtgaccaagggatttaaattcccaagctcttgaatttgattctgtaagtagatgattgctttttaggaaatattttaagtatttaagttatactttagttctatcaagaaagcaacctaattgaaattaggaatgttttcccagggcaggtagtaccctactagttattgtgaatcccagcgcagtctgaatctgagcgctggccaggctgggcgcagtgatatagctgaatcgtagagtccagtgctttcaaagcagcctgataaaggatgattcatttcctttttccaacgactttccttcttgtgtgagggattcacgatttgatcctgagcaaattgcatactgggcaccattgcttttatgtcatgctatgtacttaaatgaaataaaagaatctcccttcccttccccccacaaacttttcatgccactttagggatatttttctctgaatgtaaaggtcattgtatcccactgcttgcaccctggtgtgccagcttcctgtttgacagggccatccatctcagttagcacagccgttcagcgcgtcgcgagctcacatgtggaacacagagcactaagtggccaagatttgattcttggcacatactgagggaaggggctctcaggaaatttgcactagggagccacactattcctttcagggatttggactaagaattctactcaccaaggtgagatatatgagcaaataaatgtcatctacagtggaggattattaaacagggaacaagtcaaaagtgattatttgcgtcctcaaagtttttgaatattaaggctaaaatgctaaatattctactatttataagttgaatcaatattcttaaggtgctctagagtacagatatactttattttataggtaagcaaagattttatcactcagtctcgtactgtaatctcacaaagaaaaaaatcagtttgttttaaattaggctgctgatctgtgttttggggaaatggaaaaacttagaattgtttactttgaaatgaatatattagatcattgtcttcattcagatcattaaaagtatgctgtttgctgcgtgtttattgtagaccaaatagtatgcatgataagacaggtaattcatatgctggataaacagcagcgtgtgaaaaagatagaaaaggaggtagaacaaaatatgacttttgatgactgaaggcatgaagttttatgggggtagttttttgttcatttttgtttgactttgttgattgtttcatgtttatgtaattcctccaagatgaggacttgagggacttcctggcaaatccatttaaagcagagaaatggcagtattcttgaatctctttttcctatgctggaaaagttgggcagaactaaactgcaaggatagtgggttgctttagccatcttaaaaatcaagactcttgaaatatgatttttcattttgatgtgaccagaaaagagtgtcagtaattgagttggaagagtatttcagattgcctgtaaaggaggagatacgttagcaatgtcattatttggaatagtcctcaagtcccaatgacagggcagcaggtccatgatcttgtgaacataggatagtcagtttctttttctcagagggtattccctccaggtgagttgaatttttattaagaaagaatatttcctcctaaagaatgatagaaattctactaaaatggagtttagggatttctttccctgtgttaaaataacctttatttgaaggctagatattagtacctaagagagaatagtgtaaaagatactgtcataaaccatggtaactgtgtttctagctgacccataacctccatttcccaacacacattctgttaactctgattctcaaggatatgaaatgcaggattcatcagacttgctgttttgcatatgtagaaagccgaaagctggcaggccctttgcttccaccagaatagctggactgaggtctaatgaatggcaagcatactttatactatatgtatgatgggccgtgagtacacgtctctgcattgaaagtcttttgaaagaggcatgttaatccagggtactgctgctattctgggaactgtcccactctcccaacttaaaactcaccacttcctttactattctttcttctttccttttcatcctttcagttcttccccataaggcttttggcagtagccatggagctccccacactgtccagagatttctggagtccactggttgagtagctattcattcatattggcagtgtgaatggtgggctttgggaggcagccgtgatggcaaggtaatgcctcactgtgcttgtttgatttaatttgtaagtgggcattttatctctcccctactttctgttaattttaaaataaattttaaaattgactgttgattaatttaattaattaatttatttcgagacggagtctcgctctgtcacccaggctggagtgcaggggcacgatcttggctcactgcaacctctgcctgccggtttcaggcgattctcctgccttaggctcccaaatagctgggattacaggcgcctgccaccaagcctggctaatttttgtatttttagtaaagatggggtttcaccatgttggccaggctggtcttgaactcctgacctcaggtgatccgcccacctcggcctcccaaagtgttgggattacaggcgtgagcctccgtgcctggccgacaattttattttaaaacaaacgtgcttagcaaataagcaaaaatcctttctgactggattttttttaaggtcaaaattatatgtttaagaaggggtatattaattgtcactgtttcttatttatattggagtaattacattcatgcagtcatttaaataatgtttctaaaacacagaaaaggtgtctttaataaatgttatgtgaatcaagcagggtgccaagtacattctcagtgatataaaattccacatatatgcatggaagaaggatgaaggcaatgtattagaataatcagcagagtaggtgatgggattatgtgggattttcttctttttctaataaaaaaagtaaatatcaaattttacttccttcatgaattctttgaataaatgggaagataattatgtcttattccccaattttgataagctgttcacttcatccctaatttatccacaaatgtgaaaatttatacatgatacagatgtatttctgttttttcagtggaagattaaaaaaagaatcaataaatcgttaatgagcccctgtaatgtataaaccaagggatttcttagagttggtttttttctttctttctttcttttttttttttttttttgagacagagtcttgatgtgtatcccaggctgcagtgcattggcacaatcatagcttactgcagccttgaacttttgggttcaagcaatcttcctgcctcagcctcctgagtagctgggtggccatgccaccatgcccagcctaatttttactttattttttgtagagacgaagtatccttatgttgcctcaggtgattctcctgcttcagcctcccaaagtgttgggattaaaggtgtgagccactatacccaggcaattcttagagctttaatataatgcatggtaacaactgagcaattactatatgttgagcactattctaagagatttacatgtactaactcatttaattctcataacagacttttgaagtaagttatacatttcccgtttcacagaagaggaaactgaggcaaagaaaggtaggggagtaattttcccagaggcgcaggctagtgggtggaagagctgaaatctgaagtccattgatctatctctagagtcaaggtccttaaccacacagccgtcctgtgaacagtttgattgccagcacttgctctttacttttggacataagccctaaaaggtaggactttttggattaggtggttactaaatacatgctgattatatatatttgataatgatgtttatatatttcatttctttgatgaaatatatagatacttttttgaagtaacagagacagacttcattaaaatttaaaagcaaacaaaaagccaaacctcatggaattgtcatgtactgaagccaacttctaaaactaaatacttgtagagggcctatagtaggttgagcatttcaaatacataattcttgcttatgtgaccaaaatgagtcctgatacaaaaatagaacatattcctaatctagaagtttcttatcaaacttacaaatgttttgtcagtgttgatctgaacctcatctgcttgaaggcattgttatgtagaaagcagaatttccatctatgaactggaaacaatgacaaaaataaaaaagatttgaaaccaaaataccaaggatatttttataaaaaatgaatgcctttattattatcactttattattcatttattatatatttttcaatgtactatctctttacaatgtactattgggaagatctttacatagaggctactttcaaggacaattttattgttagaaatgaatattctttcagtttaaattgttcagtgtttgaaatgctctgctcttaaattctctaaaatcattttttatggaaacatgcaacatatacaaattcgagagacttgtgtattaaatattcatgaactcctcatctaggatcaacaattagaaattcatggccaatcctgtctcgtctctttccctacccacttctcaccccctcccccactggattatttcaaagtatatcttagatattatattttatccataatattttaataaatatctctaaaagataaagactatcttagaaaacataaaccacaatactgtcataactcctaaaaaaagataattctttaatttcacattcagtaaagattcaaattttcttaatcattttgtaattttttttttagtgttgccttattcaaattaggagccatacaaatctataaattgcacttggttgatgtgtcccttaattttttttttgaatctatgggttatctattctttcacacttaaaaaaattcttttctgaaacttaggtttgctgctttaattcagaatttttgtttgctaaacttaatgaaaatcctagtcctataaattccttcaaatactatgattttaaataaacaattagtggctgtgcacgatgactcattcctgtaatcccagcagtttgggaggctgaggtgggcagatcccttgaggtcaggggtttgagaccagtctggtgaacatggcaaaaccccgtctctactaaaaatacaaaaattagccaggcatggtggcaggtgcctataatcaattccagctatgcgggaggctgaggcaggagaatcacttgaacccaggaggtggaggttgcagtgagccaagattgtgatagtgccactgcactccatcctgggcgacagagaaagactctgtctctaaataaatagatagatgtctctaaataaatagatgtctctaaataaagactctgtctctaaataaataaatagatggacagtcagataattagtaagtgcagtcataattttggaaaggaattcagaaattcacctttttttctttttctttctttctttttcttttcttttctttttttttttttttttttgagagagaatggttaaaagatatatgttgtctggagtcaaaaggtttttcatgctctgaaagtttgacattttccctattgaaaatgtttaaaatggttcaggcgtggtggctgacacttgtaatcccagcactttgggaggccaaggcgggtggagcacctgagctcaggagtttgagaccagcctggccaacatgaccagatggccaaaccccgtctctactaaaaatacaaaaattagccaggcacagtggcgcacacctgtaatcccagctactgtggaggctgaggcaggagaatcacttgaacccgggaggaggaggttatagtgagctgagattgtgccactgcactgtagtctgggcaacagagcaagactgcatctcaaaaataaataaataaataaaaaagaagaaagcttttaaaatggtttaatcttgtcttgctttctctatttcttcctttcactctctctcttttctctactttttcttctttaaacactaaatgtttgggagactttcagcagttttttctttgtaagggcaatgttgaaaaaatatacgtatttagacattttaggccttagagctaacttttaacagacacgctgctttttaaaaaattctgtggctctctaaagagagctgaaaatgctaccccaaattgctgttaaccatgtctcagccctcattagagctggataggccgcaatgtaaaacactatttggagaacacaattcttcaacagaccccatgctttgtcctcctctgctatataaaattaaatattcatacatatgtgtgtgtgcacatatgcatgttcatatgcacacagtgaaacctgaaatactaattaaatgccagcggtaaaataatgctcaccttatttcctcatcccaatacatagttaagattgaatatctaatataatatttatagttctgtattccttatatttgtttatgttggcataaatatgtatttaacatatatagatatataattatggctcacatgaaggtcagctgatggaaatattgtttatatgttaatttgtagagggtgaagactctaacttgattttcgggatacctagcagttgactaggtagtgcttgggggtaaaagctgttgagggcaagaaatgaatgtgcgatctcactttacctctgaccttgaattttctacttgaatgcccactaaaaaaagtcctatcagtggaaataattcatttaaaaatgtagcttattatttcctccatgatgaggaaagtatttagcagtgttttcagttatctgttttgcttgggatgataggccatggtagcaattaactttgatatattttttaaactgcctaaagtccttcttctccagagcttaggcattaatgcccatgacctggaagggactggtcatctgagacattcacgtaaaatgatccaggttaaacagactgacctacagatatatacaacctttatttaataattaaggtatgtctcattaaaatatataacttctaggagtttcaagtgtgaaacctacaagcctaaaatttgtggtactctgatatgatatatatcatgtttaattttttgttctgctcccctttaaagcataactgtcttttactaacttatagattttaaatgtaaaatagagttgtttgctgaatagctaggtttgtttgtggtttaagaagatgtagtacagatttcattcaaggaactcatttggtaaaaaacacattcgttaaagcacttaaatttttcaatagtgctgttacttttttgatatattctttacatttaaacttgtccattgatataactcctagttttgatgctataccattattttccaactctaagtaaagtctattttggcattcataatggacagtaaaaaagtcttggccatagagcattttgtaatattaaaatgctttttaagaaattccctgcttcctattttgtctttttttcctttggaaaagatttctcatcatctgaatcttataatttcagttatttgcaaaattgtgaaatttcagaattgtaggtctttcacttcatatgttagtatatattttacattttaatactttgtccagattttctttgatacagtgttattatatttttacattcctatgggatcccagttccataactattcatttatttctgtagtattaagtgttcaatttatttattacttagttcaaatagcttagcatataagtgggacccagagctgtcggggacttcctttgtttacagtatgacagaagaagagctcggtggtggttttgagaggcaggagtgaaaagtgagcattctgctggctgtttggtcacagttgggcaccttaggttggtttcctaggtgccagatagattttgcgtgactgtgatgagcatttaaaacccagcactttgaaatgcaggtttcttttgatggcagctttgagagctgtaaagggtcttaagtcaaggctgtagagcacgtgccacttgcttgctcaaaagcagtatttggcaaaattatttgtatgtcaatgagagaaaacacaaaggttcttcctctatctgtctgcctctttttggtttgaagaaatatcactcaggacagaacagcaaatctgtgctactattttacaagcttgttactcaagttggaaaagatcgctgtgggctatatgcaaatcagacagcgcagaggtccccctcagcttccaggttgcgctcagcagagagatgcttccaagatactctttctgtcagttttataaatcagagaataggatgctgaaaatctcctagaacatttaaaaccttggccttcaatgatttggctgctcaggtctaataatctccctggtaaaagcctaccatcatgggagctgagctaagagggcagcctgttcttgattgaaagccctcaccagcctcaccaacttcaaatggtggttcttcttgagaatctatgctccagagccatggtaataaatagcaattctaaatgtcttgttttattactatgaatacggtgattccttaagggggtgaagagacttctttaaagggggcctatgttagataatctgcaatgaaagatatatcagaagtgcatgaaaaaaatctttccatgcatacatttttccatgcacttctgatatatctttctttaaagattttaaaattaagatctttagtcttttgagcactattgaaagataggtggttgaattttaccactcttactttgcagaaaggaaagctaagaaactttaaaagagcacacctggaggctgtggttctctagcatcatattttattcactcatttaacaaatatttttcaagtgtctattatgtgttagatgttgttctaggtgttgagacacagcaaagaaccaaatacataatgtctctgccctcaagatacttacattcttatatgtaggggagatggaaaataagcaactcaatatgtaataaaatgttaggtaggacctaacattatattatgcttattttgatcctcttctctccatttcgtctagaactagggttttggcaaatatagacttctggaaagaagctgcttaaccagaacaaaatgacaggttttgaatatgttttgaggattaaaactaaaatgattggacacttaaaaggttaaggttcagctgtctgaattatctgaaaaatttacttacatggactaactcatgtttggaataggataaatgtaacattgttacaattagcttatattaagtcatggttttgcttttgtgagggaaattgaagcttttacataatagacatattatggctataataaaatttgttaatatttattgagtgcttcttatataccaggcactgtcctagggcttaacatttactaactcattcaagctcataataaccctgtgaagtacgtaatattattgtccatattttaccaatgaagaggctgaggctcagagaggcaaatagcttgaccaacaccaaaaattggcttcagaaaatgtgtacttaaccaatatcccatttagtggcactgtatttctaatctgtcaattgagtctagaatccaagtgaatagtaattataccttacaggcataaaccgaaggttgacattttcaaattgataacttaatgaagatatgtattttaaaattgagtggggagcttgttttgagcttaaatgacaaaattgaacttgctatcatggatggcattttataagagcctgttttgttagaccctatttttgtatatttgtatatataagctccttataaacttataaagtttaaatttgttttttctaattataaagtataatacttgttaattacaaaaaaaaaaactaaaaatttttaaaagtagaagacaaaattccctcatgaaccaaccattctagagataaaaataggtaatatttgggttgcttccctttggttatagttctatgcatacttttacgtagtggaggtcagatgtatgcaatattttcacttctagttcttacttaacattataatgtataacttccatagtctatattattaattttaatactacgtaaccgtgaagctttggattttcaaatcaaatgagaaacattagttttctcttgattatctattaatggaaggatttaggaatggtcagtaaattaggaagtgttaagtgcagatactatatacccagcacatgctgggcaatcagagtaatttacgtcaacatttatgtgcagatacagttgttctttgaaaataaatttattttcattgttcattgcaggtgcaaggccagatttttttacaaaaacttttttgacattaatgttcatttggcttgctttcttacctttgtctgtggtaaggagttaagcgtttgtttttaatgtggaagaaggctataaagacattgtgtcaggaaactttagctaattgatttcatattttgtttttgtaattgtcttgttcttacccacattttgttcattttcctctttacaaaacatacacgcagtattgtgcgggttggttactgactgcttactagtttcacgatgacagtcctgtgttaagatgtttctttgcccaggaattaacaactgatgacagtttgtccatttgttagcctctgttttttgctgtgtgcagtaggatggagattttatgaaggagtctttgggggaaactctgaaggaaggtttttttctatgtttgaattgcttgagaacagcccattattggaggtagggaatttgtcgaacaaatcatgaaatctcccatatttgctggagtgatgggttgtaatcctttttgtttgtttgtttctatgggacctcaggtcctgctgggcatggaaaagagataagcatctctctgtctcccttctgtattgtataattctaacgtgacccagcttcttttcatagtctttcttatagcataccaagtatgagatggtcctacctggaacctatttgagtacctactctgaactttttctaatagtgtcattggctccattctgattgtctcccttctgagtgtatttctggagtcatgcggctcatactgaggcctatcctcagatactgggatcgttctcttcctatgtgagtatgttggtagtcccaagatagagaggagtatttgttttcagtaagtatttgcctgggttttcataatagatataattggctagcatttatagaactcaaattatctattaaaatatattcatgtaaccaaaaatatcaatttatgtgaaagaaatattagttatgaaaccaatgtttcataattaaataagtatacaataagtatacaaatgagatatcgatttaacatattacattataatttgctatgttccttttttacatgtgacccccactagatattaaaatgcacccatttgcacttcaaactaatgcaattaagatcatcagttgcttttccatcttattaaggaggaatttcctgttgtggctaatgacaagattatgaatttgtctgagtctcttggcagatattaatttaaccatgtaaattaaaaggaataggcccaaccctgctgtaaatcaggggattaaaacatttggggtggcacattctaccaggagactgaggtgtcacttagtactcaataagggatgctggccacattgtcttggagttccctaaaataaccaatttttcatccaaacaagcacccaccagtaggatgtttttttctcatctcctattggaatgccttaagacatagtctcactagattcttatgtccatttagtcctaaaaacaagaaaaaaggagtggtatgggtattgttgctaatgataatgctaggaaacatagagcttactatgtgtgaggcactgttctaagtgtgttacacatcttaaatcatttaatgttcgcaaacctcgtgtggcataagcataattatcttcatttaacagctgaggaaactgaggcacagatgggctaagtgacataccccagggtacacagcaagtaagtgatggagccaggacctaaatgttcaaacccaggcattctgtttcttgagacagtggcttagccaccacacccctctgcctctctagggcatgattaagacattattgtaatagtgggttatcattaagaatacgaataaaagtccctgtaagtcctgacctaatataactagattaactcattaaaatgctaaatatttctctctcttttcctttatttatttttttcttcagggggtggattgggaggaagggagagaggaagagaacttcaaagacattacaaatgcattctacttaatctgaaatactttgatgcttctggaaaagtgagatgatttaatttcatatataattgcatgaggaattataaattatgttttctgaaatacctatgacatgaaaccacaaaatgaacagataaaactgatttgttctctgacaaatcaagatatatggcggtgttttcattacaagtgccatttgtgcggagggagcagctgagtatgctacaagatgacaggaaccgttcccaggcggcactgctttcacatggacatcccgaggtaatttataacccatgctaaaatttttaaaaaacatgctgtcaagaaagccaaggttgaacttctaaagtcatggaatgcaggtacatctttctaattgaccatctttagcataaacttactccttagaaataagttgttttattctgtggggagaatggattattttcagggcactgggggtgccatttagaaaattctctctcttagtgcgtttaatagtttcctggaagatatgtgttgacttctgctgaagggtaatatattcatagtaaaactgactaaggattctttttacttcccactggcctaaaaacagtgtgttctaggcctctgtggtggtggaaggtgaagactcaaaatctggatgttgtgagttgaagcacttctcaaaggacctgtgtccctaagctgccacagtcatttgtttgtcttgaattttaaaagggctttgaaatgtgtggaaccaaaatagttctgtttgtagtactggtgattctgggaaaacgagagcatggttgtctgtgtgggagagagctgatgtgggtcgattaccagtggcactgtatcgtgttggttttgctctgcagtgatgggtttctcactgagctgcccagaatcactcactcgatgccttttgggatcgatgacatttgatttgtaatgagtgggcaggaatgggagtggagaccagatctttgggtcaaagagggaaaaaaggaactccgtacagcagatcatagtctcttttgcatctgattccagcctgatgaattctcacacacagggggcattattctatataactaagacttgtattagatgctttatgtaatgctttctttttgggtacattttctattacgtgtaacaaaacattgactgaaagtgtttatttaataagagttaaaatttactaaaccaaatcaaacaaatcgaattgttcaaaaatgtttggatgtagaagcaaaccacgttaagatttgaaaataaattcacattttacattagtttttaaaataaaactaataaactaataaaatgtgaaaaaatttcacattttatattagtttttaaaataatttccttttaattttgaatatagtgaaacgtagatggtgaagaacaaattgattgactagtttctttcccctaagaagtggataagcaattgatcacgatgacttcgctcacttaacagatcgttggccctctagttctgtgtcttttacaatctggttctgactgagggcattgtagtatagtgcagtggttaggcgttgtggactctgactgccgggcctttcatcttggtgctccccacttcccagctctgcgattctctgcctcagtttcctcttctatgaaatcagggtagtaattataattcccccttgtagggttgttaggaagattaaatgaaacaatccaaataaagtgctttacattgcccttgacacagggtaagggctgaatcatgttagttgctattatgattccagttgttgttattattactttacaatgcagaagccagatacagtgtgtcaatttcttttgttttctgtagcttcaattcatatgagcccttattctgagatactggatgtgaagtaccaatcttaaattttcttaaggtataggtagactaggtcttctggtattcatgtttttaaattgacaatatcctattccatgactgcatcaacttagaagaatgttattttcttttttgtggataagttgttctgcactacattgcttctttccccttttcttcagagtacttaaatatttacacaggctgacaatataataaaacttccacccccatcatctggttaaaattgtgtattttaaacaatgaaatatccttaactaatgacaaatgaaactttaaatattcactgatagctttgtaattagtgagttatagtcttgggacaaattttttttctgttccttggtttttcttcttaaagttctaaatattgagttacctcagtacaaatgcagcttgactacagtgaagccattttatttaatccaactcttcccacagtcgtgttgagaagacagatgattttcccttccattcctcctctgaaatagttgctcatatcttttctcttcttctcaagtggttccacttgtggaactgcctcaaagcacatctgggactatgtggagcagaagggatgtaaatgatttcctctggggatgcgttgtcagtaggtatttgtatgctggaaaatttgaatgtaatgagaactgaacttgtcacccttgaatcatggttcctttttatcctctctcctagagcatttcacaggaggtagcttcatgccgaattatattattttggtgcacttttacctggcctaaatgatcatggcttaaaaaaaaaaagtaaatggtgatatttatatgatttaagcgcacagcacacctaaagacagcaggtcatgttattttatttatttttttttgtgagtgtgtgtgtgtgtgtgtgtgtgtgtgtgtgtgtgagagacggagtctcactctgtcccccaggccggagtgcagtggcgtgatctccgctcactgcaagctccgcctcccgggttcacgccattctcctgcctcagcctccggagtagctgggaccacaggcacctgccaccatacctggctaatattttgtatttttagtagagatagggtttcaccatgttagccaggatggtctcgatctcctgacctcatgatccgcctgcttcagcctcccaaagtgctgggattacaggtgtgagtcaccgcacttggcccatgttatgttatagtcagttgtgttccagcataatgaaattagcctgtaaacaaggcagtaagaaatgacatggaggggaattcaaaagtagtagtttaatttattctgatttattgactttttcttcacctctccagtcttctactttactgtttctctcccttttgttagtatttaaacccctcctgtcttcctgatttttgagcagattctattcttaaagaaaattaaacatgaattacctgtggtaaacatagcatttgaagaagacctctctcctgccaactagtagatgtgtggtcctcctgtgtttttggtgtgtgtttattttaatattagaattaccaactgaaagccaataatactctaagaaaagtgtaattacgaaggtaaatctgtatcaaaaattgtgtggtgtacctcaaggtcaaatataattattagtggatagtctgtttgataattacccattcatagatttgtacataatgttttcaaaattgtatatttttaaaattcattcagtttcctacaaagtataatccactagatcataaacaaaataacctcctttggtataatagaaccacacctgtatggaaataactgtaacactctaaaatagaaatataatagtccttgtgcgaaataatgtaatgtaacttctgctgagtcttgggtccagtagttctacttttcctttcctttgtactcacccctgctgaggcctatgcctttgacagccacctctctaccctgtggcccttggcagtggcagtggcagtgagggcaatgatgatgctacaagttggcacacaggcttggtggggctgaggacaaccttacagagaaggacagctcacatggagtgttactggccctggaggatactcgcagaagtcttggagagcagggtggagcatcatgccaggaaagagaagggctgggccaggagggtcacagtgcaggtgccccagatctagcttctaatcgtagagctttgcgtggccacagtagacccttgtgggaaggcattagagaggtgatgggccacgggtcactcaccaggcacaacctcattggataaatcagggatttagttatttaatcaaacttctgatgaatgaagtattcacttttccatcaaattaaatagctcatctgcagtattctaatgtaatttggatatccatatatgttatcttaatgtaaactcagttatgttttatccaggatgcactattggtattaaattcttcttatagcaatacaattttaaacatgatattatacatagcagctaataagttaaaacaatactatatagcactttaaatgatttatatggctaatgattagcaatttattcttggagatttatactaatttatgacttggtctccatttcaattaattgtgtacaacagttactttgttttagtcattttgaatggttatttctttgagaccatggccactggtcagataacaagcttacaactattctcttcctgaagataacttcttccttttgggcttgtagtcacacatatgtgaagtatgtgttataagtctgtactgtgaaggatagagcgtttcttgcttcaggtcctatattttaatacgcacataattgtggtgctcattcttatgttgttttgtgttttaggttgtatttaaattacatattctctgttgcactcattctataaacttttccttcttttattttccccgatgttttgcaacctgaacttcatgcttcttcagtgctgcatgtggggtggcctttgctttatgggaagactgccgttttgccttgtcctggctctctgtcacagcctgctgcccattcaccccctcttaccacgtgccagtgatcattcctggagggacaagtgttgcagtcagatcccagtgagaccttgctcccagtcgttgttttgtttgtgatccttggggagaagagtgaccagctataggcttttctgaagaagatgccacatggtgcttcgaaaggaaaggcttttgcagactggggcccgtgacaagcaggaaaggctggcaccggagtcttgagtgagcgctttgacacaccgagtcacagcccattatcacttgttctggtgtcaaaacaatacagcaatttgaactgcagctcagctcactcctgctgtcacacaagctccctcctaagtcattagagtgctggcatggactctttccggatcagtcagagatgcattaggagaggggtatgtatttattaattcaatttaataagtgactattaatcatctgctgtgtattgggcattgccctggtggggggtggatggggaaagaggagagttcccgtaccagtacaacaagatccctgacctgaaggtgcccttgcctacgagagcacacaagtaccgtggctatcatgaagacaaaattgctttgaaaattcaaaagagggagaaatctcatcagattggaaggatcagtttagatggatgagggaggtgatgtgtgagaggggccttgacaagactgcaagattttgatgggcagagagaaggtgagacagacagttggcagtgaattctgcttggctggtatgcaggatatgtttaagaggtatcagaacttgaatctattgtaaagtaccttggatgccaaactaaaaagttaatgttttatttagtggtctcctgcttgagaccaccactgaaagggtttgagtcagtggagtgacatgttaggaatatgtcagtccttattaaaatgttagcttaggtattaatcatttaagattgcaagtgactatatgtagcagaaactcttcaacagcggcttaaccaaacaggagttttatttgtctcgtgtaggtgtccagtgcagcatcttcacaatgccgccagggacctgggctctggctatcttctggcatctcttagattgaaaaatggctgctggatctccagatacccagttgagattccaggcaggaagagggtagggaaagaagagcagaaggccaaatgcctctcgtgaagctctgcctttattattctggaatggacagccttccttaagactttgtctttatctcagtctcaggactagagagcctgggaaatcaagttttttatttgacacaatgctgctcagaaaaaaaaaaaaaaaagcgactctctagtaggaaaagtggacattgggtaggtaaggagcactgttggccacagcttatttgtgaatctatcatgggaaatcagagaaggcagagagcagaggggcagaaagctaacagtgccagcaaggagtcctgattagattcagagaaaataatctcagagagcagtctccattttaggtttgtttaatgaaagaatatgggacactgagttaggaaaaccaggctttagctccggcatcattattaaacatgcatgtgttgagagaagctacttctttgaacctcagttttcttatctataaaattggggacttcaaagcctgtaagccaaaagctgtgatgctaagaaaagattacatatgtgcttcggagtactattttcagattaaacactgagtaagttacaaaaataaacatatagattatgagaagatatacattttattaaaaaatgttttctcctaatttgaggaaccaaagaactagcaaacatatttcatgtattaatttgaaatatattagctaaaaaaaattctgtaatattccttggcactggtgttttctgttaccaactaaacagtacttgcatttatttactgtaaaagaaataagagataacagattcatccctaagcccctgctctaacaggattatttatgatgtgacaacttattacactcctttcctgataaatagttagctacattctccatggattttacagtttcatctggggcagtttgttccctacaaagtgaagatacacagtttttatttctcatctgtgacttgtccccattagggaggtttttttgtttgtttgttttttgttttttgttttttttttacctgatttccttctcaaatcattgtgataaaagactggttcatatgtgtccatattgttttaatatggagggagatacaaagaaatagaaaatatgaccactacctttgggggacttattacctagttggggagagaagacaaagacacataggaaaaataaagaacagcacagaagacaaagtaatgccatgctgaagcagacgctttagtctttgtgtgctgtgcattcaggaggggcgtgtggtgaggggttccttcccctgcccaagggcagcctctctccttgctccttccattgctgactctctcagctttatttggggttatgcttcatcatttgtccccagaattcttgtatcttctatttctcactcttcattggcttcttctgtttgtaatacagaagtgctcagtcaggactactgcagacaaaaccaggaattcttagtatttgcttcctgactgaggctaccaccatattttatatcctccttgttaaatattttccaagtatgcatcactgtgtccttacaatctagctctcatttgcttcaaatagcttcacactccccagtcaacagtgcttttctattcatcagattttgggcctggcagtcaggctctggtcttccttttcattcccttcaaccatgtgactcctcgcactccccaccctccttcagagctgaattttctgtagtttgtcagatgccccatattttttcttgaatctctgtccttaggcgttttctgaaatgcttccccctcttcagttcacctgagaaacttaagattcaattacaattgaggttatcagcctgggagaatcatccccttatcccactgttcaccaaatagcattagttactttcttctttatgcccctataacacttatctttgtaacagttgttaacacagtgggttatcatttatctgtttacttatctcttttctccctgttctgtgagttgttctagtctaggaactagtcctgtccacacctatgacttgccatacagtccagactgcactataaccattatagtggtgaaagcactagctttggagtcacacagtagggatttataccttgactctgtcacttgcttgttttgtgacattgggtgtgtatgttgacctccatgaacttcagtttatctgtaaataaaaataacatctaccctcataatgttgtgaggagaaaatgacatccaaacaatgttcatagcatagttcctagaacatggtaggtattcatattaaaatagtattcgttgaaaaaatgttaataaatagagcaatagtcatttagtggtaatactctctccctctttttcacttcttgtttgaaggtagatataagcaaggaaagttaagggggatcgtcatgcatagatgtacttggcgagtttctggatggtacattctacttgtaaggatggagttaagttttaagtgagagtgggaggacaaagaggtgaattttttttttttttcttttttctggacatagtgacttggaaagaacccgtcacaggtggcaaaggaagctttgttagagaatgaaaatggaatgtatgtggcagaggagagtaaatgattcagtgtgatttgtatttgatacatagtagtattgtccaaatgagatccttatcataagaaagaaactacccaagattaataaatgccatgtattagcaattactacttgggcttctttaattaggaaaaaaaaattccaggtgtctgtgatcactaatggagctttacaagtaagaggcagaagggaattttatggttttaaaaaaaactttatttttatatttacaaaggtgaatgtaaatgtcttaccagaccataaatgtatgttttgatctacttttacactattagctgcttagttataataggaaaattcatcataggttttaacacttgcttttatgatacccttatgatgtcattcctgtgtagtacattgcattaaaaaatagagtgaccaccctgagcagactgttaaaataatggagcattcattcttcttgaactgcaatctaaatattccataaagttatagtagcgtgcgctgggagggcaacatttcagagttgtggtctcacctcaagattggagattggtaaagacattaattgccagcattctttgttcaattttttgcgaagaagcaaggtttgcagatgatactggaaaatatggagttctgatcaacgaggcacaaatgtactcctgttctaattgtgaagttatctgtactgaggaataggtgatcagtaatatcagtttaactcaaataccaattgagacaagaagactctccccgaggaacaatgactcattttacaatgtggccacagaatttagcacacagaatttagctgggttcatcccagctgcctcaaatatcattaaactaatctcagagtctaggattagatgtggctgacccaagcgtcctttcaggtcagagttcaaggagttctgcttaagtttctgtgaggaggagcagagagaagaatctgtgcccgatattcctttaaacaaaggttttattctgtagtgcttttaagatccctcaaatagcctcaactactaaactaacacacacagaaaaaggcagtttgtgatctctagaatagtctgtttgcacaggttattaatcactctgggctgtgatgtacacagaccaaaagaaagaaaaaaagtcagtgatggtggggggcagtgatggagtgatggggagccatgttgaacttcctcccttcctcattctttgttgatttgtaattaaatccagacttagcaggagtatcattacattgtgaagatgagctggaaactcttttcaagttaaatttcttaacattatcccctgcagtaggaagggcattcacactgtgaccaatctttaaaaacaaaacaatgctaaatagtgcttgcatatttcaagtaaagattcctccttcagaaagacttggcatttgttgtaagtggtgttatgacaccatggtatagaaaacaaaaaaaaacaaaaaaaaacaaaaaaaaacttgtcttggttttttttaaagtaaggcgttgaaaatataaagtaggcagtatactttagccatgataaaaatgttaattcaccatcttgtccatggaaaaagctattccttcagtgaagtcgtattaactatgcaatatcttacagccaagtattgctctagaaaatgttggaggtttgcggccgggcgcagtggcttacgcctgtaatcccagcactttgggaggccaaggcgggaggatcacctgaggtccggagttcgggaccagcctgaccgacatggagaaaccctgtctctactaaaaatacaaaattagccgggcgtggtggcacatgcctgtaattccagctactcaggaaggctgaggcaggagaattgcttgaacccgggaggcggaggttgtggtgagctgagatggtgccattgtactctagcctgcacaacaagagtgaaactccgtctcaaaaaaaaaaaaaaaaaaagaaaagaaaaaagaaaatgttggagctttgcacatgatctaaattcagctttctaattattatttaatttctgttttatatcatcataccctcccgtctactgaagtatagatcaccattaaaataacatagctgagtagtgtataggagtgtctgtgaaaaagagaaaaactagatggctgttgggattatcgtagagccataaaacataattaatatatcttttcccactccctcattatgttcagtgctctcctccatgacttccctggtagagcttgatccagccttcacttagctacttccagagatgaggagctcactttttggtgaggctgtagacatcaccatttgctcttgttttactatttctagggattataaaggaaatcatcttgaaagtatattgatatagttctttttctacaactcagatatttggaaactaagatcatgccctccctaagactctattttttttttttttgtggactaaacaaccacaggagtctttgtatacatttggtctcttttctctcctttcatgttgtattaagttgttgcaaaagtaattgcggtttttaccctttcaatggcaaaaatcgcaattacttttgcaccaagctagtatatcccccttgtatctggttgctcatggtccctctgacacgaacttatctcattacctcattgtggtcttgactttctataaatgcattagtttgttttagcagatgttcacaatagtggcttatattaagtcacctcaatgtaatagtttgtcttgtttttgtttcctatttcacataaatttatgcaaggtcaaaaattatgtgtatacatatataattttaaaaataatttaatacattcttattccgttttatatagtcaagtgttatagcccatccttttgaatctaaatcatattatcaactatattaaccttgcaaaatctacagattttataagcgtcttcacccaaatcattggtaaaatgttgaataggcggggcccacgatagtactcagtgtgtaaccctgaaaaccacctttcaggctattaattttaagattagttattcaacaaggcacaaactatggaactaccctgtcaggtccaaggttatcatgaaaggctttctcacgtatttttgctgttcctataagtctgataaaaggacaggatcatggtttgggattacatctgtggactgaacttttttactttttaatttttgaactttgagtgaaaatattacttgttctggaatttctgtttgttcatgattttatttatttatttatttttaccatcagatatcgcttctatgcattcctcccataccctgggatgtgaatctctaggccagtaggtttatactcatttactgcatccagatgttcttttatgattttattttctatattagctcccagggctttcttagccattgttctagcatttccagtttgaaacttcttttggtctagcagataaaatggaaataggtgggtaattgggtagttttgcctccactttctttatagttttacatgacatcatctcccacagcagttgtcctgtgtttttctagatcatcattgagttcctgacttcacttaataactttgtcaaagttagaggtttcacttatcttagatctcctgggctgtaacctctttgataagattcttagagattcctacttgtttctctgcttcattttcaacaatagttacctagtcttaattaagattatgagataactttcagatcctggcctcacctcttattagggcatctgacctcagggagttacttaacttttctatgtttctttcttttcttctctctcttttttttttttttttttttgggagacaagagtcttgctctgtcacccaggctggagcacagtggtgccatttcagttcactgcaacctctgcctcccgggttcaagtgattctcctacctcagcctcctgataatttttttgtatttttggtagagatgaggtttcaccatgttggccaggttggtcctgaactcctgacctcaagtgatctgcccacctcatcctcccaagatgctgggattacaggtgtgagccgccacacccagccaacttttctatacttcatgtgtaaaataagataagaaccctccttactttaaggcagttttaaggattaattgagatattattttaatgataagtgacattgtacacaatgaatgttattcttattactattatttctcatgatgatgcccacctatcttctttttcataattgtgatcatacgaatatttccacagcttcacaactcttttaaatcatctcccctaacatgatttcatccatggaattacacccatttttttttcagcttttcagtgtcatttcctaaactataaaatacatacgtcctctcagaatgcccttattgtacctttcagaagaagtggtctttggtacctcagagaaacctgtggcttcatgtctctcaaaagtctattcttctgatttaagcccagcatagttcaccttcataaatgtatttattatattatgccttccatgatgagtactataagccagatgactatgggggcagcctgcagctcttagaaggctctgttgaaacctgtttttccagtgggatagattatccgtggaaaatgctgatatttcactgggctttctcacaaagttagatatttcactgtggtttatctcacattgtaaaaatgaaacatattaacatatagggcttggaatttaatagatttagggaaaaataaaaattgtggaaacaaaattataaaactataaggtttcacagtgtttccattttaactttctaccatgtttaggtgtgttaattataaagactctgcctggtttttatctatggtaagcagagaataataataatagaatcatccttttgtgtccagggggattggttccaggactcatttgaatatcaacatatcaaggatgctcaagtccatcttacataaaagggcatagtgtttgcctattacctcctcacctcctcctgtatactttaaataatcatctctagattgcttataatatctaatacaatgtaaatgctatgtaagtgttatactgtatttttatttgtattttatattgttgcattattattatttacttaaaatttttaatccagggttgttgaatctgtgagtctagaacccatggactgaatgaagacccactccacttaccttgacccatgcaatattcatataatcaagcattcctaaatttttggaatttctaaataagaatggatttgagagagtttggccctgaagcttttttatttcttttttttttcttttaaaaaactatgtataaccagaaataagcatgtggagtttgatttctttaccatgaataattgtactgaaatatttctaggacatgttctaagtttacagttatatgtgtgaaggttcagagaacacttttgaggaaactgctttccttttccctgaaaaagtgatagtggtggagtactccccatacaccctcccaaaaaatgcagctccttttctccacccatcatttgcatttgccctccagcctttctctatttccctccagggcacacaccctagtcttgtatttccctgggtcagcctgcttggctggagggtgcttatttaagtgcagattcctgggctcatataaacctagtgaattgggtcccctggtggtagatcccagaatcttcatttttctcaagttctttatgggggagtctcatgtccccaagttttgagaaccaccacttaagtccatttgtcattggcttctattatgtctgatgaaaccaatattatgcagagctctttctgaagtgctttgttgttgaacaggctgctggtgggccagaacagattgtcaccatgtaaatgaggagtcaagggacataattttatgggctcacacctatctcttagccaaagacatttcaggttagttgtttgcctgtactggtaaaggaatatagtctcatttgaactgggacaaccctagttctgggtacattctgtggtattatatttgccaactcacattcagcccatgcatttataattactcaactgtttccatgcattgagtcattgcagaaaagcctcttctttgtagaacctcattaagatttcagctgctaacagattttattttacagttccagctttcatgatattaagatatggagatttgcgcttctgggaggggttatttacaagtttaaagctcttagaagcatcacagtgtttttaagggcataaccagaaaggaaaataaaaagggtagtctggtattctgatcaatgtgatataatactttggaggcaaaaatttaaaatgttgaattgcttttaaaaaattgttacttatttgtgatctgtgtgatttttttctttttttaacagcctttggtttaaaacaatgtttttataaacgttgtttatttttggcttctaaaaagacacatagcattaaagcaatactcatagggttcatactttttaaatgaatatactttccttatgctaagaatatatggtaaatgaataatctctgatttaaatgatgcttttttttgcatggttgcactcagaattatactgtgccattttatatcttgtattgttcttccccgtggtatgttaaaacttttaaataatgtgcactattttaattacagtaagtaatcattaactgagagttattggttatatcaattagaggtgccacttatgttttttcttctatctgttaacataataatcattcattaggcactctacagagagaacttaagctaaatgagagcgagtaggtccacatcgggagtcaggagtgctggccgccatgatggctgctttcatgtgaaaggccttgcctcttttcttgacgtgatgttaccactgctttcactgaggagacattggctacatgtcccctttggcagtcatcttgggtatctgagagtcttcctcatccagtgaagttcctccgtacagcgtttagaggcctttcctcttgctttgcccttctttggcatctgcatgtggattatttacttgctcatttgttcctggtgtctttgcattacctactctttctccagccaggaataataaacaccttattgacagattgacttctgattctctgtgtcctccttgtcaggttggtatcctgccatcccagaaggcactgtgtagatgtttgctaaatagatggttgaatagaagaggacttaatttttgctaaccgaccagattgatttaatttgttggtgttccaatccagccactttgaatatcaaggctttcttgcttaatatccttttaggcaacattataactgttcatgtttctatataaagatttctaaattggagggtttctcatccgaaaatagtcaagaatttatttaaaaaactgagatttctgaatgcaaatagcttcctttttgcatgtaggttgctttgctttatttgcaaggaaagagcagcgatttaaaagtaataaacacacccattgtaggaaatataaaaaatacaaaatgatgtgaaggataaaataaaattcccccttggtgttacctgtgacccaagatatttcttaccttgaaaattttgctgataaagttaaaatctgctttatgcccctcatagtctcttttctttctttccttataggcaattggctatctatatatcttagtttttcacttaatattacaatattatacaatattatacaacaatatacaatattatacaatacaataagtttttcacttaatattacaatattaatcattttgtcatggcattaatttttaatccttttgtaatggctgattgtgtgagtataacataatttacagaaccattctgttggttttacacaggttgtttagaattttaaaaatattatcaataactctttaataaacatttgtgggtgtcattctatgtttttgattcattaactaggataatagacaataattttaaaagtctgcattctatgcctggttgacaaattcatgattgatcttcactgacatttaaggtgttaacactgtcaaatttcagattttaagtttaacttagttttcttgttattacagttaacctggacttagaatatacctgtttcattagaatttgagctggtgaagagcttcattgtcctgattgaaaggtcaaactgagggatttataaagcctgcctgaaatgacaagactgttagatctgagtgttctaagatattcgtcatttaaaacccatagcattgatatttttaaatgtcttattatgaaatatgttctgcttacaaaagaatgtaagtaatgtataatgtatatgtttagtattaaagaataataaaacaaaaacctttgtacctaccactctgcttaggaaagagaacattattagtacctttgaaactttcatgttcccttcaatgcaattgattttttaatgccaaggatctcagtgataatggatcaaatattttattttgttttgaaacggagtcttgctctctcgcctaggctggagtgcagtgctacgatctcgatctcagctcactgcaacctccacctcctgggttcagcgattctcctgcctcagcctttcgggtagctgagactacaggtacctgccaccatgcctggctagataatgtatcaaatctttttttttgagatggagtctcgctctgtcacccaggctggagtgcagtggcgtgatctcagctcactgcaacctccaccttccgggttcaagtgattctcctgcctcagtgtcctgagtagctgggactacaggtgcgcaccactacgcctggctaatttttgtatttttagtagagacggggtttcaccatgttggccaggatggtctcaatctcttgacctcatgatccacccgcctcggcctcccaaagtgctgggattacgggtgtgagccaccgtgcccagccaataatgtatcaaatcttgaggaagatttggaagtgtctgatttttttcacctgtactgcttctacctggtccaggtggccctctcttctcacctggctcactgcaacagcttcctagctggtatctctgccttttacttctgatccacttcagggcagcctcccccagtaacctaaatgatgacttaaatacagaaactaaataatgccatttatctgcctaaaacccttcctgggttttctgtttaatttagagtgaaatacaaatacttgcggtgatctgcaaagctcttcctaatctcttctgatctgcatctgcaacacttactctccaagcttactgccagcctctttgaatttctcagccctgcccagacttcctggttttatgaccatcacacatttttttcccccatatttctgcctagcaccctctttttaccactcttagcaaggcaggttattttattattttttaatcccttgggccattttccctgactacctgattattctttctcataacatcctattattttctttctttctttttgtttttttttttgagacagagtcttgctcggagtgcagtggtgccgtctcagctcactgcaacctccgcctcccgggttcaagcaattctcctgcctcaggctccctagtagctgggagtacaggcacgcaccaccacgcctggctaatctttttttttttgtattttagtagacactgggtttcaccatgttggccaggctggtcttgaactcctgacctcgtagtccgcctgccttggcctcccaaagtgctggtattacaggtgtgagccaccgttcccagcctcatcctattattttcattcctagcacttgttaaatttttaattatatattttcttattggtgagactaagtagacctaagtttcatgagtatagttaccatgtcgatcttgttcaccatcctgtatgtctagcctgggtaaacactccagaaatattgaatgaatgaatgagaaagtttagtgatagagaatattagcatggcacagctttttatgttcaaaagatatatatggtattttgggtccaacaaaatacacctgattgaattagttgagtcaggcctacatccctggacctccttttgcctaccacacctgttatttttaattcttaccgactcatttgtaaaatataaccaatgtaggttaaataatcaattggagatttctcaggtatttaagacagacttaagcagcataatatagaagagatcttggtatagtggaaagaatgtgggctttggagtcaaaaatatgaatttaaatagttacggtgcctgttagctgtgtaatctcgaaaaactgtcccctggtgttctcatctgcaaaatgtcatgataacacctacctcattggtttgttgtgaaaattaaaggatgttaaatcttagctctgtatttgccacaaatagactcttcattcatgatattataatcattgtcttaccattattacgtaagtgcaaatagcaaatagtttcatcatttttttgcttctggtttttgcttcatctctaaaatggggatcttactttaaaggaataatgtgaagattaaatggcataatgtataaatgtgttgatggcacaacacctagtgcaactccacctggctcatagttggccctcaataaatacacatggctaataaaaataacagcataaaagaattggtatcatattacttggtggcaatttggagtctttaaattctaggtattcatttgccaaatatttattggatatctgttttatgccaggtgctaagttcagtgctagagcaacaaggaggtctaagatggagctctattgagtagcctgcattttaatggggaaaggaggtttcacatgaattgtatagtttttcacctcatgagtaaatacaaagtgtggtgcgattaattctcttggagggaataggaaaagtgctattccctctggaagtactgtttgagttgggtctcaaaggctaagcagcattctccagaggataagaagtaccttgttctgaggaagataatatgagttttggagtcaggcagacttggatcccagtgtctgccatttaacatccttgtaaccttaggcaagtcatctattctaacctaaaatggagacattaatatttatattgatgtagtttcagtgttgtccctgcccaaatctcacatggagatataatccccaatgttggaggtggggcctggtagggggtgattggatcttggggtggatttccaacttctgttctctcaatagtgagtgagtgagtgagttaccgtgagatctggttgtttgaaagtgtgtggcacctctccgcttctcttgctcctgctcccatcatgtgagctgcctcgctcctcctttgccgtccccatgaatgtaagtttcctgaggctttcccagaagctgagcagatgccagcaacatgcttcttcctgtacagtctgtggaaccgtgagccaatgaaacttttttctttatagattacccagtctcaggtatttctttgtagcaatgtgaggacagactaatacatatattgtaggatttttgtgaaaattaatacaatgataaagggtctggcatgcagcaagaacttacaaatgcagggtctttgcagtcacttggaaagcacttctctccacactaggaaattacaaaatggctttcactcccaagaattcatagttctatgtctttacctgatcaaacatgaatttcttctactttgtaaaatcttttaaattaaattaaattaaattttatttttctgagacaaggtctggctctgtcacccaggctggagtgcagtggcaggatcttggcccactgcaacctctgcctcccgggctcaggccaccctcccacctcagcctcccgagtagatgggactataggtacacaccaccattcctggctagtgtttatatttttttgtagagatgggattttgtcatgttgctcaggctggtcttgaccttgtgagcttaagcgacctgcccaccttggcctcccaaagtgctgggattacaggcatgagctactgtgcccagcctaaatcttacctgtatctttatctttagaagttcaaagattggctattcagcaccacttcaaattcagtttattagaagatttacttagctcgtaggagttactctcttacccactgttagaaaaaatagtagtcttcattctgtgagtctttatttttttatttccacacttgtcaaacctggtgaatcttctaagattctaaataagaaatcagtcattttagctctttattattgtgtttactctttgtaacatcaacaataatagtagtttacatttggttaaatgtttaaaacttatagagaacccaaattcatattacctaatttaatgtcctcaaaaaccctttgaggtggaggccatcatcatcttgtttacagataaggagatcgagaggcactgagtgtgggtgacttggtcatctgattctaattcaaaactttatactgtaggggaggaaaaacttaatgttttcttctgccccctagagctattctccacccaggaccctataaattgaatgacaaaagacagattaacaagaggaaaacaaatagaagtttattaacgtgtgcatctgtatctgcttttcaattgtcttcaactcaaaataatcaatatgagaaatagcatattttgggggtatgtattctgctacctgcttttctgttttgcccatctgcagattctgttgttttctccaaggttaccagtgctcatcctctttttgttttttctttctactgcagtagtctttcgttcctgtgtggcccaggttattcagcagttccctatgacccagattctctagtctggaaaacatgtgtctgtttttttattgacagattagtatttcttaatcatgtgttaatagtctacattggcttctcattgccctgagaagcaacttcaggatcctcttaccctcttcccacaaaccactagtcactctttatttcttgttgttaattctaacatcctgacaaggtaaatgaaatgtacttaaaatataacttctttaaggtggaaccatttcacttgtaacattcttttgtcccatagcactctgctaaactactgtctttcaaatatctttctgttttgtttgtttgtttgtttttgagacagtctctctttgtcgcctaggctggagagcagcaaaccctgcctcctggatttaagggatcctcccacctcagcctccggagtagctggaaatccagcagcacgccaccatgcctggcttatttccgtatttttagtagtaatagggtttcactatattggccaggctggtctggaactcctgacctcaagtgaaatgcccacctcggcctcccaaagtactgggattacaggcgtgagccatcgcgcccagccatctttcatatatctttctaaagcaaaaaaagccaaattcttccatcatggtttcctttgggacttctagacctatagtaagtctattttaaaaaattatctgatacacttagctttgtgtgtttattcttttttcccaaattttgtgtggcttatattagttactattcattattgttgagttatttttcagattcactcatacttgaactgaatgactttgattataaattctttggatataaagagcactgtcactttaaattattctgtgaatagcagaagccagtgttgagatgataatggtgatatttaatatactatttttctctattaggcatatcatagatttaacaataattattagatttggagtctctgctagctgcagccttttccgaaattcaaggtatatttctgtgtagcgtatcttcacaaaacataaaaacactaaactgaaattaaaactgatttgaaagtatactagagaggattgtgaatatctatgaaagtacatgactttttttttttttaattaaacatttgtgatctctgcctactccatttcctagcaccttttattttgttattcttctttaggtaaacagccattcaggaagatggtttgtgcaaaaagaatgaaaataaaggcatgaaggaaaatgtatgcactagcatcttctgtctctccctctgagattttatgctctgcttcaaaaaccagtttaaaaataaaaaagatgagggcggttgcaatctgcttcattttatgcagattaggtatggccctcgggtacctgccaaattgctaatatggccttccgttgggcctgattagtgtgaacccggatcttttccattaaagcagaaatgaatttgttgggaataaggtaacaacaaaagtgatattttcactaataaccgtgggtcaggttacattaaagcagtttctcagtgtgtacctgaggcagactaccctcagcatttatgatttcctccatcctcacttggctcctctctgaggacatcgtggtttttagagaccagtgggaccgtgacctccttttataccgaagctactttgagaggtcattttcttttacattccaaatgcaaaatgttattctcatttttgtaaacacatctgtaggccttacacttgtaataacaagtatcttaaattatccagaatgaatgtttatataaggatatccactctgggcaattgaatttttggataattccaatagccattttgagtgcccctgggtgaagcattaattatcttccaaaaagataatggagacaataaatatggaactatcaagcatctcttatgactctattagaatacatttttaagaaaatattttggtaccaatgattgtattttgtgggaaaagaattagaggtttgtatgaactaagcagcaactggaagttcaaaaagacaaattgggccctatctgcagatttgggtgcctaaagacttatacaaagtaaagtcagctttgtcagttgcctaatttagcccatattgaaaatcactggagctttagcacgagcagtgtttcatgtgaagtcattttgtaacccaaattatttcttgcccatggaggagtaagaaacacatttaacagttgacattctgcatcatcatggacagaccagagagagaagtagctacacccaaaatacatacgaaagtcttttacgtgggtttgcttcccattaagtggtttatggatgaataaaatatttatttttaaaggccttattctgatttattagaagcattattgaatatactaccccaacccagtattttgtgtcttcaagtaatttgatagcaagggcaagaattgcaaagcttttgtttcctatttcttaattttatttggcaaagtacaaatcagttaaagctaaaattatctgtcacatagatgtgattggggaagaaatttataatcatttttggactcttacagttcttagaacatcatgtttcaatattattatacaagcatttttttttgagtgtctactaagtgtcagacaccaggctagcttagatgaatgaggtggtttctggttgattatgaccagttttgagatgtgtccaagtgtgcaagaaccacaaactgataaagaaatgttcatgggcattttaacttaacaaaaatttaacttaccttgactcatactggaaactgttatcagaatttaaaaattaatgacttgccctttatttctggtacaaattaattttaatgtaatattgggtaacttggtcaactactttcttctagtgtagcaacataataataccatgataaacttaaatgcccaatttcttgatggattattataaggtgtttatgataaaacacgattgaaccaattaaaaatgagtagaggtaaactggggcccactaaggtgtcatcagtatccaaaggctcatctgtattcagaaaattagacatggcgacagagtgagactccgtctcaaaaaaaaaaagaaaattagacatgaaggaaatcagtcttatcctagtgaatattttcatgcttttctccccatgtattatagaatgtgtatgttaataatgaaagcaaaacaaaataaaacaacatgaaatgagattaaatggatctttttttttctcatttaagttagtggcctgagtgactaaatatattttgatttgtgattttccttccttttagaggtgggaagttgatggtgatatattagaatcaaaatgaaacaccacttaagttattttaaggatggttgaattaaaaaaaatccatatgacagattagctcttgggacccctttgcaggcttttgtctatatttatttatttatttacttattttagaggcagggtctcactctgtcagccccctgagtagctgggactgcaggtacgtgccaccacgcctggctttttatttttatttttatttttgcagagacagggcttctctttatgttgtccagcctggtttccaactcctgggctcaagcaattctcccacctcagcctcccaaagtgttgggattacaggcatgagccacagagcctggcccacagccttttttctaatagaatgtaatagaaatctacagtattagctctcatacagttcttgccatcttcttatctttcttaccgggttttatatcttaaagctctgaataaaagtaaatcttgtcgacatgtggagggtcttcatatatcagtgattcctagggtatttattagtatttataatcagataattttgagatttttgtatcttgctcccaattttcagcatcactcttcctgagcaaattaaatttatttatttatgtggtttatgctatgggcttcattggtcatatacaaatacatctttaagaagaggggattacttatttgtgcaggtatataaactattctattgggtactatgcaaatgcaaaattgatctgagagtatcgtgtcctaatgattgtgttattgtctttcattaacataaaagtgtcctggggaaagttactctttaataattttaacataaagaactaatgaatacaattatatttatttagatagagaagtccattagtagtcagtaggcagcagcttttgttattttaggaagaagtgcagtcggctggatgatattcagtttaaaaaaacctgattgagccatatttttttttcggttgatctgaaagccattgttgttttgctcaccaactggcagaccttcaattatcctgaatttagaagttgtttactatactttgaaattttaaaaatgagcccttcctgagaaacaaaaagctggatgcttgccatttttttttaaagaaaagtagaactttaatggcagaaaaatcaatcaaccaattcaatgttgactttatttccagttttgaagccttagtgtgtttttaaaatgacagtaatcaaagctatcattattaatctccaaagttttggggcatcattttgatctagaatgtcagaactgcaaggggccatggagattatcagtaagtctctgggactgtagtggattccacaagatttggttgagggtttcagctattgaggctcttctctgtgccattatcaggtgtctagaacatctcttgggctagtcttcctggatatccagggtaccaagagtatgggcgctcacttttccatatgttgggggttggcagaatgctggggaagggtctgagagcacaaggtcaacctgcaaagaaagctggcactgcccactggccacggcacagtgacctttcatcccttccagcttcattccctccttccctccttttcttctttccttatctgtgagcctctaccatctgccaggcaccgtgttatctgtggaacttacagtctagtgaagaataaaggtgccaaatatttttaagtgcagaggctctctgggatcatttgtagcagagggtgggtggtccctgatgccttctctgattgcggacactcctacagatggcaaaatggaggttcaaagagaataagtggccccagtcagtaagctaggacaaatttcctatcctagggtcttttggactatgtcagatgacttgccgtgttagcaggtgacattttagaagatccaagtttttgcttctttaagtaaaggcaactttcccttaaaaacatcctaaaaaatgtaatgcttacctcttttatgttgacttacaattcattaatgccaacatatgtttatacaggactttataattttcagtgcactttaactcatgttattttattgtaattaccatcttgtgagtcaggcaggggagtttgtttcttgttttagcttttaactccccattttatagaagagaaaataggggcccagagagggtaagcgagttatccacagatgcagagctgcatccaacagagggcagatccaagatctgggatctcttgattgccaggctgctgctcttcaaacaaaagtgggtatgtgacatacacacacccactgtattttaggcatcctcattttatggggctgtagccagagttgttagaacaagttaaattgacatgacctttgccttttggtggtttatagtctaaatatggtttaaaaaaaagcttcaggtttattaatacacaagaaactatttttttttttcctgggtattgtctattcagcctatgccaagtccttcacacttagaaggaaataaaacacagttacagtgcaccttagccctactttcctacttaaatgttacaatgttcctctttctctgcaacagtaatgagatttgccagtgaattgaagggaaaaaaaaaaggaatctgggaattttgatttttctgctcttttgaggagaattagtggattaatctagatgctcccagtccttgctttttactgggcacgctgggcagtgatgtccaaatctggcttatcaccagcatctcctgggatctacccctggagcttttgtttcagaggccaggatgaggcccgtgactgctctacagatgaacttggaacccatttacttaatctgaccactccaaacaccatagttcttagtaatctgcaaattcctgggaatggagagaaaaacaacccatttgtgatctcttctaccctccagattatctctaactgtgtggtccagctgccacaggataactagacatgcaaggggaatagcctctaactctaccacagttccattgcccattaatttatatggcattttttctgacattgctgaatattttttggggctcaaataggccattgtcattatttatcaccatgtatgttgtgactgtaagtctacttttgattcaattagagaaacatttgcttaccgagagaacacctcctgtgtattggactcttggcttcttttttggccattaaaatggtagcggaatattttaaaatttggtttacagcctttaaatatgacatttccaaaaaatgtaaatcaaggaactgtcagaatatctttaaatgtaaaacatctgaagctgtgtgcattaggtttaataacatatatatgaaaatgtccctgatgtgtatatgaacactgaaagtaaaatatattaaaatactcgttttttgttttttgttttttttttttttttgagacggagtcttgctctgtcgcccaggctggagtgcagtggcgcaatctctggtcactgcaacctctgcctcccgggttcatgccattctcctgcctcagcctcccaagtagctgggactacaggcgcccaccaccacacctggctaattttttgtatttttagtagagatgaggtttcagcgtgttctcgatctctgtcccttgtgatccacccgcctcggcctccctaagtgctgggattacaggcgtgagccaccgcgcccggcctaaaatattctaaagggaacaaaaacaaaaacccaaaatcttcaaaccaaaagcagttgccacttctaccagttatagccgtagttgcttctgtgtattgtagtttcttagtgaattactgtgaaatcaggttagttggaacatgaataaaaatgtacaacataaatgaatatacgtttgccttcatattattaatatatggtgacgttttctttgataatctacatgccatcataatattgcccctaagattaggtattatgtaaccgtaaactgtaggaaacacaatatgcctggaggacaattctagaatatataactgggagcatgcaattgatagagagtttccagggatattgaacctagacatggagtacctggaaagccaggtcctcaggaaaacctattgcaacatttgaaaagaatacacataattaatgaggatgtgaaagatgtgaggcaactgtattcttagaccttcagtggatacctcatcgtagaggatgcagaaacactggctaaacataagttatgaatagcatctgctagaatgtagcaaagtatgtttaaaagagtatactctttcgcttgtgtctttgattattgaagatattttagggggacaaatgctagggggaaatctctttatgcaaatgtatttccgaatagaaaggaggaaaaaagaagcttctttgcattacctgccaccatgagttttttaatttaaaactcttttagaaaatgattaaacttagaacaacaataagaaaatatgtactggatgaaatggtttttaaccagtgacagaagtttagaaccaaccccaaataatttctcatcacacttttctttctcatttgtcttattcctccatgtaatagttttaaatggcacttttatgaaataaataactaaacaccaaccacattttttttcatatcctgaccaatattttggctgttttacagaagaactggaattctgaaaattaaataaagatttctgaaatgctaacttcagaaagttttatttaatttgtggaataattttgttctctccctctccatttttttttcaataaggtctttattaatttagtctagttacttagtgcttatattaaataatctaataaaagtcagggttgtaacataacatttcccaaatgtgaagcagcatctattacattagacaaaatctttatgccgcaaaattgtaaaagccatgtatagaattacaaggcaccaaatggtactgtatatatttctaaaatagaatgtttctgtagtgtaagggggtagtcagcttaaaaaaaaagtgtgacagacagctgtatcactatagtttattcagaaagtactctaaaattaattttaatttttaaataataatcttcttgataatttcctctgaaagatagaaatatgatttaaatatacaggttagtatttttaaaggtaaaacctactttgtttgtgtttgtcagtgttaccgaattcttgcaaacagagaagttatctgtggggatgggaaacagtgcattgtgtgtgtgtgtgctcacacacttgcatctcttgatttttagataaattcatatgacagtatatgttcagtgtttattttgaatcattgaattatttatttttgtttggcatttccttttgtattgtcataaatgcaggattaaatccattgtaggctcccagacaagtatgttgtgaggtttcattaatttgtgtaagttataaaggcacttgaataatgtaagatgactcaaaaatgctgtttcattttccacttacttttaccccaatgcaagccagttgaaatatatatagagagagtccttaaaatcaaagcagaaggtgtagaagagttaggtttattccaacaagttgtactggggcactgctaaactatgcattaaaaaggaaaatatgtatacttcaaaaaccatttttgtttcacctttttttctttttcctcattgaaaagtcattcccaccacagctttagcaataataactacaatttatgtctttttgctgctacaatttgatgatataccacagtcaggccacaggttagaaacacaggctgaattattatatactgctgggtagtgatttcctgtgaactgatttatggataaataattctatgttcttattatataggatagacagtttttaatttctttaacaaagcatagctgaacaacagaaaattatatgctatagcatatgaacacaaccactctgaggaagataaacagatgcaatcaatgtcatgagttctcctatttttacaaggagcctcatcagcagttggtattgtggaaataataccgagaaccagaagccccaaggcttagttcttctaaggctggggtttttattgacactcttttgtggagatcttttccagggagttatgagatatacaaaccccagcctttggatattaaagctaatgtctcatttttttttctcaggttgagttttcattttgctttaaaaattaatgttaaaatgcacctggaataaaagaaaattatccatccagctgaattataagaatactgctggatatcttgctgggttgcttatatctgtttcacagattgaactgtaggctttattgtgcagtatacccaatatatatctattttatcagcatctatctacatgccactgcaaactgtgagaactgttctcatgtacttcacaggcagcctgttgtaggccttcatgaagtaaatatttctcatatttaaggtacaggggtaaaagctatcatcttggcttattttaggaatggtttcacttagctatgtgtttagcaataataagcttctctgctcaattgtgagctccataattacagggacagtatatattgaggttatctttgcatcttagtgacttatgttggagggacacaagaaaaaagttgttgaatgaatgcttcatgcttaatacaaacacttctaatggctcattgattataatgtattatcacattttattttatcctcagacatgattgactttctaaaggcttgaatcaaatattgatcgaccataatgtgtattatcaccactcttttgtttttatataattagaggcaaatgatactaaaaatatgaattatgcatttactgagaatagtaactgttttctttgagataaataccaaaaacatgaacacaaacaactattgatatttcttttggtgaaatgtcagctctttaactctggcagaatactgcattgagaaaataaaaaactggtttccattattgcatctttttaattttagacaaaaattgcctccattcccaatctaattttatatcactaatgggaaatttacctacaattgcattttgttatttggtctgtacacattacacattgagtagattggtactctatattttagtgaacagatttgtctggatatagacggttttattcatactgtgctcaattcaatcatgttaacatttgtatgaatttcaaccccaaaataaaggcccataatttgtgactcaaagaccttataacagcatctgtaatagtcttcaacaccaagcattttctaaatgtttgcagatgacaaattccttgtaaataataaagatgattggaaaacaatgtttatgtctgaaatggcactgttgtgggaaactgttttttccagagaagtcccaagtttaactggctcttcagacttctgggactgtgatgtcacctgtttgctcattggtctcatttattccttggtttaacattaaatgtccagacactgcctgatgtgtgactgtggacgtgctctggccctcctctccaggggcccatttgtgtggttgggcgcttggacgtgggtacatcctcagggcatcggtagcagagctgagcagaaaggatattggcccagtagttcaaaaacttgcaaaatgaagcctaggttttattcctggttttcatccacttatgtccttgaaaagtcattctttgatcttcagcttacttccaggtagaatgctgagtccaggctgttttcataaggataaactaatggttgtataaaacactgtgcaaactgtaaagtaacataaagggatattgtgaataagtaggttttttataaggtatacaaaccaaccaagaatatttattgtaccgtgttatagagaaaggattacttcaggtgggttatctgggttggaattattcccatggcagaatttcagcaataatatagacagtttctagaagtgaatattggggatcagtactctagacagagtgagagtgtgataaattttcagagaaaaaatggaaattgccatgcatttagcatctactatgttcctggctgaactcaaaggtgtgtgtgtgtgtgtgtgtgtgtgtgtgtgtgtgtgtgtgtgtgcgcgcgcgcgcgcgtgcgcacgtgtatgaaatatttcctaatttaatcatcactagtttttctcatttttcaaattggggttacaaaacttatagaatgtgaatgttgggaataacatctgtatacttaagttatgccatcattattgacatttctctagtgctgcaatattatcctcaatggccacataacttgttcttgcttctttgtccttgttcactacactggagtgattggtgtggtctgcatccctccttagaagccaggaagaggctgttgtaattgtaactagacatacctacctgaattatttcggttcttttttctccccttggaatgagcgctgtttttaatccacctgcagtccagtaccggttgagcatctcaaatctgaaaatctgaaatctgaaatgttccaaaatctgagatcttttgagtgtcaacatggtgctcaaaggaaatgctcattcgagcatttcagattttgaatttttggatttgggatgcctacctggtaggtataatgcaactatttcaaaatctgaaaaaatcagaaatatgaattgcttctggttctccaaggattttggataaggaatactcaacttgtataaattaatctctggaagttttgctttattgttgttatgtgtacactaagaaacttacaaggatctattgtcccttaagttttatggagcacttatgtagcagtcccagtgctagagtctccttttcatgtaaagtctcatgataaccctaaagggtaggcattgttcgtatccccattttacagatatggaaatggacacatggaaagactaaacaatttgcccaaagtctcacaggtgacaagcagaggaggctgggtgtaaactcatctttgactccagaccttactcctaacctttgacctatacagtgtgctactgagtcaggcattcacggcctcccaaaacttggaaccagtcttttcttctagtttgcctctcacttgagccagtgtgataacaagaagagtgagagcctggtctttgaagtgaatctgagctctgctacttgctagtaatattacctaggctacttaagataacccatcccttctgaatctccatttcctcatggagggagttgacactagatattcaggggtaaagaactgatggagaaattggaggtacacctatactagatttggtggtgcagaaaataagagactgagggaacagagagattgtcatagtgtttttgtttgttttaaagtaggggagggctaggtgcagtggctcatgcctgtaatctcagcactttggaaggctgaggtgggcagatagatcgcttgagcccaggagttggagaccagcctggccaacatggtgaaaccctgtctctataaaaatacaaaacttagccaggtgtggtggcatatacctgtagtcccaactacttgggaggctgatgtgggaggctagcttgagcctgggaggcagaggttgcagtgagctgagatctcaccagtacacttcagcttgggtgacagagccagaccctgtgtcagaaacaaacaaacaaacaaacaaaaaagtaggggagatctgaatctacttacaggtcaaaggaaagacgccactgaggagcaaggatggaagaaatgaatggggaagtggtgggaatagaagatgggacacattgatgtatactcctcctttgtgatttaaaacaaaagtcttttatagacacatgactgaaagctaatataatcatcaaaaatcttttgagtcaatgtattttgaaataaactgactatatcttctctttaagacacattaaaaaggtcaaaagaatgactaaatttttgagattaaattatattcatgctctttaataatttttacatttaatctgcacagtattcttgtaagatcagtacttttattgttccagtttacagatgagaggattgaggtatggagaattttaagtaacttggtagggttacataattagtaggtgacagagccaggatgtgaacagaggcaatttaacttggaagcctgcattcttagtcactatggtatactgcttcccaatttgatttcctcaattaacacttgactactattccaagtaatatttttgtctattttatatcagggaaggaggactgttctaaagaatgtatttgcaaagaggattaacacagtacgttagacagagaccctgtttggaggaaaggctcattaagagttactccaagcctctacctggctggagtagagtgggcttctggccatagctctcctagcagatcttgtacctgcagaccctggtaaatagctgtgcagagaccatgacttctaggactgtgcaagttagttaataaggtgcaaaaaaggaaaagcacacacttcccattgcctgggaaaatagcatgtgccaacagctctcttccaagatatagaaaccaaactgtagcagctgctctatgtggaggtattaagtgttgttaaaacacctgtgtgtgtctaattccagcccaaacaagtcttcttccggctcatcaaggtggggtaagaatttacctatatggagattctatttccagtagaatgagttgtctattatttcctgtagagatttctctccctcccctctctaaaaaattgaggtataatttacatacaaaaatgtatgcatattaagtgatcagtttgataaattttgacaatttgtataaccatgcaaccaccatgccaaacaagaaaatccccatatgtccctgcctatgtaatgcccctttctgtccctctgacttctatccccattagattagtcttgcctgttcttgtatttcatataaatgaaatcatacagatatattctgttgtgtctggctgtagtgtggtgtattcttacaatggaatgcttctttacaataaaaaggaatcaactactgacaccacaacagcttgaatgaatctcttgtagagttgtgcgttgaagcttgtagggtccttttttttatattacttgcttagtcttagtaaccaaaatgacccacaaaatctgcttcttttacttgcctatcatagtgcacaactgtcaacttcattcccccccattctgtcatatattatctgtgtgactttagaacacagccaatttatattcaacttatgggtgatcatggtaatgacttttgaaaggaatttaaaattgtagaatgattttttaaaaaggaaatatgttagacatgttacatggtttctttttagtatttgcaaatgtcaggagtaaaagaagcaaggaagcagacccactctctcgtgggtggctgtccagtgggccctggatgttcatttcatgactactacatgctgtgtgctgtgcacttttcattgtcatgagagagaatgttaagaaaactatccccgcaagaaaacagcttttcttggcaagtgaaatatgacttaaggagccagaactggagacatacggtactatgaatgagagctgtgttactttattggatctgagtccaggcactatttatactgcagcatattcagcaccagattgttaaatcttaatactgaaacagtgtatcattttaatatttttgttctgtttattccctgttttcaagcattatgtcaagcattgcgcattcatttatttcatcttggacaggacgtgccctgaccagaaagtccatttcctattgctggaattttgccccatagctgtcattttgtgaggctcttaaaagttcacttgggtgcacaggtgttttctctctttgatgataatatatttttttaaagaacagtgtagttggactcacctgtattgtcaaaaataaaaatgctgtttttcttttatcactaaagcatcactgctttttatgtgtggcaatttctgacatcctggagacatgggatttttcatcgcctacaaataaaatttttgttaccctgtgtcatatgtgaaatgggtttctctatttttcttcatcaatgttacgtgtgccctgtgtaccagataaaatgggcctatcttatgaataagttagcattttcaccatatgttgctgaaaccatcccatgaatcttcctctaacaagggtattcctaaaattgctgttctacgtagcccaagcttaaaaaggatttttattattttttcattgttatgcatgtttaccatatgcagcaggaaatccacagggaaaaagtactattgtcactgtcaaaagagctgaggaataaaaaaaagaaaggaacttgagggcatctttgctatttctgatctgtggtcaatcaccgtggtattgcatttggcctgggaaagcaaccccactgcctgctgaaacgcagatatgggagcgaactctaactgcttcatgagctccaaatgctgttcgcactgggaatcgcaccacagtcaggatgtaactgcgtgctgagcccacacacaggaattttcttgtacaattcaaaactgaatcttatatttacttaaggcttacttttttttttgtctatgaaatcagcagtcctgtatatttagcatcagccttaagttagaatgtgaaacaattctggggggaaggaagtatccgtatggttttctaagtaatttaagaaacaggaaaacataaaagaactgattgtctgtgattaaacctcattctttccttcccatcttcctgtatagttaactaactcaattgtcggccagaaagaaatagcttattgcactgggttgtaaaatatctgagtgggccttggatgttgatgattgaatgaccttcttaacattgaacaaacaatgggaaggtttaataaatagcagatatgtgtttattatgtttttcttccctgtgcaggaataatcaagctgggaaggtggaaccctctccccctcagttatgtgacagatgcacccgacgcgacagtggccgacatgctacaagatgtctatcatgttgtgacgttgaaaatccaattacaaaggtgggtgtttctgaacatctgcttttccttactgtcagagctgctccgtcaatcatagattcactgcaaagatcagcatgtcctgtctattaatttctggacattggacaaaatgaaaagaaggagagagagggaaagaaggagagaaggagaagggtggcccttccccaggtgtctttatagtcacattccaactactttatgctttgttttcagaagcagtgaagtggtaacctaggggcggcttgacaaatcattaaaaatctatagcccttaggagtagctttacacagccccttattcaatgggtcctctaggcctgcttaaatgtgtagcacatagtatttgaagaataaacacctctgctgttttcacatttgtgttatgaggggagagttttgttcttgtaggaggtttaccaagaatgtcctgacataggagatctttttcttccctttccaagggccacatcaaaacaaacaaacaaacaaacaaaaacacactttgtggcctgcagagattctggggatgatttctttattttttcaaatatggcatctggaacaagatatctctctaaagaactggaggttctttgcagtcttttattgtaaagtgcctgataggtgtgatttaaggagtgttgtcctttagtgtaagtgttttgaattttccccttttgggcaatttatactttaaatatggacccccagcattcccatctgtgtctatgaatgggtgaggatctgaaaagtcattttttggttcagagagtaactctgagccattctatgagggtgagggtgggccttccaactgcaaatctgacaggggatgtttgtttacagttaaccttaggcatgcacaataattacatttgtattggggaagtttataaccacactgccatgccatttccaccagcacattggaaaaatcatattttataaaaatagcatctcttgtattgcaaatgactatttttcttggatgagtgggatgacaaactcaaaagagaccccttgggccctcgcaaagtcttggagaagcagttttacttcccttccttcacttagaccccattctttagcatttcttctgaagctcccacaagacccaagaatggctgctgcagtgtctcctcttcagtcagggaccctggttgaggtttgtgtattgttcattattgctctgttttgcagttgttcaaagttggaagacttgcctgcggagcagtggaaccatgccacagtccgcaatgccttaaaggaactgctcaaagagatgaaccagagcacattagccaaagaatgccctctctcccaggtcagtatcttcaggtgggggtctgggaaacagaagaagccattggtagactctctatcagggggttccttctgcttaaacaactgtcttctctgtcttttatttatagacttaaactgcatttgaggtgtaaaagattatgttgcttctggttgtagaatagaagttatagcttattaaccgggcatggggtagctcatgcctgcagtcccagcactttgggaggctgaggcaggctgattgcttgagctcaggagtttgaaaccagcctgggtaacatggcgaaaccccatctctacaaagaatacaaaagttagctgggcgtggtgacatgtgcctgtagtcccagctactcaggaggctgagctgggaggattgcttcagactgggaggtggagattgcagtcagccaagatcacaccactgtactctagcctgggtgacagagtgagaccctgggtggttcttaaaaaaaaaaaaattagcatttattgagactgggtaaggagagagtattaaaacattttacgtatacgggccaggcatggtggctcacacctgtaatcctagcactttgggaggccgaggccagaggattccttgagccttggagttcgagaccagcctgggcaacatagcaagatagcgagaccctgtctctaaaaaaaaaaaaaaaaaaaagaaaagaaaagaaaatagacgttttacatatacagtcattaacttctcacatatttcatcggagatagggaccagtgtctccattttatagatcaagaaacaggagcttagagaagcacttacattcactgcctaagcatactagctggctaagtggcaggctgagatgctactccccacccccctgtttcaaagtggatgcaccagattgttgttttatttggtcagctggatgagtcagccatgctaaatccatctatgcatgatttattgggccttttgcctgtctggtgtagagagatgatctttacatcatatacatttgtagaggttttgtagtgaattcacaagaagaaaatgcatcatgaggaaaagtgatactctgttttttagtgaacgcaccataaactaatacaaaccatgaaaatgagattgagaggatcaaaagaagagcagtggaggaaagggctgccttttccatttgtgttcatgggctgggactcatttttttctactgatgagataatatttttcctatggtggattggggctgctgtagaaatgaacccaggttgacaaatcatctaaagctttgaatggaaatctgtttcctggtgtgagctgctacacatgatttaagacaatgtctgttaagttgaagggaaaataatgagaaacctattacagaaatttgctgtgccatgagctttgttccagggtaagggagtctctggaagataggaaggctattgggtaagagcatgtatcctggaatcagggctggattcatgtcctggttgacaagcctctataaccttacctttatgagccccccttgtttggttagtaaaactgagtagtaatggttctgagttatataaagaggattaaatgattggaaattacataaaatgcttggcctaatgcctggcatgcaatgatgcaccataaacagtatcagctattattattgagatatgatgtgaactgaatgtgtgtgtgtgtgcctttgagggtgttttggaatttggatcctctgaagcaaagtatgctattaatatttttgcttcgaaaaaaatcaagaaggcatgcattcacgtataggcagctagatagaaaaggacattattctgaccttatgtttaggacttttcatggaggccattttaatacctacctgtaggtatgtatgtagatgttaaagccttgttacatacaaagttataaaatgcatattttgattatactggtgatacaaaggaactggacaaagaacaagttaggaaaagctgtcaataatttttcccaaatttcacaatcattcacaattaattttctcttgcattcacatggaagtcgaaatgggctttgtgtggaagtgtacaaacctctaacttgatattaccaattcagaaatttatccagggcttctgaggcatgtggaagtttggtccaaactgttgtatcatgaaaatcatgtttggttataattgtagatatgactagagaggcaacatgagtgaggagaatccagatcaggagccaagagccctgggttctaatctcagttcttttatgccagatatgtgatcctgggcaagtctgttcacttctcagggcctcgttaaactcttctataagctgggcatcattgtatttgcatgtttcacatagttcggagggttgtcttgacgttcaaatgagatcatctttaaccctatcataaaaacctctttccccttccactctctgctctcatggtttgctcacgtagttgtctgacctaaacagttccttctccctcacccttctgtttgatcctatgggttccatcacttctccatctaaaatctttttcccttgtgccactgccttgttcattctttcatcatctgtcatctaaaatatttcaggtcttcttgcctcatgacttttctcctgccacctgattctcctgtgttccttgtttataattcctcagtcactccccctacccaccctgtaggaagtacggactccatatcataaagaccatcaagatgacactgttcagccttatatttcactagagctaccttcttccctcttcctgcactcattctatattccaaacacatgaaattaattattttgaaatgtttaccattgctcaaaatatctcttgagagtgggagcaacctaactagtgtggcattaaaaatctaacaaggccaccttctgtattatcttaaaatttaatgccaagtttatattctagtccatatacctgttttgttgttttttgtttgtttgtttgtttgtttttaagacagaatttcgctctgtcacccaggctgaagtgtagtggcacgatctcagctcagtgcaactgccgcctccctgttcaagcgattctcccgcgtcagcctcctgagtagctgggaccacaggcatgtgccaccacgcctgggtattttttttttgtatttttagtagagacgtgatttcaccatgttagccaggatggtctcgatcttctgacctcatgatccatctgcctcagcctcccaaagtgctgggattataggcgtgagccactgctcctggcccctgtgttttaaatatttttaaaatggcataaaatcattttgcctgttaagttagtaatctccttctctccacatgagattggttctttagggagatgtaccttgttaatctctggctttgaaagcccctgcacacaatcctggtgactctagagtccttcagtttgacacttgcttgcttttgcatgcatgatttcacctggctagaatgcactattcttttctacttgatgaaattatctttcagattccagctggaaagacactgctagtgaagtgcctcaacctcctggttgaagtagttgctacttctgctcttagtagcctttgtaaataaccctgtcacagcacttatctcagcctgttgtcattgttacctgtcagtttccatcactagatggactgtccacaataacagaggccatctcttattgatctttgtgtccacagcattcagcataatatatattttgtatgtagctgttactataatgcaggaatttaaccttttagcaggataattctttgtggtggggggctgtcctgtgccttgcagcatccccgtccattacccactagatgccactagcatgccactataccccttcccccagttgtgacaaccaaaatgtctccagatgttgccaaaggtcccatgacaggaggagtaccactctcagttaaccaattctctgatgtgcttaatgaattaagtttaaaaatgtttcataaagtatagttttattagtatgtaaagttttattattattacagtgttcttggcagttccaaaacattttgaactagaaacagtgaatagagtaatttggtgattgatgcccagcacatttcggttaaacaggggctcatatctgttgtttagatttgggtgagatttgatttaggcttctgatatgttgtgtgattatggaaaatctcactgggatagctcttttcagctatcatggatatgtaatgtggaccctggcattcatcctacagccattatccttaaacattccagattattcacttaaattgcatagctagattgtaatttagtgtggagataagcgcgcctattttgttggtagttgtcatagaacagatgcatgcagtttttatagttcagcctgtataaagtaaaaaagaatgcatttttgttctaagcaaggtgaaacagtaattcaacagtatatttccaccagcattcctggagtcctgattaagaatcaggcactttgcgatgggctggggatataacagtgaatctgagggaggaactaaaaccctttcaatataggaagaagagagtgaggcatccagtactactcaccttaggtgagaaaggtggcttgttgggtttttcaaaaatagactcaactcatgagtaaaagattcctgttattgaaataattcttccttattacccctaagccaaaccattttaggtgattcttcacttgagtttggcaattacaaagggaatgattcagtggatagttcatactttcttgaacaccccagtggtctgaagttcaaaagagcagttttgaaggtggaagaaaggtatggagaagtccataaaagtgccacaattgtagcctgaggcatatatatatttaaaacagggaagtaatgatttagccgttctctgtctggccagatgcttggaaagtacagattgtggttgtgtgtctgcgtatttatttttgatttcacctttcaaagtgtgtttaagtgctggcacctcttccttttcctctgatgtctctgtgagtaaccacttgcagcctctttcctctgccactggctgtcctgagcatcctaatttagcagaccttaggcatcgtcctcccttattaaatagtccttagctgttccaatttgaaaaccttatgattgcatctttctgtggcttacttattcttacttgaggaagagttgaaatacctaaggtcggcttttgattgcaaaaccccaggtgctcagggttttgacccatttaaataagtagaggtaccagtacctgccttgtgcatctcataggtgatcatgatgttcaaatgggatgactaaagagacagtcttgttaactgaaaactgtggggttttttttttttttctttttgcgacggagtctccctgggttgcccaggctggagtacagtggcatgatctcagctcactgcagcctctgcctcccgggcagaagcaattctccccgctcagcctcccaagtagctggcattacaggtgagcaccaccatgcccggctaatttttgtgtttttagtagagatgaggtttcaccatgttagccagactagtcttgaactcctgaccccaagtgaccctcctgcctcggcctcccaaaatgctgggattataggcataagccattgcacctagcctgaaaattgtaatgaaaagaacaatttgcaagtgcatgcaacttccaatgtgctccatctcctaaacatattctctgtgactctagacatgttttcttatggtaaaatatacataacatgaagtttgccattctaaacgtttttaagcttacaactgagtagcattaattacattcacagtgttgtgcaaccatcacccctgtctctttccagaactttttcaactctccaaatggaaagtctgtaacctttaagcaacaattccttattcccctctcatcctgacccctggtagcctctattctgtattctgcctctgtgaatttgcctattctacctaccttatgtaagtggaatcatagaacatttattttgtgctggtttactttacttagcgtgtagacatgtttttgaagcagctctgtcccatggtgctggctgagactttgttgctgaatatttgaggaacaaaatgactgactaaagctattgagctgcagagatgttactagatttccggtgtgacaatggtatggcgttcatgtagtgtgcctttagaaatagattgtaggataattatttctgtcatcctgagcaagccttacccatttggacttaactcatatgtacaacatgccaaaacaattgagtagtgaaatcaagcagccaattgggtcagcagaaaaaaacaaattgagcatgtgctcatcatatatagtggctgatcaactgcatggaccagaatcatggtaactggttgccaactgtccgtttaatttaacctaagttcatgtatgtagtggggatgcatcatgtcttgtgttaaccagttgccaactgtctgttttagttattttcatgtgaggttattttagtttgtgtcccaacctcgtggactcatgctgaagaaggctcacaaatgacagcttgaaaatattcctaaccaagggattgcagtgaccataagaaatgattgcacagtggggagaaagatgccatttgctgattccacatcttgtgctaggccttttacacaaatcatctcacagaagaatccttacactctctgatgcaggagacaatatccccaatcacaggtgagggtgctgacattagagaagcaagccattcagcaacagcttaggggaagagctctcaaatgtagtgttttcatactccaaagttcagaggaagtgtttctttcccttaaaatggcagcagttttcaattctgatgttatagctcagaagtggggacagagagggatagtagaaggctgccaaatgacattaaatgaatttttttcatgacaaagtaattcctcagaatcagtttttttcccattacctaattgaagtatcattatattctcatgtttaatatgttatttagcatatcaccaagcagattgaaaaggccgaaaatgagcaaagaatgcacatatcactcactcattgcctgtctttgctctctccctcatgaagacatagaagaggaggctaggggatgcccctcctcttccctcagacaggggattctcactgacagaatatgtaattcttcacattgctttaaaaatgttcttcttcataacaagtgtattatgtgttttcagcttagctactcttagtaccacactgctgttcaaacaaataaatcccaccaagccaagcagattgtagtgaaggatatccagttattttatcttttgttttattttgggaaaaggggatgctcagatctctgtttttctaagtgtatcttacaaatcattttaacctgtgtttattattttgctttttcctattaagttttaaattccctttaggttccgtagttttcttggattctaaacttcttagttaacttgtataaggggcctgagatcacagcttcatgttttcctttttttgctgttgttaccttgttttttgttttgtctaaagtattggttgcagcatcagctgttgagcttggggtcgctgatggaggtggtggtgaatgtttccttccattcattcgttagtctcccttcttaagagatccatgaaatactggtccactaacagagtgtcttcatggtgcctcccagtgctatttgactttgggaaagatgctttttattctgagtttctggggcctcagtttgaaaatggaaccatgcttataatcatatgtgacatctattctctgggctagttgaaaaacaaacaagtgagttaaaaagttgtttcaggaacctaaaagaaaatctatttttagatagatcaatctagctatcataagtattaaataccaatattataaaatttattctcttgcagtttggcttagagcaaattcaagtctgctagtaaactttggaataagtaaagaaaattctaatacagtttgatttctgaaataccttatttaaaaaaaattccagatattaatggccaactaaatgtcaaattgactacaaataaggacacctatactttatctcccatccaaaaacctttatacttaaaatttcataattaactacaatgaagtcagaaattttcaagtttctgtagttggaaagacattttaaccattttaatttatcttagaatataatattattcataaattagctttgtctgtggccactgtttatgtggtggtgtttgtggctgtgtctcggtatctgagtggggactgccgcagttgcccattatacgtgtaccctcatcctttctttttcacagcccaccaccatgcaaagcgatacatgcttagtaaatgcaaaatcattttaatattagccttagtaaatcatagttcctcggtttaagtgttaaaaatagcaatacacatattttctgggttatttgtattagtattgctttgtataaacagagatactcgagttggttgcattctggattgaaaaagttgactcagctcttattcctttatcaaaaagatatggatcctaacagtccaactgtgcggttgctttagaatgactggaaaacataaaagagcaacataaactgcaaaattatatgtattttaaaaagcaaaaaattgaattagatcttttttggcagggtggtaggtgggaaagacattaattattactcatcccattctgcatcaactgtatcttatcaggtttaagatgctattgattgtaagatggatctctatttcagtgatgttgaagtataaaaagtggttgaaatacggtaaatatagattctcggtgtcccaggacctttagagaacattgttttctgtagagtaatagcacatgctgggttcatgttagcccctttcaactttatgtatcattaattaagtgttgatgttctagatatttaatggacactaacatcaagatgaccttgtggtatgtgtccagagcattctagtgaagcctagtgatttagcttcagattatgagaatttaacagtctaatgtagggttagaaaatattcatgaaactggaataatcagatataacatggcctttcttttaaaatattcccaagatatttttatgtcttctgattttaaagtcttctgaggatggactataacaattcttatcagtaaaaactattttgggtattagttctatataaagacctgcagggagttgatatgaataaaatgtgtcataaactcaaacagacttttctggtgattaaagattctcatctaggaaatttgtttgctactttttttttttttttttttttgctcagttcatagttgaaacctgtttatgtttttgttatgtgatcagtagaggtaacaacttatttatgattatctgggacagaaaacaaatctaattgagtcagggtagccaacatctcctttacaaatgagttatatgaaatataggacctgccgacggagccagtaggagcccagatattcatttccttgccactctgccttgtgcagggtcaattgaagatatagcaggagcaaggacaaagagagggtagagagtgaggggaatttggattatctggggccaaaatgatgcagtcgtctgggcttgtggcctcgtattatgggccaggaagaattgaggaacagtgccaggcagtaattagacactgttcgttttagttaactttctagaccatttggcaatacagagtttaactctgactcctgccatggctgtgtatcctgtgcctttccagaggataaattcatacaaataagatagagagatgacaagtacgtttgtggttattcacatataccagtatgactgatgcatctattattaagctactttcatgttaaaaaaatttattactatgacatttcagtttggcacttttaaatctcatctctgtcccttttcctgtgttaaatttcagtgactcagatatcccacatcagaactatgtgagacacgagatagaaaaaaaaaaaaatgaaacagacatagtcactgtcctcaagggtctcacagtctaggaacagagtgaatctcagccagagcgggagctagctcagctagttagggaacagccgtacttggtcgttaatagcgcaaagcagaagactgtctccaggagattaggattccagtggtcatcctataaggcaggagacaaggcctcataggttctgtgatacactccgatgatattagctctttgagttcccagtgctgtgttcagaccttgggatgaaaagagttatccttactatcttccctcagagaaaagaattgtcatgtttagatcagcaactggggagggctaaccatctgcgaaagaggtttctgtgaattgaattaagaaacccctcccctaccagtactgcatagtgattaaaaaagaggagtctgttgttttaaatgggagtttatgaaggtctgtctgctggcattttaacctcctgttaaataacttgatttattgttactctttttatctctattactttgtagaaatgtcgttagaagttctaagatttctctgaactgttctatgtctggggctaactttttttgagaaagatgagatttcaaggcaagatataaaaccttacacaggtcatttggatctcttgagttgtttatgcacaggacaaaataaaaaataagaaataaaatctatgtataaaacatacacagtcatttcaggtatacattaacatctgccacaaatgttggcccaaacatactgtattaactgcatctctgtaggaagttcaattcaaggtgtgtaattataattttaacttttcagtgctatgtcaggctatgctccacttctcttttaaccccaatgattaatacacacaaatcagctgagcagttgggctgaggaggatgagagcaaggaagaatcatgcacctaagcactcagaaagtttgagctttggttcattttttattgaaacacagtacaagtattgtgtttagtttcccctgctctaaaatagcactgttaattttttcatttggtgaattttcacacaagttctaatcacacgtttctataaattatattaatttaacttatttccctaaatgttgttctgcagtgtgtagcacggatgttctcagattcttggctgtgtaagcttgttgcagttggaagcggaacagaaacatctgaaaggcattatttggattacggatgctggagcatctgatctcaccttttgctctggttcctaaatcacaactgttcttcctctttgcatttaatctgcatgttctgtcccctccattgttgacattgccccagggttggctttttggagaaagcactatcattgtataaattaaagggatggtaaattcaggtaatcgtgtttgatgttaatagttcagtttacaggagagtgactgttttaagtttaaaagaaaaaagaggttagtgcaggttataaagtgctctttcttgtccctaaaaagaagtagtcatattttgaaaaaataactataattttttttttcagagtatgatttcatccattgtaaatagcacatattatgccaatgtgtcagcaaccaagtgccaggagtttgggagatggtataaaaagtacaagaagattaaaggtaaactgacttttttgtttgtaaagcctgttttcagtttctgaggttcatgagttgttggttgtttggaatttatgctcattttagatacaatttacgtaatttttttacaaaggtgagatctttaatattcctgtcatgagatcctagttggctcccttaaaactaagaagatatttgaagtaaaagtaaaattagtagcaccatatgttaagtttatagttttcataagtgatacctgcaaagaccaaaatcctttagaatggaaacttaaaagctgtcattctaggttaaatcagcacttatagtttgggtactgattaacagatactgttggggtatcaggatgtctttggtcagaaatggagtttgatgttgtgttcctgtgtcgacgattccagagcagtggtgaaaacacgggctctgcattcaggcagacttgggttcaaatctttagcttctacattctagctgtgggagcttaagcaaattatttaacttcaccaagactcaatttcctcatctgaaaatgggaaatcatcaaagtacttaggtcactgggtagatgcgaggactaaataagacaatactggcacaaagtaacctcttgacaaataatagtatactactactaataattaatagtagtagtcatactagcagtaatatattacatgtagaattatgtttgggcctgaaaataaagttcctttgtgtagtaaatagcatgctatttagatcacctagacttttaaacatgtcaggaccatttcaaatatgtcagtggtggaaaaattcttttgttttcactccattcagataaatgttacctaccagggtccctgaggggatttggggaatttcttgtaacattggttttgatggtccttccagtccatgttttgcataagtatgacatatttatcacactttataatatgtattcatagccttgcttactctgcccccatcggaggggcaaatgacaatttatggtgggtaagtaaaagtaaaggatgaatttgtttcttttactacttgcagattttctcaggggagacaggatgtcaaagtagtgcttgttggctattgagtgtttgggagatttttgacaaggttgtcttttgaagaaatgaagtttacaaacattggcagcacatttctgatcacaaaggaatgagagtgttttatgctaaatatatgttttataaggcaagccaaaatattgagctacccaggagaaattaagtacactgaaaattgaattaagatccatttcttttcaacagactctaaaattcttaggacccgttagatcctggtttgggcaaatgctttcgcatattaatattcacccttgtgcaatataagatgaataaccccttctcattataagacatcgatgtgtggctcagaaggtttcttttctgtaagtgttgcctccaggtttttcttttaaaataggattgttaaagtactttgacatatcctcttcggctgaaaatcaaaagaatcatgcagcttcaaggtcatttgttagatcccatttacttgctgttataagagaaagtaagagagtgtcctcttttaataggctggagtgtaattccagattcagaaagattggaaactcttcactctagtgttttcagaattgccactacagaatgtgtgtgtgtgtttgtgtgtgtgtgtgtgtgtgcattcgcacattaacactcatatcttctacttttcttttttctttcctggagctttaattcttcaagctgtatcttttttttttttttttaaagatagtaaatgcacaattaaatctttaagtgctgtaaaagcagactgagaccttgatttcattcagttggtcaaggatccacacctgaagaggctgtcagacactgtgtacacatactattcaaagagatggagctagtcattgctgttgaaaagtgtgtgtgtgtctgtgtgtgtgtcagtaggaggagaaaagggaaggttaaggtatgtgtgaagtaaacacaagctgccataaaacagttcaagtggtgttgattcatcaaccaagggagtgggaggaaaaacaaagaattcatgacaggtataatggtgtacagaaaataaacacccagagaagtgcgttttattaactttcgaccctcagaaaaagggaagtgttggactgaagcaggcatattttatttggtagaagcctttttctatgaatagatgttgctgtgggagtttctacctagtaggactcatttctcatgggaaagtaatgatttgatttgtaagagttgtgtccctgctttcaaaatgaaaaaaaggcaatgaattccaaatttggaaaccagtagtagtgaaaccagaattctaccatagggctttttctgagaccccagaagtcagagttccatgtccctctcagcctccctaccttccatttctgcctcaaagttaccaatttacatgcacttctatgcactattcagcttagaagaaaatcttaagtcaacttactgaggtcccaaactaaatgcaggctacattgttaaatatgtttcctattatctgctaatgtctgttttaataaaacagtgggaactaagtggttgcttcttaatcaaaaacatgatttcctaaacataagctatgtgattctgttacaaattgccacatatagatctcctaggtcaaaatttttttctcttctcatagaaataaataaacggtaaaataatgatatactctgaaagatcaaagtaaatatgactaaaacctggcaaaaataaaagtctactggaaggacaaaaaaaagatcagattgcaaattctatagtcaatgctgaaataaatatgagaaaaatgaacaatcaataatttgatatcattaaaaacagatgtaaaaactacatacaaatggaattgtctaaattttgaagtaaacattttaatgtgcattttttgaatttgttgttatttcagctaaactatttacacttattctttagaaagtcctaaattggtttggcttagcatgttaactttattttccccagtgatcacagcaaagcacattctgtttaccttttttctttaatttcaaagacaatcatggttgacacagacatatttgagttaacatgagcattacttcagaatagatagggagacagtgtgtatactctggtttcaaggtctaagaccatgaatctgtttcccaggaatatttgacattgaagaaaatggagtgggtaggtagggtagggtggtaggttggtttagacagcattttttttttaattgctgatcatcacataccataattgcttctggaccagattttacaatgtagagctcataagctccgaagtataagaaaaaaaaaagtacattttatctaaaagcaaagaaaaaagaccaatattaatagttgtttaatgttaggagttttagtattgtacatgagattccatagacacctagaaacattcatgctattccaaaattatttttaaggtcttgggattatgagggatttacccaagtagttttttcctaagttctacacattttagtaaaattttaattttttacacaactttttttgtctgaactcttgatgtgaactttccccatcatttttatgaaatgaagtggcaatcatatatgtagtagcactatcagttttactctcatggcaatctacttttggggggatataataaaaataagaaaacgccttaataaagaatcttttatatattttaaatgtgtcctaattaataagttacaagaaaataattttatatctaaagtgtttgtcatctggtaccaaaagcaaaataagcagtcatctttggtgaggtcaatcccaattatttaatatgcctcaagaattgaagggtcattgaaagtttacacaaatacaggtggttattataaaattatttgtgttataaaataataccattagaatgagtggacctaaccaaaccctgtattttggccagagtgcaaaattatccccatcacttttcttttctcagtcattgcccaagaaccgtctgattgttagttgtcttaattttatttgtttatttgaacttcttttgccagatattaaaaagctgggagaaaagaggattttaaaaaccagtgttacttccccaagcctggtttattctactaatcagtattttatctgaccctgtctgatctagtcttgcaagatcaaacgtccaggccagcaggcagacagtaaacaaagcccatgaagggtttcggtaaacacaaagattagatgttgaatgaaaattaaactccttgaactagtcctctgtactaaagtggttaagtgggttgtgattaaaagaaataagtaattatgatcattatagctgaaatgatacaatgttaccacatttaaagcacctcttgtactcaaaaatgattgtgtcatttacaaagtggtgccttggagttgaatagagaaatcaatgtcccctgacctggttccataaggcagcccttgcttagccatggtggtatcagtggtcaggacaatgcctttaatcaactcctggtccttctgcctctgctgttgtttaactctgatgaggtaaaagtaacttacttttgtctacctaatttttctgtcatgagagaaatttgctttcagcttcagatctaaatgaagtgttctgtaaggaagtttgtctgccttctgcctatgttgtaagtttgtctgccctctgcctatgttgtatcttgttgaaagtaatggcaggataaaatcctttgaatattgtatacatatttacttacgtattttatactgacaaattatagctgtttacagggtacaaagtgatggtatggtttttaatacaacgtgaaatgattaaatcaagtgaattaacctattcatcacctcaaatatttgacattttttgtgatgagaacatctgagacttactctgtgatattaaaatgcacagtactcaattattagctatattcaccatgctgtacaatagatctcaaaaaaaaccacttgtttcgcctcactgagactttgtaccctttgattatcatctcactgctcccacctcccagcctctgttaaacaccattctactctctacttctatgaattcaattgttttaaattccacatataagtgagaacgtgcagcatttgtctttctgtgtttgacttgtttcacttagcacaacgttctccagttctactcatgtcgtcacaaatatcggattcatagaaatagaaacatcatttctactgtcagccaccttttatctcaccagtttttcaacatataggagagccttgtgtgttttcattgtgatagtcactgatagtatgcatagatcacctatgcttgcttggccctccaatggaaagcttattggtagtttaagtggaaaaatggtgcgtggggaatgtcttgagcactcagcttagacatggactaattccttgcatggatcttaagaagctcattccagctgtactgtaactgctttgttgggctgaatatacttattcataaatgtttaaagatataaaaatgtttgttaataatatagtttgtagattaaaagaaatgagcttgcaatctactcatatttgtactatttctgatgttattttaaatagacattaagaaaggatgcaaagggaaaaatgatctatttccttacgcccctccctgcttctcttgcatctattcatccatccagcctcatgtatacctactctttggaagaagcataagacatagttcctgctttccaaaagcctacaatctgtatgaaatgcttactttataatataacacatatcttgtcattcaaaaacaaattctagcttctattttatatataatacctggcaggattctaagggctgggaatacagtggagagcattacctttttcttcctcacaagataattgtagtcataattaagtaaataattttaactaaatgtttagtgagcacttctgctacaggccataattaatgctagaagcagtgagaaatgtccatacacacgtaagatatacttcctacctctggttgtgttgtccttaacctggcaggggaagcagctgtataaatggatctggtaaatatatagtagtgatataaactagtgtaatggtggcatagaggaaagtccggaaactcttcttgctagatttgacgtggggtggggggtgggcggttagggagagacagcgcatgaattataccttaaggacaagtggagttactgcagcaaggaggaaaagagaaggaggaatgttttgggcaaccgcatgatcatcagtacagatgcagaggtacgaaagagcattgcatgtttagaaaattacaagtggctatccagaatgtctagaatggcagtacatttatcctgatactataatataacaggtgctcagaatggctaagcttttgatcagtgaaaaggcaaaggtagaactagctggatatagggagggtagtgacaccaaatgttgatagaaatggttgggacctggctgggcgcggtggctcacgcctgtaatcctagcactttgggaggccgaggcgggtggatcacaaggtcaggaggttgagagcatcctggctaacatgatgaaaccccatctttactaaaaacacaaaaagttagctgtaatcccagctacttgggaggctgaggcaggagaatcgcttgaacccaggaagtggaggtcgaagtgagctgagattgcgccactgcactccagtcttgagtgacagagtgactctgtctcacataaaaaaaaaaaaaaagaaatggttgggacctggctgggcgatcatatttgttgtaacaatgaaaaataaggctgagaaggtagagaacacaccttaggggtctttgaaagcccagttgacgtattttgagaatccttgaaggtttttcagcaagagagtgacatattgaaaatgaggttttacgaatgattcccctagacaccatctgaagctgtatgagggtgtgagtgggtgtatggcaggaagggaggtgggtgggagggggaaggctggtgtgtacacctggtggaagtaggcaaagtcgaacctattgcagtaattgacggaaatggaatggtgagggaagtgaggccctggctttgagtggcacaagtgagaaagacaggaagccaccaatgcaagaggttcaagcagaggagagccatgagacttggtgagagtaagtaggggtatgagaatgagaaagagacatgcaagcagaatccaggttttgagcttaagtgactcttgatggttgtgacagaaataggacaataccaatggagacgaaattgctgatacctcagtgagaattttgacaactaggtagaaatgtccattaggctgtttgacatgtgaaaccagccgactaaaggacaggatggagaataaatttttgagcacttttttggatgacaattgaaatggtaccaaatgaacattccttaaagaggagagcaagagcgggagagggctggaagctttgagaggaaaagggccaggagttaagaagatgcagctagagagagtgaggtgtcactgaagccaagggaagatgagttaccagggggaagtgttatcaagggtgcagtggaggggcaggggagaggagagggaattggaggctcttggctttggcagaaaggataccataatgacattggagggagctgtctctctgaagtgtgagaacagggaagcctatgcatctactgagggaggggtggcaaggacatgagaggaaagagtctaaacgtggctaactgaagcatgagggctaagtgtaattatcagaaagaggatggagccagcagttttgaagaggaagaggagtgataagcaagagcccaccaactaggagggaatggatttgaggctcagataatgcagtgcctttgaaagaaagagtaatagtgatgttttcttcagaatctgggagaagggcaaggagatgtgtaaggagggaaggttctagagatggagtggacggtgaggatgggcagctcatgccatgaagtgtgaggctgggctggcatgacctcctagcagtgaaggagagaatgattggcatgggggcttggtggtgagaacacctgaaataggatctggacagaccatgtctggggaacaaggagggagtgtgctttagattgctcctagtttcagatttccatttgtcctgcccagaaacagaataaaaaaactcaaaaacatagatgtgatgggggctgacaaagaatctacagaagtgtgaaatgagaggctttgtgtgtagaccatgaaatgcccagcttatttaaaatctgatgattgtggggacatcctcttctactggggagaccagcaggtgaaaatcagagaactcttttggtttcttgatcaattaaataaagattattacctaattttccttagacgattacaaggttcaaagctgaaaagcacttaagctcataaggtgcttgaagcactttaactataaatgctatgtaagatactaggactgaaatcacattgcctaatgggagacagttatttaactatttgcctgactgatgaatggccttcattccaccatttgtgagaatttgagattatttgacccttggagttctgaactcccaagggaatagacatgaatctataatcatctagagtacaaatcagactatgagttctaacattgggcctttcagggtatcacctttctaagttttatgtaccatagaaattttgatttttgactaatcccccttctgggccaaaagctgcttgaaagaacttcagaggtagaggttttgggaacacaggaacatatccattttctgtcctccccagagtcctgtgagcatgaggccttaaacacagtgaatacttagtaaatattaatataattgaatgtaatatagatgaacttatttgaatatatgcatttagaacagttttatttttacacatattatatggtgcactgatcttatttgctacctgatctgtcaattgagagaaaaaaaagaaagaaaaatctttgcttgtttagttcatgttgcaaatgtccttagcaaatgtgattggttagaatcattctatgtttctactagttattgagctaaagacttaacagtagtcaattcagttgaataggacagtaatacctttataaagtacgaattagagaacatttgtgtagcctaagataaacatgcctttgaggttttcacagctagtttattgagtattttcctcaatataatggcctaaaacatcaaagtcctataaaatcacagagactggtcagaggaaaagaatgaatcatgaattgattgttttctttgattaacttttcttcaggtaggttgaattaaagaattaatacacatggaatgccaactgacaaaggcagaattttcctaagcagtaatgttaagtttcaacaatatgatctttttttactatcatgtgctgaattcaccttagaaattatagttttagattaaaataaagaataaaaatgaagatattattagatataagcagttttaacctatgtagaatgttataggaatacttgaaatgatcaatgatatcaaactgtgataaagcattgtttgaaaccaaaagggacaatagtgttctggtacagagggtggagactaagaaaggtagataatgctcactttttccatggaacataatgggtcctaggagcttttattagcaaagaaacagaggtgtccacatttgagttactttatggtggatatatgtttctgtggaggttaatatgatggaaaaaggaagttgataataaggggaaaatacacctaagaaaaccagtcatatggtattatcacaatgctggctggtaggctttgcttatgggctgttttattaggagttaacaagttggctctgaatatcttgctctaggcagggactttgcaagcaagttctcaacccagagacaaattctcttgaacaaatttagagaaaaacaaaatctttgggtttggtggcaagttttttgttttttcttttttctttcttttactcttcagctctttcaagctcaataatttttttaaattatatttggtgaactcatctggtagttttatttgttcgttttaatggtatgggatttatatctgagagatctattagctttggctactgcaatcatgtccatctgtgtttgtattaacagaatttttttttgtataataaattgaccttatacctccagttattgactaggagagaataaaccagaagtattttcagtgactaggcatattcagtgttggcagacgggatgctattctggtttgttgggggaaattagcattatgtttaccttttaaaaagattttaacccaatgaaagagtttgggtggacagtggggttgttgaccattaatgtgtagcccagctgagtgaaaggagacaaaataagtatcaggtggaagcatatggaattgccatttttgtaggtcaaaattgttacgtatcgccaatttcatatagttcaattatatgtgaatttgtgattgcccaagattctcaagctgttatattatgtgagtgtgcatacccagtttcatttcttgttggttacttgtttcaaagaaataatttctatttatagaatttatagggtacctgagaaagctctctgctgtgtgattcatatctttcatcagtcaggtgggagtccatgctgatgacactcattttgggacaaaagctttggcctcaagaaaaataagataatgggaggggatttataaaaataaatataatcactatatttatatactgattatataggcacatatatatatcttacagatgactggaatgaattgctaataaactgacaaaataggaatttaaaggagctatcttttatcatcaaatagaaatgcactttaaatcataggcagatgttatggacccatctacatgtggcagacagttaaagtgtctgaagcaaatatattgatggagttttttaaagttaagattattcagtactgtatctctaggggctgccatcattcctggcacatgatagttgattaataaatgtttattatatgaattttaatgtaaataattctatttaagtgactagctgattcaactgttgaggaatcaatgatttcatcactttttgaattgacagtcttttcagtgtatgttacacaaagcatacagtgaaggctgaggttgagcttttaccattcagatgacttatccatccttcctgtcacatacgtgtgccacgtgcacttgtgcacacaaacatgcaaatacaaagtgaaacttatcggtaagaaagttgattgctcctgacccaaatcctaaagctattaataaccacatgccccaaactgggcagttcatcttaagcagcggaatacagactgcagggtcctaaaggcataggtttgaattcagaatcttccattaacaggtttgtaacatcaaacaattatgacattaaagtcaaataatgacattaaagaagccaactgagcttcagcttctttaataaagtaggcatcttaatatcaatgtcatagaattgttgtgagagttaaacgataatgatgtgtcagggatttagctcagtgcttcagctactatataaatggtggggcttggtgttacctgaaatgccaatacagtttgaaaaaggtatgttagtagtaaaaatatgaaaattcttataataaatatattttttctaaagaaaatccattaaaaagcacttgtgaaacatttaggctttagaacttgactttgagttattcacaaaaagaggaaaaagtagccatgtggtttgtgtttcttattacgaggcgagagccagcagccttaatcattttgaatattcctaaatatttatctgcatttggacagttattcgacctagagcacattttttaaatttctctggtattagacaagatcgttgtctttaaaaactgggcttcaaggttttagagcataaggtggggaagcagagaacctggagaggaggtttgtaaatttaaggcattcatatgctcgagtatcttttttctgtgctctaatgtttgggtaccaatttgaaattgttggtttgattggcaacatttttactaagagtgccaaaagcaagccagtgtcctttttttacatttgtagaatcacttccagagtactttctaaggttgaaagaatcgtagagaaattctgccgtcgtcttttctttctttcttttttttttttttttttttttggcttatgttcttctacccagggtttctaggagaggttctggggaatactagagtgttatcttattaaggaatccattagcactcattcatgctaatccatttacatttgcataagcatcttaatggcttaaagaaaaatccataggccagagattctggaaatttctcagtgcaaaaccttttacccaattcattgctttctacccattataactatggacaaacccaaggggctgtttcacaaaagcaactgtgttaaggtttacagcgtgaaaatactacaataatagctttagaaatattatctatcttttttgcagtattgataaacttgcaagagcaatactgtaattaatattgctattgccactatataaacaactatttttcttgtaatggtgagtttaatagagatatctaaggaaagtcttaaattcctgctaaagagtaaagagcagaagcaagtattctgagaaagataattgttttaaaacggtacttttaaagatgctcttagataagtaacctggaaggttactttaagaccactttataggtaattcttcccattttacagataatcctcagatcactcatctagttataacccaggcctttgaaatttcagtttgcttttctttctacctttcctatgccaccttgctattattggcaggcatctgtgccaatcaggtgcttcaccttttgctcaaaaaccttcagaaactatactttggggcactaagtcattggattatattttgagcattgagattttattatatttactttacataattgcaaaagaaataataaaaattaagtgccagaatataggagtgaaagactatatatatatatatatatatatatatatacacacacacacacacacacatacatatgtatatacatacatccttgtatatatacacatatatacacacatccttgtatatatacacatatatacacacatccttgtatatatacacatatatacacactatatatatatacatatatagtgtgtatatgtgtgtgtgtgtgtattattttattttttgagttttgaaaatgttcttgtaacaacctaaaatatataaatatatatcagggatttatgttatttaaaataaatacctggcttcctggatgtaccgtaacaagtgtcttaaataagatttttggaccaaataccttttaattgtaatgcaggtaaattcctgagggaggaatataagtttctcatctatgaataaccagccacaggcagcaattgtgagcatctgaatagctaatggtcatagagtgctcttggttagagcattgtcgctgtgaacttggtgaggttttaggagttactgaaattctaatatagggctacaaaggccctacctactttagagttaaatggaatcccagaagtttagagggtggttggaaaatggctgcccattccctgcagttttcactcagtcccaggaaacttgaaggaatctgcaagatcctcttagaactctgggtttctcagagacctgaacagactccatatctgaactgtttatctggaaggtccctggactggtacctttccccagatgttggaatagctaccaaaagtctcacagctactggacgtagaagcatttgagcctcccttgccttgacggtttcttaaaccatgttctgtttggggacttacattagaaactggggacatcattcctttccaggcaattccctctccagtgctcaccctcaaggcttcagccacagtagaatcaagttcactgtgaattaaattgcagctctgatttaaagccctgggagcagttgtgagttatttatttatttatttatttttgagacagaatctcactctgtcacccaggctggagtgcagtggcacaatctcgactcactgcaacctctgcctcctggattcaagtgattctcctgcctcagcctcctaagtagttgggattacaggcatgagccaccacacctggctaattttgtattttagtagagaccaggtttcatcatgttggtcaggctggtctcgaactcctgatctcaagtgatccgccctccttggccttccaaagtgctgggattgcaggcatgagccaacatgccgggccagcagttgtgtttttactgtctctttaataagtaagcgtgttgcctttatcagaatattttctgttgtgaatgtgaacattgctttcaccgtcagagacagcactaccttttacccttcattttttccaggatttctgatcttctgctaaatactgcagggataagatggcccttagggccaaggtgatgtctttggtcttggtttagtttaagacagacttaacatgatgttttccattacacagtgaaaaaagcaagaacacaaaaccaggcactgctgttaggtctgtgtttcagacattgtgattactttcaaattattttaaaagaaagaagggaaaggaagggagagaagggaaggagggagtaaagggaagaagagaaagagaaaagcaggaaagcaggaaggaagggagagaggaaagaaagaaagagaaaaagaaagaacgctcaggctcaattttctgatacagtctggcacatcctgatactccctctcttttttaagcatctgtgcttcacttgctgtgacttaagaggctaaaaacgttattctgatattatttttatgagagtggcagcaagaactaaattaaaatgttttcaatttaggtaaaatcagccaggcatggtggctcatgcctgtaatcctagcaatttgggaggccgaggcgggtggatcacttgatgtcaggagttggagaccaacctgggcaacgtggtgaaaccccgtttctactaaaaatataaaaattagctgggcaccgtggcacatgcttgtaatcccagctactcaggaggctgaggcatgagaatcacttgaacctgggaggtggaggttgcagtgagctgagattgtgccactgcactccagcctgggtgatggagtgaggctctgtctcaaaaaaaaaaaaaaaaaaaaaaaaagacaaaaacgtgtgtaaatggtttctgaaatcgtgttctgccttggtcattgtagatgcatccttttgacagcatttgatccttagtcattcttaaagtcgggatgataattttttttcttttttcattcttggtagtaaagaacttggcttttactggtagaactgttaggagctgaaaaacataaagggtgactagtctcagaggcagaattttaaaactggtagcctatgggcagatctggttttcagaaatgttttgtttggcttttattgtattttgaaatggcattagttgctaacacttaaaaattaggaatatcatgtaaaatccagattttttgtttttcaaaaaaaaatctaaagaaatgacaatataagaaagacagaaactggctgaggttaggtagtggttgctacctttgtactggttagactttccctcctccacctagttcttctgcagctggcttttctggctgttatctacctgaacaggtaggtatttgtgtttgcaatgtcttcattaatgtttactgagtagttagtacttcatggtgttactacggatgtaatatgttgctatgtctttacaagatacttccatagttgctcttcttaactacaagaatttataaggatccacctggaaactcataaggatagaaagaatgattatatataaccttaaagaatatggactgacattattcagactcttactgcaccaattcatataggtttcatggagctttgatgtttatgcttaattgtgtacatgattttgactaggtctatgaatgaggtatttttaaattatatgatttagatatatctcaagaaaataaagtcactcaaatgtaattaaattgttgaaaaatgaaaataccaaaattttggaaaattaatgtttggtcaaataatgcattctataggaggatggttctatgttttttcagtagaaaatgaaatagatggccaggtacagtggctcacgcctgtaatcccagcactttgggaagccagggcaggtggatcacctgaggtcaggagtttgagaccagcctggccaagatgggtgaaaccccgtctctactaaaaatacaaaaattagttgggtgtggtggcagcatatgcctgtaatcccagttactcggaaggctgagcacgagaatagcttgaacccgggaggcagaggttgcagtgaatggagatcacaccacttcactccatcttgggtaacagagtgagactcggtctcaagcccctccccccaccaaaaaatgaaatagataaaatatttccttattaagaacctgaaaacataatttaatatctgaatttatctttactttgactgaattaaaagcaaataaacaagcaaaagtgaatcaaatatttaactgaaaccaaatatttctgtctataaaataagattttactgtggaatcagttcatggtctctttaccttttttttcagtgaggaaattatgatgttaattcctgttctatggaaactgttagattatgttatctgaaggctcctaaccatttgcttggtttgattttaagactatgtactttaaagtttaattaatacaataattgaaaaaggtttgcctttagaagatgagtaaaataatttgttttcttaaccttatgaaggaaaggtgatacgtaaaacaaatgaattacactataaggattaggctgggtgcaatggctggtgaggctgaggctggtggatcacatgaggccagaagtttgagactagcctggccaacatggcgaaaccccgtctctactgaaaatacaaaaaattagctgggcatggtggtgcatgccagtaatcccagttacttgggaggctgagacaggagaatcacttgaacccgagaggcagaggctgcagtgagctgagattgcgccattgcactatagcctgggcaacaagagtgaaactctgtcttaaaaaaaaaaaaaaaaagcaagcaaacattgtaaggattaagttagaaattgagccctaaaagaagttggaagtaaactcttgacttatttggaagtttataggaatgttaagcaagaaatcgggttttcttttttttttttttttttttggagacagagtctcgctcgtcactcaggctggagtgcagtggtgtgatttctactcactgcaacctttgcctctgcctcctggggttcaagcgattctcctgattcagcgtcccgaatatctgggattacaggcgcatgccaccatgcctggctaatttttgtattttaagtagagacggggttttgctgtgttggccaggctggtatcaaactcctgacctcaggtgatccaccagcctcggcctcccaaagtgctgggattacaggtgtgagccaccatgcccagcttaactgagtttctttaaaaagcaggaaaaagcactgtacatgtctaaatataaggtgataccaagacgggtgttcacatgttttcctaatgggatattttgcatgcataaaacttgtagacatggatataaaatagttaaatatctacccacattttaatgtattaatttatttccacatatacatttttaaagtcacatattacatgaagtattaatttagaaatactacttttttccacccatacagttcattgactttattcagtgcttcacatgtgatttggcatcagtgtctgtcatcaccaactcccctgttttcagtcatctcacccagttgtccagcacacatcatttctgcctaaattttttgagactcagtattttttttttttttataaaaccatgattctgtcacggttaactatatggcaaaccacacattccatttgtataatagggagacagttactttttatatgtgttctataggtgaatatgtttgatctctagcttcttaaagttatctttaatggacttttgcatagtcatatccagcatttgcaattataagaaataatttctaaatttgtatggattttttgctttgaaaaagagatcttgttagattatattacacctataagcatttaaaactaataatgttgggattgcttcagccccatttcttttctccaaaccaaactttgtttttcatgatagagtaatacagagacttggataaggatttggctatgaggtgactgtctttcctaagacattattttagggaaagaaaaatacttgccttatgcttgtatatatatgatacttacttttccctttcaaagttattcttttaatctttattaaagcacaatataatgtaataaagcagataacctgaggagaacttcatttaatggcaagttgaggtgatgttattaattttgtgattttttttcttatctgagtgcatagcacaatgtttaaaatatcaatttcttaaagaaacatttctataaaaaagatagcaagtgagtcaataaatggatatactatgtggcagacatttttaaatgaacatttccatagctgtataataatatttatgtgagctttttactagaaggtagcacttaatttggcaggagatgttatccttgtcatttcctgataaccattaactacatactacagaagataggaacagctggtgcttttataacaaaggttgattggggagatgatagagcttgggggatctaagaggatttagaatggtcagtggtttctgtcttggctatttaaagaaatgcttacttttaagaattttaactaattgaagtggcaaataattttactttctttcatatgttccatgaaaaaaatctattgtaacatttagcagaaaagaatatcacttttatgctggagcttccatcgttgtatgaaaaaatgtttatattattaacatgccaaaagtatgataattcagttctacatatattagcaataaattgtaccaatgaaaataatgattaattatcacttttatctcttaacagtggaaagagtggaacgagaaaacctttcagactattgtgttctgggccagcgtccaatgcatttaccaaatatgaaccagctggcatccctggggaaaaccaacgaacagtctcctcacagccaaattcaccacagtactccaatccgaaaccaagtgcccgcattacagcccatcatgagccctggtcttctttctccccagcttagtccacaacttgtaaggcaacaaatagccatggcccatctgataaaccaacagattgccgttagccggctcctggctcaccagcatcctcaagccatcaaccagcagttcctgaaccatccacccatccccagagcagttaagccagagccaaccaactcttccgtggaagtctctccagatatctaccagcaagtcagagatgagctgaagagggccagtgtgtcccaagctgtctttgcaagagtggcattcaaccgcacacaggtacaattagcattaaacactgtaattaacagtaatactggggacagaattgagataggttataattatttttatctctttaaaaagctttatggatctcaggacatagaattagattaattaataatccttagttaatgaaacgctattaccattgatccatgcatgaccatgattaattaactaattgattaattttgatgaggtaatggacatctttgaacccaacatgcaactcaggaccccaaatgttactaatgacttgggtatgtactctctcatcctctccatttactgtttgcagatgtaaccctgatcttgaattttgtgattatcagtctcttgccattttttaaaacaaattataaaactatgcatgcccagacaatctatttttttcccttggttttgaacgttataaaagaaataaaattatgttttataattttataagtaaagttttatttaaaaatttataaaaatccttcaaaacataaaagttagatttaagatattgataaaatgataatggatagtttacttttatttttaatgtttgagagaattatatgccaattataacactaaatgttgaaaatgtaaacagttaattcacacgtcttatttttattgagggtgcttatatgtaagacattcttttctgctagtagttcttaaactggagtgtgcatcagaatcacctggagggctgtgaaacacagactgctgggcctcatcccatagtttctgattgagtaagtctgaggttggactcagaaatggacatttctaacaagatcccaggtgattatgatggtactgatccggggccgcatgttgagaaaaacttacctagcccttatatgagtaagaacaaagcagatgtgcataatctcggggagctaacgatctagtggtgaaaaccaggtaaccagataattagagtaaaatgtgaagtgttatgagtaatgttggagagtgtaagcaatagttgtggtggaggttcatggtgagctggaggtgaggaatacttccaggagaatgaatatggtaagccttcaagaaaacagtagattaaaatttcagcaccctcgtaaatgcaaggcaggaagctaagctctatgtgggtgcaaagaggaaaaagataatgggcaagcacatatgtaaacaacactctagagtattaggttgtcaatgggttagaccttgaaggattaataaagtacagcaggcaaagatgatgaagaagaagattattattttaaggtaaagacattcataggaaagatgttgagttaaaaaatgcaggaataatttgaagacataaaacaactgatttctgagaaaaaccctgtgaacgtacagaatgtaggaatgctttcatttatctgatacctgttcagagacacatgataacacacgctgtagatggaccttacaaatgaaagaaagcatgctggattgaaacctcaataatttggaaaatacaggaatgtttccaaatttaatgattacttcagaagttaaggggctgggcacagtggctcatgtctgtagtcctagcactttgggaggccaaggtgggcggatcacttgaggtcaggagttcaagaccagcctgggcaagatggtaaaacaccatctctactaaaacagaacaaaacaaaaaaattagctgggcgtggtgatgcgtgcctgtagtctcagctactcaggaggctgaggcagaagaatcccttgaacccaggaggcggaggctgcagtgagccgagatcatgccactgcactccagcctgagtgagagtgaaactccatctcaaaaaaaaaaaaaaaaaaaaaaaagttaagtgaaaactctcactggggagaaatctgataaatgttggtaaattggattgcctgatgcaagttaacactcaaaaaatgcacctaagtgaaatgttataccagttataaatattttatgtttatcagtggttcattgttaaagagggtctgtttacttttggtttccacgtctcttgcaagaaaacattgaggtaagaattttgtagatactctttaagcaatactgcgtgagttaaataaatagcgtttttgttaagtcagttaatacattttttctctctttattcgaaagtgtgttggatctctggttgaattgaaatgtatttctattatgtaggcgatttaaatttttattagttttgaaattgtcgtatgattaatgagtcattgaaaaatgagtttttgtgctgggtgcggtggctcacgcctataatccctgcactttgggaggctgagggtggcagatcacgaggtcaagagatcgagaccatcctggccaacatggtgaaacctcgtctccactaaaaatacaaaaattagctgggcgtggtggcgtgtgcctgtaatcccagctacttgggaggctgaggtaggagaatcacttgaacccaggaggtggagggtgcagtgagccgagattgcgccactgcactccagcctggcaacagagcgagactctgtctcaaaaaaaaaaaagaaaaagaaaaaaagaaaaataagtttttgttaatggttgggattttcttactggcctcgtggcaagttttgttatctcttattatatatattctacctttttatgggaaaaactactctttttggtgtaaagatattttttatattttctttgcttgtaaagagttattatcaatttgtaagtataaaaactgcaagtatagttggtagttgataagaaaggtagataataaaacttaaaagggatggacacagattgaaaaaggccttgagtgccaagacaagagctctgaactttaacaggcactggaaaccgtcataggtcttaggtaggaatatgctgtgctcccaccatcttaattaggtcttatggaggtttgatagcaagagggtaggaatatcatttagcaggctactgcaagtatccaggtgaaatgtacagaggttttgaactaggctgctggggagggtgcagagaagaaatattttggaaataaaatggacagaaagtgtataaatggataaagagaggaatagaactgacaccaggcttcaagcctgatgcctgagaataaaggtgtaattatgaagggaatccaggaagacatggaaagagtggttggagtaaggttaaagtgatagttttagattgggttattttgacgttgaagtgttgaccaacttcttaagtgaaaatgtgcaacagtcattgaaaatatgagtttgtggggggaggggggagggatagcattaggagatatacctaatgtaaatgacgagctaatgagtgcagcacaccaacatggcacatgtatacatatgtaacaaacctgcacgttgtgcacatgtaccctagaataataaaaaaaaagaaaagaaaaagaaaatatgagtttggcgctaggaagaagagttatcaggactagagcaagagattagagatgttgtcacagagcctgggacaggaaatggaagagtcaggggagagaaggggagaaatcactgctatcaccaccaccagcagcagcagcaccagccccaggaaagagagaagaaatgccaggagatgggggcaggtggagaaggaagaagagggagacagtagtgagagtatagaggacatgcgtggagagtttccagaagaagacttgtctacttgtggaaagctgagaagttaagagagagaggcttaaaaccatgtcatgagatttggcagttggttgggagaagactggcgaagtttagagtataatttcattaaagtagtggggacaggagccagaattcaggagttaaagagtgattagctgttgaggatgcagaagtaagtacatgacactttccaaaatttggtgttgaaagggaggccaaagtgggtggacagtttggaagtgatagggggtcaatttgagatcacaggatttgggaagttcacagcatgaactggtgatgataccaatcattgtggtttggtaacggtcttcagcggtgctggaacttcaggactgggagcaaggaagaaacacagtgggactgtttgaggtttggtgctgacattttcggtatggcaggaggccaagagaggtaaaaatctcttgttcccttgactcttagctaatttatacattctaatattgacagagtctgttaacatcacttgaaaatgagtttggaggtcctgagagactctcacatgttccagacatcactcttccactttctctcgtgattcaaagtactcgggcaatatttgtgtgtccatagttgtctggactggggttatgaaaggctctggtccttttgagaaagtctgttgcatactactgcaaaataaaaattggaaggatctatcttttggctctgtattttgcagttctctgtctctgtgtgtgtgtgtgtgttgtgtgtgtgtgttcgttcatctgtccttcatgtgcatgaataggcatttcatggctagccaacattttattgcctggttatgtatacagctcctttggctaaggataaaattgaaagcatggttgtattactttggattttagaagcaaatacagtatacattttatccaagtagcatgaagcatgagagaagactcacaatgaggcaaaacaaagacagaccatattggcgagagtgtatactttgccaaggacctagactcctggaggtctgtcttctcccatataatcctttttgtctatttttatggattaatgatttttctttggcgttgccatctttcaagtgccaagttataaaaggtctaattgaagcatgaaacacattttattattttcctcctgccattaaatttgtaagatggctacacctagaaagaaacattcactttcaatcaacatgagcttgagttcatgggccagccttgaggatatcaaatggaaactgcgtaggaatgtatgagtatttccttttaaaattctgcttttaatttaggaaagcttttcatccctctgggatcataacctgttgtgtataaagcccaacctaatcaaggtagatggtactgacagaatgacatagtttgaacttaagcaggaggtcagcaggcagattgttttttgctgtatgtactgtagtcactaacagccggactgggcagctggttttaccagcagcattgttaaatggaaaatatggtatattatgccccatgaaaccaaccatagattttccaaacgtttagacttttttgagtggagtcagatgtttatggatgatataatgacttgccagctataataaacaaaaataaacattgtagcatatcctcagtctattgaatattttccagaaatagttcatgatctctattattcatatattatcaaattcaataaaaagcattttaatacattttgtcaccttatattttgtgttcctggatttgtgcttcatggttataccaagagcaaatcgtgtgtgttcattttgtcaccttatattttgtgttcctggatttgtgcttcatggttataccaagaacaaatcgtgtatgtgtgtgtgtgtgtgtgtgtataaaataaaataatatgtaaacatttacaaataaacctggaactgttagaaaagaaaaccctgcccagtttttcatgtttaagatttccagatgaaaaacttaaattcataataaataacatttcaaatgtcagttctccaaagagaaactattaattaccctgttatggctgattcattgtcaccatatcatttgatgatgtaaaataacacagttaagagaatagagccatattttcaagagcttctttttagtttatttttattttaataaatatgtcttttaagaatataaaatgtatttgtttgataaaatgatgccctatccacactttatgacaaggtcatggcatctgctggagtcagagatagacagccttttgccaatattttattatttatttatttttatccttacatttctcttttggtttgctaacagaaacatacatggtctaaactaggaacataaaattgagtcacttgttctggggtagggatacagcacattagaggtcatgcaatgccaggatatgggatctccagcatgagcctgagactaacgtgtttctagacacagggtgtggctgagccttgtgtcctgtctgtgccattaggtcattatgaccttatgtaaaataagtaaaatacattctgagtatcaccactcttttttttttttttttagctagtcttttgaaagatgagattagccctgctttctgtctctgaagacttttatggcaaatgagacccagtgaaaacagtaaggtgaaagtgataaggcattttctgacctggtcattaatattcaggcaatcccatgatacatttctaagcactttaacctgtggccacaaagtgagatggatgattttacactggaggagcctcaggcagataacatcccagctctgtttttgatgctcccccgcctccccgctccccggcccatggttttacttctgaaagcctgcgtctgctgttaggcttttccgttaacatctctccagtttgggctactgattttctctgctcatcctggcagagttggaaatgcttaccaccatctgatgggtacaggaggatgacaacagggcagctcccagcctcctgtagtagcgacagctctgaagcataacttccactccagagcgctctgcaggaccaggctgaagctgggactttgcttgcatttcttctcttccctgtcctgcttctcacactccctcagcagtttcccttggaagtccatcttaataaatcactggtgtggtagtctctatctgaggatctgcgttttatcccagattataggtccacgccatttccagcctaattggtcatgccatagggtagtagtttgagtaaaacctatctatagttttatgtctactttctctgcaagtcaaaagccatatgttgttatggaactagtatagaattttttactcctttcttttgaaaatattatcagtattattgtttaaaacctatgccccctatagctctgcaattcaatgggtcagtattgatatagtccagactgacttatggatattgaatgtggaggaaagagagagaatgaataaaaatgagacagaaacagacgttggatgtaaggccttatgagatttaccaaacttgacttaaatgaaaactgtccttactgggtccaaatggtgaattatgtgattctgtggctttgagagtggctttgcctctcggccctactcctcctgtgctcctgcagtgatgcacatagtgtctgtgggaataagcagctgtatcaggtttccttttttttccatattcgttcttgcttatatcctgaatttattttagtgctgacatagtttgacttactaggcctatgtacatgaaatatgttgcttgactatttaatttgtttacatctttgccttttgacagtgtgattatgaattccaaccttaagcattcttttgccctttgttactttgtggactttaaaaaattaatcagggatttatgccagtatggaaaggtttatgacagtattttaagacttaatattactgagggatggttgtagaatgcccactgacctataataagcatgatttcataaaatatgtacagcgaatcttccttaatagataaactattctctaatttatttgaaaatccaatgacctacatattcgtatgttcagaaatcccccttttactaacattgtttctcctctgagaccttccatctgagcaaatctgttaaatgaagtagaggaagctttgatccaaactaggctaaatccagtggaacggatgccctgccacatgtgaatgggagcattagaatgccaaaaaagggaaattaggtgcgatcctcatatcttctctataccactgtctccttaccttggtagcagagttcaggaaacatccttatgcaaggaattagcaataagaagactgtatcatttgaaaatgaaacatttgccatactcattatttatgttgtatggggtttttttctgcctctagcacatcatgccataattaagaaagtttcaggctcattttgtgtctcagctagttcttctgagccggttcttggaaacatgttttcagttgcaagtacagatgtgttttgcaaaatgtgctattcttttgtaacagtaagtctctaatttggtatcttcctccttcagttcattgaaaaagttgtagagttacacaatttgcaaccttacatcaaaggccttgcttgggaaagctgtgcatcctggtcttacgtgatagagaacaggattttaaaaatcctttgggaactcattttgttgacctgtcctcatttgactacttttagtttttatgagactttgcaaaaaagtctgcagtttactcatcaaagccacatcatttgaagaaacttaagacaaggatcataaatacaatttatgaagtcactcagcaactggagaatgttttcaatggattggaaaattagattgaacgatgtatcaggaaagctgacagtaaggtcaactgctaaaatataaacattcatgtgaaatggcatggcttttgcttttatgctctgttgacacagtgtttatagtatattcatgccccaaattattaaggttaaaaatgactcaggacttactaaacattatattttgaagtggcacagttaggaagtgatatgtagcaataacatgaaaatcctggcaaccaaaatatttgggagtctgagcttcagtgtgttaccagtcagttttttggagtagaaacttctcttttaactcctttgtttgagttatacatattgttagccaaaggttggcacaatttaatcatacatacagtttatatttctagaaaatttgacctttaaggtattcagaattctgtcagcctacgtctggtctcagtcatcattatttctcactatccaatagagatacaagcacccagcaagtcatagagtaatagaacacaatgtaaatccagggatcttgactccatggtccagtgagctggttataaaatgacaaggaaacctgtgaaaaaaggaagtccacccactgaaagatgagctgtaaatatgaaatgccgcagatcaagcatgaacccgttattgagttttgaagtaaataatataccctcttttgatttcagaacattaaattaataaagtaggaagagatggccctggttgcttcataaaataaacagtctttcatttcaggatcactagcttgaattcatagatttacagattataataatattaatatctcccaggatagcagtgtctcaaagttattagattgcttgagggtagccctgtagatagcaggttccctttagttccccttgcacatataagactatctgttgttaattggcacctttttcaggcactcagccacaaaacgtggattgataggtcagagggctcatctaaagagacttggggagatgatggctttgtttgtgctctgcctatagagaaggctaatttagcagctgtcaaacatatgcaactctcctctcacttctaaatccacctgaagtagagacttgtatgtaaaagaagacctttcttttctcctttcacaaaactcatgcaagagaatcagaagaagcaaacatgatgacatactggtctgtcttgttctttctttctttttttttttttttttttaagacagagtcttgctctgtcacccaggcccagaattcagtggtgccatctctgctcactgcaacctctgcctcctaggttcaagcgattctcccacctcagcctcccgagtagctgggactacaggcatgcactgccatgcctggccaattttttgtattttagtagagatggggtttcaccatgttgcccaggctagtctagaattcctgagctcaggcagtcacccacctcagcttcccaaagtgctgggattacaggcgtgagccatcactcccagcctatcttttcctttcatccctgaccaatgtgcaaagttcttaaaaattagttgccagactcattatagaaaattcaggcttctctgtttttactaaagaaaactcacttttggtaagttttataagcttgtttcaccattctctaacagggaatgattgactcattttacacagatagaggtctctatcctcaatgaggacttttacctctagtgagtatatttcagtagaaacctgcacttttttttttttcttgtttgtttgtttttaaatgaaagtcttgctctgtcgcccaggctggagtgcagtggcatgatcttggctcactgcaacctctgcctcccgagttcaagtgatccttccacctcagcctcccgagtagctgggattacagccatgtgtcaccatgcatggctaatttttttttgtatttttaatagagacagggtttcctcatgttggccaggctggtcttgaactcctgacctcaaatgatctgcctgcctcggcctcctaaagtgctgggattataggcgtgagccaccacatccggccgaaacttgcacttttaatgtgaaagtccattgttgtattatttaactagtctcccgaaattctgagtgatgttatatttacagtatgatttttattaaaaaaatacaaggaagcactagctttaaattctgttatttatatatttttcaccattgctcaattaaagcaattttaaaaatatatacaaggcgttttcctttcatggtcatttattgaaatgatgaccatttggccttgggttaattgcatatttgctcaaataaagtgaaggaagtttaaaggccagaaatgctgagagaaaaatataattgttatcaatttgaaattactaggttgtttcaattctgtatacagttctgtgtctaaaattgtcagtatagactgcagaatttacttccaaagttctctgactgcaatacctataagaaatactttttacatcatgagctggtacacacccccagatgagcatgtgcacacacatctgtatgtctgtctctagctatatctcatttctacctctccctatctgtatgtttctaaagcaaaggcttcatgaaagaaaaaaatccttcatggaacaatgctattaccatgtattaaacactttggtactttgtaaggttttttaattccaattcataatagaaagttagttatgatatgttaattatgatccactaataattatgacccatgtttgaacagtgatacagattaaagctgatttttaaagatagcaaagttacttagagaaagaaagttgttttacttttctgaagtataaattgaatattttaatttagtgttacctagaatattcatgtggtcattttgcatcatataatttattacatttttctttataccttctctatgtcaaatagttttaattattccatttcctgtaagttacttatattttctgccttctctatgagaagacgtttagcaaaatataactagagtgtcttgaatatttaaagttgtagatgtaaaataaaaattgtactgtgatgtttatgtatttattcatcaaatattaagtattcagaaactatactaggcatcctaacaatggctaacattgattaaactcttagtatgtatcacatacagttagaagctctctaggggaccctataagggaagcagaattattttagttttacaggtgaggagactgtgccatagggagattaattgatacttgtccagttagagcccaatttcgaatccagcaagtctgacttcatgactcatactcataactactttattctcaatcatttctgctaccacagagtggaagatgaagggcataatcccttcttcaaagaggtacaggggtaaacagactttcaaaccagtaatccttttgtgaaatcattaggactgtgacgtgtcccatgtgctatgtgagaacagatgcttttgaccctgaaggtgattaaaactaatgcagaaatatttcagcaggaaagaataatattttgtaactgtttcagaaaaagtcagctcaagtgttaatagactgctttgcttatatctgaaggcatctgatacatttgagatataaatattcaataaatgtatttgttttgttttaggaaagtactatttttgccaatgttttgacaaagtagccaaagctagtaaatttttggggcaggttgccaacagttgttttacagaacattcatggaaactaggaataagaagggcccagaactttgtgaatgaaatagtcatagtgccaggtacttgaggtgtgagtagaaaccatgtatgtgcccagagctgaagaacactactagtaaaacgtttccaaagggaacctgttcagttctgtttgctttcactttttggtgctaatgtgttttataaattttgacttggattgtgcatagcctcttattccagtacctaagacttcctagagacaccaaggaggaagggataatcattacgtagattaagtatgcaaaaacaaacaaacaaacaaaaaacattaaagttgccaggaatctgattttggctaatttcctctattgtacatgctcaaatgtggcttggtcaaaggtattgcagttaagggaacacagactgttttggcttcaagaatgctctgttgtatctactcactttgtgttatgtgggtactgtattctgatgtgaaagttgccacaagtgaaattttattgtatccacaaaaaacaaatctgtgagacaagtgttttacttaataaattacagacttagggtgcctgaaatatttgctctaaaatgaagtttgcatgacccaaaatttcagtttcagttatcttgttttcagcaggctggatgaaaagatcttgagtataatgtgagtcatgttttcaatatgtagtctccagagcctgctgttcgctgttcagcaaagataggactcccactcccagaaatttaaaaaatatgcatttgttgccttcttagaaccattcctatatattaccaactggccgctaagtgcaaaatatgcagattctgcccccaaggagtttactgtatcatgggaggaaggttttatagtagcacagtgcaaaagatgtctcataaatgtgaggtagaactattgctgttttggttcaaaggagggagaaagtatttccaattgcagtgtactgtacatacatatacacatgtatacctagtcttttagtgctttgcagaatatatctctatagtaacaacatttgtctgcaaatgttacttttgtatatgcatttatatttgcagaatacattaattccctttagatgctcaattctatccaccccatccgacaaaaatgccacatgcataggctgtctttcctaataaagaaatattgtaataaaagagaggttttattaaactaatgcaataacgacattttctttgaggatttaacacatcatttttaataataaaaatcaaattgtcattgttgtgccctgtataccttttattcaaatcagactaagtactctggcttcgtggctaagcaatgctctggggtgtgggggatggggtgagtatttttagcattacacaaatgaatttcagcagccagattcatagtggggttgtagattatgaatacagaacccagggaaacctgttaatattcgtgaactgagggggaaatgcctctcatgagtatctagaaggaaatgagagactggaggttaggagagaaacgattttgttgggtcagctttcaggtagtaggataccagtactttctacagccatgtcgctgatttaaccgctttggctaactctgaattgaccactgaaatttaagagtttattttgtgtgattagactaggtttgatatcacatagttttcttaagaggttaccagttttttgctttcatgtcagctggacacagatattttagaattatgtgaaaattaaggctagcaagcatacaaaaggggtgaaacatgaggaataagggaccttatttggaaggaacctttttttttttgacatttcaagggaaacgtgataggttatccgggggcagggtggatggttggcccatatgagtgccaaggctccttccacctctagccttctgtaattttaatctgtaaaatgggaggatgtgatttgttttaactttactaattggttatgacaccaattgtttaaagcaatatgtaattatgaactaaaatacattttcactaacatgttctgaatcatatacctttaaagagatgtaacttgatttctgaagatgagtgtcatcccagaattaataattaaaatataatatgaggggatagggcttattttctctatctagtccaaatgtttctaaagaagtgctcagcgtatgattttacttttagcataggaatcagaagtacatctaagctgtctttgagatttacatgacatttgaatgtttatctttgttcacattggaacctaacactttcctactatatcctttctatgataaatgaatattttttggatcaagttacttcaaaaggtacatgttttagtaaatagatgagcattgcaagttaccagttctacctctcatttcaactgccacaaacagaaacaaaatttccagaaaggaaaacagtctctagctagcttgaggctttttccaaagggaagtactagggtttggctgggccagtttcctcagtacacacctggtgtatatcactttaaaaaataaattatgcctcattaagttacaattaaatggaatcgtgatcatttgtttttctggaaggaagatgttttgcatattgaaagcctaatttgttgcaggtgacaaaaaggctgaacagattatctaatatcacttcattttgggggttaatgtttgctggttagcttgtgtatacttcagtagttcagaatcatattaatgtagactcttattatatttttgcttcaaaatatcttctaccactttatcagtttttgcactttattttacagcttgtaaggaaacagaggcttgtcttggtattctggagtacccatgtgcttgctttcttcaaatgttctaatactccccagcttcacacgctgcccaatattcatcgtaactttatatccatgtactatctatatttaaaattccagctaagttaagtcttacctcttccaattttttttccctgaatcctgcagttgataatactttctccctcctttgagccaaggtgacactagttctggcttgcattaataatgcttggcatcttttacattgtgctgctataataccttctccttcccatcatatggtaaactcctgggaagcagaatctgtcccttattaagtctcttcatccctctcagaactttgtattcaatcataaataagaaatgaattaatagactgatctgtttttttttttgagactaggtatattgaatttgggggttccctagataatcaatgggagataatggatttaggggcttctgaggtaatccatgagagatatagcctaatcctagggagttacctatggtctgagagccgtaaagaacagatatctgttaaaatctagtcagtaatgactttaactgttgctgtcaggagtggcatgtcaggcttagcattcctaaagcctggcccaggtgtgagttctcttattgctctcttccagggttaaaggcccatcaaaggtaatttctcacctgtcccagacaagatgtcaaaagctagtgcaaaaacttggaagtagattttatagagccagtcatgataacgtttcccagacttttctgaatatcagcatatattgtacatgctaacaatttgggacaaactatataaattgttaaggaagtatggaaatcaaaagctcattgacacagaaagtacagactcagaatctgtaaggtcatttaatttgttataaagaaatattttaaaatactagaaaaaaataagggcattaatttttcatttaaaaattagcctcaattctttgttttgtgtgtagaggtagcaaacaggctaaattatgagcaagctagatggcattataataagttattgctcatttcgtactttgaattattttgcttttaatgaatattttgccaaactcatgtattctttggtggtcctggaaattatatgaagcttgcaaaatgttaattaggctatggaaaaggccaacttccttctttttccactgacttgtaacccaagaattattttggagggtatctctctaccttgtgcagatgttcattctgctccttttagtcaacatgtttcctggtcttacataatctcggctaacactgtggagggaattgttttaatgtgtccctggagaaggttctgttgcctacgaggaggaaaatacttaatgatcactttactcaatacttgcaatatattttaatatgattactgatatgaaagtttaataagctatatcctggttaatttattaatttccctccatttgcacattctcaatattcatgacctttctattcataaaagtgcatctttttttcagtgcccaggtgccgcgccacattttctgtatcccaggctgcataatgggaatgtccaagtgacacctccagcttggctggttgataattaaaatgccagatgacatagtggcaagggctttagaaatatttatgtgagagataaattattaatttatgttctattcaagacagtttcaatatgataaacatttacttatcttgataattaggtggggtgatttgtggtatgtgaaagttatgctgtctattttcttctgatttttttctcctctgatgattttcaactaacgaaatagactcactttccatttataagcatgcagaatttggactacatttttaaaaaatcccaatttaaatagttaaaagcacataaataactcaaatgaaaaagactcaacaaaacaactaaaactcttcttgtgcccaccagtgagccacttgttattgaaaatgtctgaggtgaaaagaatctgctttgggaccatagctacacatatgagagttttaataaataatttaaaacagtgttctgattctctggggataatatgtggaggtgacactggcttccttgttggtttgagactttatcttcaattaggcaaatgaaacagaggaaacagtatattccaccaccctttaaaaatacaaatattgtgtctctttcacctcagaaatggttgagcagtcattctcaaggatacttcatattaattttccttggagatggattaatttccctgtaaggttttccagtatgtaaaaaatgtaggagaagaagctatacagtttcaaaatggaaaaaaaaaaaacaagaaacaaattaaaacactctgtgttttaaaattttttttattgattgagaatgaacaaacataattttgagccatggtccattagaacaatagttttgttatgtcactatttcgtatccaaaatctttcccataataaactccacaacttgttaaaataatttcacagaggaagaataggtttataaactttgcctttgagatctcttgagtataatcataataactaaacaaatttatccgtgttgaccctaaaactccttcaagttttagtaatttgaaatttattgaaataccaaatttatgagagtgaaagggagaggaaggagggagaggaaaaagaccaactcatcctttatatgcagaatttatcattaaagaaaactcaaaaaatatcaaccttagtgttttttactggtattgaaagttgaaatccactttgctcttgcttctctgcatattcatttgaagatttttatcttcaaaacaaattcattatgaatatttcaggttgcttagtgcaagtggaaagtaggatagctttaggcagaactgacttttaatttcagagagtcgatacttagattgtatcacattttctggaagataagtgtctcactcgttgcttctaaaagcatgacaagaaatctggattgttttaagaatcatgtaccagtcggttatttttacatacacatcctaccttgtccccttcttgggcatgcatgcatgcacacacacagacacagacgcacacaaaagacactgatctgtagcttttctaccaagtattacttagaatttctctaatcaaagtaacatgacatccaaattgtgaaactgtcagatgacatagtacttgtaagtttcttgtagtaaaattgactatgtgatgttctgagtggtgattgcttccttggagtgctatgtgatacagttcctataactggcatttgcttcgctatattataatgcattgctttattttaaaacattgcctacctttccctgaagatttttggacaactagagatagcatattcctcttacatccattgccttttcatatttaagccacatattagaaatctgatagtgtttcctttgcattaattttcacctgagtggaaatgtctttggcatctgttctactttactacagttaaagaagtgacttttcatgatttcagttgccccatctgttctaagatatgggattaacatctcaggtcttcccaggaggataatcctaaaccctgttcttatactgctctgagaagcaatatattagctgggaatataaagtgatgtctctgtgtgataatccaacaagtgtgcagaatggaaatagacctgcacctacccccagtacgacaatgtcccaccttagatctccagcccttttctggagtccatactacttttctctagacttggcagcattttccttttctttgtgaattctctgtcgtcagagcacatgaaaaccctgacttcctatttaaatctttctatttgggtgagtcacacattcagaaagtatctgggcctatcatggcattccgtgcacactgttattacagtgtgctcagcccctcgccagaggtgacttcattttcattgctttaatggtgagattagggtttcccccatgaagacgtttcataaaagatttgggtgccctttgtacatatgtaaggataactattgtgtgtatagattgggaaattatcagagggttaacacaatttagccatttgctttgcgtcttttttttttttttttgcataagaaatatctctattgaaaacagtggccggtcatacagaaattcagccagttttttttttaaattgatgtaaatctaccatgctgtttaaatgtcgaaactaaatttaccaaacttggcagatttgtaaagctaagcaggactgccaagtgttcccagtttcaagcagagagagttctaacagttcctgaaatacttgtaggaggcacctggtggtaattgcagtttcacaattcttcccaagtgcctaccttgctagctggcatgtctgtacactgatgattattacagtgatgataaagtgtcagaatagaacagtcctaaaataatgcatatcccccggaaggcaagcacattgacttcatatcggagaaccctaaggaattagtgtgaggttcttgacatcacagcgagctggttaaaccaaacaaaggaggagaggggtggaagacagaaaccacacacatatacctgcaaatgtgacttggtctgtttttttcccccatttaatcagggattgttgtctgagattctgcgtaaggaagaagaccctcggacagcctctcagtctcttctagtaaacctgagggccatgcagaatttcctcaatctgccagaagtggagcgagatcgcatctaccaggatgagagggagcggagcatgaatcccaatgtgagcatggtctcctcggcctccagcagtcccagctcctcccgaacccctcaggtgagaaacttgctttccgtatttttcactctttgtcttggaaacatcttgccttcactagttactgtgttttccctcaaacattgagagacataattcaaggatttctttcctttttttcttttcttattttattttaatttttttgagatggagtcttgctttgtcacacaggctggagtgcagtagcatgatctcggctcactgcagcctccgcctcctgggttcaaggaattctcctgtctcagcctcccaagtagctggcattagaggcaccaaccaccatgccctgctaatttttgtattttttgtagggatggggtttcaccatgttggccaggctcttctcgaactcctgacctcaggtgatccgcttgccttggtctcccaaagtgctgggattacaggcgtgagccaccgtccatggccaattctatgatttcttaatccgctgaacatgttggtcagaggatatgaacttctgaccatatatgatcccatactatatttctgtccctttaggaagtcccattcttccatacgtggtaggtgaggggtaggaaggtaggagtgggcacaggggcgggctctaggatgtttatacatagctgctcagttaggagttagggcatttgtgttgaagctgagtttgcatagcaagcacactgctttccctcaaattgtatgtttatttggttgggctggatggggtagaggtggctgagggcagggggcagagggtagttgaagctctgttttatgtaatctgaaaaagacaaaatggaggaacacttgcagtggaagcatgcatatgcagtgtccagatcagaatgactgagatgtcactcaatgatcctttagaaaatgatggtggaaaggtaggccttaattattttccatcctaggatgatctccccacagaatttggtgacttccattcttcctctccacacacttgaaaagtattcttttcttaggccctcatgcaaatgtatacatctagtaatgtgtgcttcaaagctcctaactcaagggtcaaggtctcaaggcagtcaggggtcatttctagttcacatccaagcccactcatttctggcctatcccctatttcccctaaacttttactactcgatagatttatgataaggccagtccgttcactgttgctatgatagttgcaggttctgtctgagtgctaattctcaaaaccagtatttaacaggtataaattttttttgtttgtttttgagaaggagtctcactttgttgcccaggctggagtgcagtggtgtgatcatggcttactgcagcctctgcttctcaggttcaagtgattctcctgcctcggcctcccgagtagctgggattacaggcacatgccaccacaccagggtaattttttgtatttttagtagaggttgggtttcaccatgttgtccatgctggtctcgaactcctgacctcaagtaatctgcccacctcggccttgcaaagtgctgggattacaggcatgagccaccgtgcacgacctaatggatatacatttatacaaagctgaaaaatgggcggttcaaaaccaaaggttgttttgcttagatattatagctttggttttgcgttttctgataaattctaaggaactgattaagcatagaagcagaattgtatcctagtagaaatatttgagctttttcaagtatatccattttttcacacattttaactctttttatatttttgtactctgcaataaacttttaattgaagattactttctatcatgcactgccaaattgtgttacttacacttcagtctttagtgaattatgagttttagttactgtttgaaccaaaaataagtctcttgactgcttactttggatgagtataaccaagcatttttgtttacttaaaaaaaaatctggggacatacatactgagctagtaagttgggcaagttgttaatgtgcactaatatttacttctgctaaattcatcaatatttttgccacttttgaagcccattaaaccattatagaagagcccaggcatacttcatggccatttgacaaggcagctcttcttagaaagttacttctgcttgttagaaattaacacaggtctgtgtatttgttttcagctcttttgtactattttcctaacaagattatatatcgtaggcaccttttcaaagacctaatagctttcagtgccagactgacttacaaggccccacagttagggtcagtattttgcttattttgaccagaatgccatctagaaaattcatacagatgccctttagggataggtgtagcagggaaatctcttatttaatatcacagttttgatatttttgaaaataaatatttaaacatgtttttgagaatacggtcatggcattgcatttgtacattctctagaattgtctttttctcttgggtaaagattgagaaaggagagtttattaaagtcttttaaaacatttcatgattactgacttaaaattctttacagtcatatctcaacagtaaagatcgtagtacagtacagattttattgtgagaacaagtattagaggagtactcactgactcagccttttagttggagtcagcaatttagtgcacacaagcagcttgacattgatgcagggagattattttccagaccccatctatactttattagtagctgaaaaacaaattgaagaaatttgaaatttgaaattatacctccagtctctttttatttcttcagctggccagcattccatggtgtacttaataatgacaaaacaatactaagataagaatgatcatttgttaaaacgcttactgtgtattaggtgttgtgaacattttgcatgaattcagttgtcaccattttatggtattatgcccattttacagatgagggaactgaggtttagatggattcagtaacttgtgtaagggcacatggctgaggggtttcgtcttagccctcatggttggagagaaggcttgaccaatcaggtaggatgagatagtcagtgaggcaaattaagaaaactgaattgagaaagggcagacatgctatgctaaaacgttctcttaacagggaaagcactgtgggttaactagaaattttgagcagaacaaatagtttattttaaaaaattacagataattgaatttttaatgggaaagtcccaacatagcaagaaaattcttacaacagcacctggcataaattggagattttggaggcagtgtgtagtgcagtgtcctgagcccatgtttttgagcctgaaagacttgcgttcagatcatggttccttcactggctgctgggtgtcctaggttaagatcctcttttatttcagtttcttcatctgtaagatgaaaataataatatctaactcattggaatcttaaaagaattaaatgtgaaaacaaatgttaaaatgctttctggagtacctggcccataaaaagcacgccataaattatagtaattattgctttgcggtaattagaaaatagtatgagagaaggaggtagaagaaaaatggcagaagttactgagcactgttaggaagcaaagcctttatggaaacgtagggccttaagttctgccgctagacaccatttgtcacagagtccacactgcctgttacatctttctctggacctgcatactgctggatccagtagagaacagctcagggcatccgcacagggaaacttgtgatttggagataactctgttggtttgagattctagggtgaatggggacaaagagaaaaaacccaggttaggccaattcggctggtagtgcacaaggatcaaggatgtcttttcctgaaatcttgctgccagaggttctaagaaaatgtctcagccctctcttattagacaccagcaatgcattctagggctcacaccaggtaaatgttatgaccgtcttttggattaagtagattcagacattttagggttatcctaaccccaagaagtacagacttctatattgtccttcatttgtctctgaagctgatgggaaatcattcaattaaaacgagcactgcagaatacataaaaccgcaatatgagtttaagaaaatgaaaacggcacatcaaaggcattgtgaagcctagttttatgaaatgaaattttgtttcatttccactgatttcctaggtgaaattaggtgactgtctgggtagcataatgatgataatgatgggaaaccatacatactcgaatgacatatgtaaagctttaataaagaataagagagacttgggagtgcattaaattgagtaataatttattatttagagacctctacccatttacttattttttttctggaagaattggctcttattccaaggtgtgccatttttagaaagaaaaggttaactgtgtgtgtgttctgcatgtttgttttgtagttagatggttgcttatagtttggtgtctaggagagccatcctacctgtgaaccttcgtctgggatgctgtgagagaacagggttgacaggattctgcatgtcctataggaatgcactgcaattatttccaatcacaattaacctgattagaataatggacaggaagtgtccctctgtagctaatgcagtttggcatcagctgactgaaatcctttgataatttctgcacagatggctgggctgaatgcagcactttttaaattattattttcatggtctcttggtaggccaaaacctcgacaccgacaacagacctccctattaaggtggacggcgccaacatcaacatcacagctgccatttatgacgagatccaacaggagatgaaaagggccaaggtgtctcaagccctgtttgccaaagtggctgcaaataaaagtcaggtgagtggtttttaaaaaagcaaaatcgagggctggaattagatccttctccttcctccaccaataaaaatacatctgttcctataataataataacagtaataacccccaagaaacctgtcatgttctgccttttactctagtttgcttttattcccattggagttcaaaatagagatgaagccaaaacttgaccttttttcttttaaagattaaaaaaaattagcctcgaatgatttctctccttattctaaacactgcaatgtacccttttgtttctctccctttatatatatgtgtgtgtgtgtgtgtgtgtgtgtgtgtgtgtgtatatgaacaaaacttagaatgtatataacagcacctttctgagaccaagttttagccaagtctcatcacctttcctgttcccacaaggggaatgtccaactctgttataataaccacttttccccagccccagagacaccttttgatgtcaggtgtttcttttatgtacagaatacagttgattttttcaggagaaaacacacgtggggggagtgcagagtaagtgctaaaatcttttaacagaaaaacacagaagcttatccagtaaaatttttcagagttctgggattgtggagaatgtaatgctctggggaaaagagcagacagatgcttaggttttttatttctgaaagcagcaacagttgatgggatctactatctgcttcaattcttcatttaaagggacaacttctgcccaaacctagaatcctaggtttgaggtgcatgctcacttatgtatacctagggcgaacacctaatgcagagtggaggaaataaaagttagttaaagcataattttgagagtcctttgattctgagcttgatttcctctgtgtccttgtatgacaaatgttttcatccctacatatgtaaataatcaaatggttgatcatctccctaacaaatcttctgttgtgtgctataaagaaaggaagtgactgagtattgtatttctattaagcaagaaggttttcaataaaaattaaatttttaaaactgaaaaacttcaaactgtagttaaatgttatatttagattaattatagagtacagggttagccttctttacctgcagttttaacctgatataggttatttttagatgttgataaaaggaggggagtagaatatcaaggaacttggaaagggattgaaatgtttgtttcccttttcaatttcagtgtagtaagttttccagattactctgactttctctcttcaatgaaatcagtgaaatacagtttgctaagacataatgtccaaccatagtatgaaatacatgaaaagaaaataccatagagccttcttaaactgttaaatgcataaaatcccatgtaccacatggcaaaatataatgagagttggagctgttaaacgaataaagctgttaaatgcataatgccacttggcaaaactactgtgcatttaatggttttccactgtgtaataaaggacatatgtggtaaatgtgcagtgagtataaaagctgcacaattgattttgcaaacctgccccttagttgtgacttgatgtaaatatcaaagtttcacacagtccttcttttataagcagctttcaagaaaaactgaagaccacagtctgagaacttgattccaaaagcctgtaatcttcctgttgatttagcagtatggcttttggaaatagtgatgcctccagcctcctaaaataattcaggtagctgattgaaagctgcttttgccaactggcagaagcttagctctccaaatttttgatgtctcctgaagaaatcagtagccctgatttcgtagaatttggagaagaacatagttctgggaattaatatgctgaaggtaagattgagcttaagtgaggataagatgctttgaggttgttcctttttcactgggacaatgatctcattttcatctatgagtggggaaccttattgtaaatagctgactagataggcaattcaggcactatgtttattatgttttttttttaaaaatgatactgccaaacaaaatgaatttaattggcagtttcaaaggcaatttaacaaaagatattcactccattttataagtatcagtattcatttgataaaaagtacatttagtgaaatcaattgcatgatttggtacatggcatatatatttggtggctatccataaggtgtatctatgtgtgtgtacctgtgtgtacatgtgtgtgtatgtgtgtatatatatacacatatatgtatatatgtatatgtgtgtatatacatgtatgtgtatatatacatatatacatgtatgtgtatacatatataaatctataaggtgtatatatgagactgagatatatatatatccataaggtgatctgtgtgtgtatatagacatatatatgtctatgtatagacatatatatatatctatacatagacatatgtacatacatatatgtctatacatagacgtgtatatatatgtctatacatatgcatacacatacatacaccttatggatatatatatcttagtcatatatatacaccttatagacttatatatctctcttagtcatgactaatcatagaacttaaccttttcaagctgcagaggggagtggccacacccactccattgtattgtgaggacggagaggaacaaagatttttctcttcccttgcattttcttccctccttcttttatttttctttggagggatcttaagttcttgcagtgactgaagagccaaatgcaagggctttcccttctcctgaaggtgaaattagggaaacaattaagtagtcttgtgaactggagttgccttgaatccctgaaggccgagttcaaatatgcatagcaaccttctccttccatttgaaatttatatgacccctccattaacactccttggtgttaattgctgtaatcagctgttaacaataatttctaacactgccctgtgtgttagggaagccttgaatggggaataggaagagggaggaaagttttagagagagtaggaatggtggtccaagagggtcctcgagggctgtaagtgtttaagtaggaaccaggcacaatgcaaggataggggttcagaaaaggagttgaaagggtggcaaactggttcattgtgaaaatccattactgggaagtgtgtgtatatgtttccctagtgtatgggttacatgaggatgcatttgtagggtcccagaccacctcctgcagctcagctctagttagtcccttggtgattgctaggccagtccatcatccacttccattaggtatcttctatcaggcccttgcccctttcttcgtgggaaaggagtccaagaaggataagaccagagggaaagacatgtttatacacatttcgccttgtacttttccttcattttctatttaggaccagtttagtgttttaaaataattttctgtgtgtgaattctgaggattaccttccttttctgtctgcagaatactcagatcatggaatagaatgacagtggtaattctctgtgaattaggagttaggggttcttagtagaagccataatgtaaaggcatatggagcgttttctgtgtaactccagtctgaccctcacatacaaagggccaccagggagcgaatgccccacattctgtctgcgtggccacaggaatgccttgttcctcaaaagcttctgctaatcttgctggccctcttctgcagattctgtagggccgctttccccctttcttcccaattttacccaatcacccgtgatctgggttgtagaaatctagaggagagaaaacatagtaacctgtgggcacatcttctgcggctctcaggggacggttgtgtactttgacaacatcctcagccacatttctctcccttgacatcaattaccccatttcccagacactgattgtttttttcttctcatatcctgctatcttctcccttttatgggctacgataggttagctcatagaatgctaaggatcatctgactttttttttttctttgagaggagagttaatctttattatttattattattatttgtatacccgaagactcaacactacatatgtgattgttttttcctactaggtttgggtaaaaatagagtagggagagaaatggaaaggggcttatttttaatctctgttttcccttccctccattaaaaagataaaccaatgaacaaaaacttccgaagggctgtggacttgctttttgtatcaggaaggtggagagaaactgatacaccctgttctgttccatacagacaaggggaaaaagacggcctggttttaaaccccagatggtgataatgaaagggggtagtgccagagcctgctgggataaaagaaaaagggtgattttggaaccaacagggaaccaggggggtctctggtgagatgatattagtaagatgtcctcatctttacaaaggtttaaagacctctgccaatcctccatgctacctatgcccttgcaggcccactggctgcaggaactgccactaaagtcaggaatgagagagtttttcttcctactacacactttagaatgggaggcataattgtgatcccattgtagctaaaagagatggatttctggcttgtaatacacaattctaaaatcattttccccatagaaactatgacctacatggtgattgggtttcagtatgttctatgcttcatgtacattaggattaagtggattttgtgtactgacctttatgccttagcactatgtttctacaaaaaaaaaaaaaaagtttcaagttctcaactacttaacaaattgtattcctaagtgagagtgtacttatgttttagatgtagtttacaagctcagattttatgaacattgcttttttcttaaaatctctccttataggtggtctaatttgcttgacaggctaaataatttaaaacatctaggtctctgtggaagattctttttatataaaagaaaaataaaggaaagagagtaattaatttttgtttttgcatctcttcttaaaatgtctcaggtacatatttatacattttttaaagaaataatttatattttgtgattacgtaagtaatttaacagcctcattttaaaaaattcagaaagtgacgaagaatatgaaagtgaaaacatggatcacccatgatttcatgacccagacatagttagtattaatattttagaatcttttctttcaatgtgtatatgtttgcatgggagtatatgtgtatgtttatgtcctaattgatatcgtaactgtgtaacacataattatgagacaagttaaaactataattttttaggacaacttttttatgtaggagagtaaatttacaaaatataaaaaattatcttgtctcattacttagtttcctagcctttaaaaaatgttgcacaaagatcaaagttttgccattttgcacaaaaagtgctttaatgttgatcttatattattaagtttccattttgaggatgcctttactggggctgggataacttagggccctggaagtagacatgttgctgacctgagctctctggtataaagactaacagaaactataggccataagataccctgtgtaaaagtgagttggtggtctgcctcactgctaatgattttgcttttgccatttatattcaacatgtaaggtaggaaaaaatgaggtgtacagccttgactgagtagctgccaggtagctttcttcagaacacaatcattctgagagcctatcatggaccagtttccactcttgtcaactgggcgaaatatactaaaatttaggggtggtgttccaaattcaaattcaaaaaagtttaatatatgtacgctaaaaataccatttgaaaaatattatatgcctagtgaagaaatttctcagattcccaaatgccaaactaagtggtgtgaacatagtgatatgatgcgcgagcgtcaagttgagccctccagtctcccctcttttttctcttggtataatctcaagaaatcagattctagtgaaggaatctcctcagacattcccataagatctgttttaatatcaacctcatgatcaagaattgggttctttttaccaccctcacaattaattatgttaatgtttcatgccttaaaattagtctttataggagtccttagacaatcaataataatgatgataatgaagattaatcagactacatatgcagttcttaaaatgtcaaatacttttaacttatcactagttttaaactcattttaagttcattttatcctctgcagaaacctttgagttcattattttgcctgttcctgacttggtaactttggaaacttgcatgtgtctttgaagtaaattaggttgccatattaaagcttcctctctgatttctccccagctggttggggaagaggacatcgagttaaactgtggttcttacagtgggagaatgttggtatctatgaatggttgctaccactttgctgttgagactatttaatcttcttttcacagggccaagacctagggtaaggcaagctagctgcctggggtgcaagatgtaagaaagcacacacttgtcaagccattctgtttacatttcatgccctagttgcttgttcacctcattctagtcccaccctgatctttaaaaaaagttttactcctggttgtctgccctgtctggtttccccaaccactaccctgcccataccgccccacccctgccacccacccattatgataacttcttgaggaagtttgcaatatacagtgatacgtcacaggtatgctggcatttggacctgaagggaggtgctggaagcattttgattgttttcagtttgatattttagcctagtgcattttgctgttaatatctttctgccgttgaagtgaagaagtccaggattctagattcattcttcttttttgacaaacacaaatggctttttaaggtgcatgtacccatgtatgcatgtatgtgtgtttgtacgtatttatatgtgtaaaggtgtaccaaatctccatactgttaaatagctatgcatattccgtgtatgctaaggagggcaacaaaattttgtgtaatcccctcttgacttgagcccagcagaggtttaaagggctgttctgaaataaaattttcattactctcaattacagactcaatctttacagacatatccatagaaatgtcagtgacatgcataagataacccagacatagctaaaaattggtccctgtaaaaatacagtttagaatttagtatacaattttgaaaagtaaagaagcagatcttctgtacttaccacatttaaagtataaaataattaaccttgaactttaaccaaatagccagcacaaatcttttttcaggtttagataatctccttgtcagggattcattgaagcccttgacaaggcttccttgtagttaggcttttatccatttcagttttcttgattaggttatcttgagtcattagggggtttatttattttaatagacacttattggattcatgaaaagagaattcggtgacgaagaaacaagagctgaatattatctggctcatttcacacttcagaagagtctcaaccatctgaagagaaatcctttcacagttacaaaagtttgtttggggactttatgtgcttccatttagaaagcgaactgtctgtggttaataatatgagtttccttttgagatactcagaaaacatttccctttggttacatatgctgacattttctgtattgaagatgtgggtgagtaaatggccttttgcatttctgctgcaagaatctatgagtcattctcctgaagaactgttcatttgctgagatattcattcattagagttcctagaggggcaaagggagtgggggctacttactaattagtaggtgaagtaactcattagctttgtgttagtcatatcaaggggaataatcactgtgacaaggccctgccttcaaggagcatatacagctttattcaacaggggtaaagttattaactcttgtgggagatcagagcaggctatgaacttgtgtttagtgctgagcaagttctagtttgtatttgttctgaaatattgtaaaaactggaaaattagtcataaacctagaccaatgttttttaaggaaaaaacatgggggctgtgagaagttggggtcaaaaccaagtgtcctggggaagagaaagcaagccactttgtatgcagtggcatttcagtaccatggacaggaaccccactcttttcatctgtggtgtgcccctcccctccttatcacttgacatgtaagatttacagccaagattcaaactcttatctgttaggctccaagcttgaacactgggccatattattgttttgtgaaaggcctccctggtcatttgaacattctcagcctttggtatgtggtttggaggatatgtcactcatttattgtggacttgaaatattttaatcttttaaaatattttataagtgaaatagatattgccatacctcattcattttcaattgaagagagctttaaaaactctaatattaacaacagcaacgacagaaatacatgcatatatacacacagagagagaaaagaaagtggttaaaatgataacagattatttaaatgattgatgtagtgtggttctttatgatatatgtcatgtctttttagaatgaacactcctagagggtagaacttatgaagtgtgcactttaccagtaccaggccattgtgggtcccagttaataccaagccacacaagttcactatgaaaaaagatatctagtctaggataagtcatgctcttgactttatgatagccttttccccaacaacttcttcttaaaaaggaagaaggtgggggaaagagatgaaaagaaagacgagttaattcttcatcatgtcagttaaaaagccctcaaagactcctagggcccataagattaagataaaaattgtttttttgcatgacattctttataatctgagccctaccttcatttctagactttcagtcctctccccacctggtgaaatctatctttatcttccaagattcaccttgcatgccataatctcaatgatgacacttttcctgaactgcttcatggtcagaattactcactttcttgttggcagtctcaattaacctttcaagtaaaaagtaacaatgacaattagataatatatgtaatgtactagcccattcattgcatggcatgcaggagatgggtgctcaacagaaaattgttaacagaatcaatgtcctgagagactactattactatttgcaatttatataatggaccattttccctatcgtattcatgcattagagatagggaaacaaaccttagaacagtgacaaagttgcttctgagaattggtgcttctctcaaacaataactttctgaatttgagtccataaaacattcctctaggctaatttctgtgtactctaataattttggttcaatctaatgactatttattgagaagctactatgtgcaagaaaccatactctgctctgaaaatggtaaaatgagtaagaaacaaacccttgccctccactcccatcaagaagctaactgttctgatgggaatgcagacatacccacccctaaaaataataatgatcaagttgtgaaaaagtataaacaaaatgcttcagggttatgcaagagtgagaaacaaatgagaccacatcagctgagccttgaagtacagcttctcatggggaaaagaagttgagtatgagacattccatctaagagagtaacatggcagaagcatgaaggtgagagtgtacctgtgagtaattcacagtggctggagcacaaggtcagtaggggaactggtgggagacaaggtcatgaaagaaaaatggaggcaaatggtgtttttttattgttgcctctagtaatgttcttaaattgtgaactagaggttctctcctttatgcaactcattaatgaaactatcaacttaataaaagataaactaggaattttttattcatcttccagaaagaattaatggcacatttcttcaaatagtaagcatgtctaatacatttacaatgtgatttgctttgtaaatgtaaattgatatgcaacttttcaggaacacttggattgtaaacaaactatgtcttgactggtaggagtgtcatctcacctgcatagctggaagggcagtcagagttgttttttctactgagggaaatatatttgtttaagaggctgatgagatggctaaaatgagatgtgaataaatattatttgcttatgcaccctaatgcttgggaacttttaaccattgattgcaaggaagcagtctttgaacttattaatagattccttctctggattcagattttgaaggtaaagttttaattgcgaacctgttggtattattacacttaggctccatgtatatttttctctataagttccaggaatttcctgtatctaaaaaaaactttttattttgaactaattttagactcacaaaaatgttgccaaactagtatggaagggatcattgcactgtattatatatccctcccctatcttcccctaatgttgacaccttatatcaccatatggcaattattgatgatagggcaattatcaaaaccaggaaagtgacattgtttctatactgttaactaaacaaaaaccttattctaatttcacctgtttttctactaatgtctattttctgggacaggatcgtagccggcaaccacattgcatttagttattattattctccttagtcttctgcagtctgtgacggttcttaagtcttttcttttcttctattaccttgccatttttggttattttgttgaacacttctcagtttgggtttgtttgatattttctcatgtttcgactgaggttatgcattttgggcaagactacctcagacatgatgttgtaacctttgcagtacattatatcagagcattcgtggtgtcagtatatcatcactagttatttgaccttgaccactttgtcaaggttattttttatttgtgcctttaaccctgatggtttatcactatctgctttttctgacagataacaaggtaacagatcatggaatgtagaaccaaagaggaacttagagaccatcttttgttaacccgtccttttacagttaagcacccaggagcttgaacagggtaactatttgcccaaaggtcaccccgttatttaatgacagaccaggaacttagcagttaggtcttagagatccaggtttgataccttctacattcctagctatgctcaaacagttataattcactcagtcctagttttaccagactgtaaaagctaaatggactctaggaatatacagccaacctttggtcaaaacttaaaaccaggctaagagagaaatcccagggaagcatatactccacagttcatggtgcccactcacagagctgtccaaggctggaaaccagatgaacttctgtatcagcatttctgaaatgaaaataattctcatggaatgctccacataacacagagaaaacaacaaaaacctacttgagatttttaacagaaaaaggagatttgtttattaataattcatgagttcccattgaacatgcacgacagaaacagtgctattcaatagagaatactgtcatctgtcactgttttatttgacatttacacttttttttttttgcctgatactgcaaaactttcttggatggcatgcaaagattatataaatgaaaaaaaatcccaatatggggaccctttatctcttctgtgatggggtcactcacaattacatacatgtgtgttcatgcaactgcgtggcactttctcacacattcattagccagcaaacaagctaataagagaccgtattgagaaaacagagataagcatcccaaatgggctggtgaaaagatgatatgaataaaatgatggtgcatgagatgggaagtgaggtggaagaatagatttcctgaagataggcttacaaatacatggaatgagcaagcgagccagagtgaggggaaggtaaatcatggctgccatgaggaaaactaacacaaaaatacattaccagttcagatacaaaataaatacctatatatggcatcacaggagcgcctgtaggagggaataacggcctttaggagaagagcaaggtagagttaggatcaccttccgattttgtgctactataaggctcttgacaatctttctgctctgtaggttattatttataaaaatcacagaaccagctgatacattcataagctaattactgaggcagctgggtacacatggtgcaatatgtccaaggctgtgaagtatcacagatttcttggggcctgctgtggtgggggtgcgctgttgaaggctccatcccttaatctgatcagccaagcaaacactttgtggggaaactagattaataaccctctaaataccatgaatgtgcttcatcttcaaaaccgggttcccttaaacatgctattagctcagctccatcagggatttgaggaagttctctggtgccttaagaacagggtcttgttggctacctccctgtgccagaaattaatttggtttgcttatgtctgcacacatgatcacacttgtgtctaatctgctccctaatagcttcaaggtcaagaccttgcatgtcagtgggcaaattgagcactacacttcttaaagactgatggcagacagcacacagtccataatgaggcctgtagtgttgttctaagtgattgtaatgagtgcagattataacagcgcatataaatcaaatgcggcaatgaatgttgtgcgagacattcccagtgtcataagtggagataccactcagctgtcacctgtcttctttcaagctgcggcttcccacaatgcagttcagtcctcaagcagaacagcaggtgctgtcttccttaaggtctgggtatctcagatcttcttcttttaacagatgcaggtttttgtttgtattttccattaaatggttagtctccatgctcttgcctcccctgggagatgttaaacatacctgtttgaaacatttgaaagaattcagttggagacttattcagatctatgaaaagatagagaagtaggagcttatttttccacagatggtttattttccatttcaagaattcttttactttatgcaaagaaacccttgaggaaacacttggggactagatttttaaaactataatttattttctggtatggataaaaaaaattgtcttcattttttatatacattgcaccttgaaaatcaaccatgacctgcctttcaattgagttgaaaaaaaatctatgaaaatacttggaaaaagatttccaagcaaatgataagataccttgttttcattcttcctaaccttctaactctcccaagcttccagtttattgcaagaaaagatcaggtctgcgcaaatgtggcctctcacttgtaaaaacaaggcagtgttgtgttacagattagtttataaatccctggtggcttcacagttcagtgcctacagctgctgcagatgggcctgggtttttgtctcttcgcggtgctgcagccggcagttgaaggagaaaatggaatgatcaggttattaacatggaggccgcgaggaagaggctgcacaatgagaacagctggtgttgctgtcttggctgatgcagcagagataatcaaatcttgccttttttggggtaaaggcagaagacacagtggagagttagacaaacaatggcttatgatattatatggggtttttataatgcgtgtcaggaactttcattggcttacaagtgatgatatagaatttgttgaggtttgggaattatttttcacaaagtcattcgtgtttatgcacctcttaagaacatttttttactcttttgcaagagacatgatgtgggacagttcttgtttttaaaattagtgatgtagcttagaaatgatgggttagaaagctactggtaaaatattttgacatgagtcagtgagcgatgttgacagcatcctctgtattattttcatataatccatcattatttgcattacattttctgtctcatgcagttgcaagagagagaacatccggatgccagattttggaagcagacatttgcaggtgtgacctgaccaactgcctaccttcctgcaggtgtggctgttgcgggaaggtgatggttaagagggcctagagcccgaggtattcagagattgagcaaatatacatttcttttcattctagccaaggttgttgcttctattttgtggagttattgataattttaagaatatttcctccctagagaattcagtgttgtttacacctagacaatttttcttttttagaatttgctgtcctgttatgcatatttgtttatcttcactcttagcatgaaatgctgcccagttgggtaattttaaaaaattgtagctgactgacacaaattactttttctgagaacagatgactataatcttgctaatcttttacagagaaactgcaattgagaatatattctataggcagggtgatacgatatctaacaagaggaaagattcttgggcattggtataaccacctatgtggtcaggggttggtttttagagtcagactgtttcactatctccccacgttggcaggaacaattttgacagaaaaagatgtactgtgatggcactggaccgcagtcaaggccccctcagctcctctacactctgcaggttaatgcaagcgacctcctctctctacagggctggctgtgtgaactgctccgctggaaggagaacccaagcccagaaaaccgcaccctctgggaaaacctctgtaccatccgtcgcttcctgaaccttccccagcatgagagggatgtcatctatgaggaggagtcaaggcatcaccacagcgaacgcatgcaacacgtggtccagcttccccctgagccggtgcaggtcagtgtccccgaccgccgtaccccacctgatcagggctctgtgtgccagcagtagctgctgagggtccaagtggcacacaccacaccaacttctgtcagagggtgtctcatgccaggtccccaagtacagaagacgctgtcgtcacagtgggtactgtgtgtatgtgtgtgtgtgtgtgtgtgcatgtgcgtgcgtgtgtgtgtgtgtatgcacacacaaagaaaaatgactgagaagttgaatgccaaagacagctgctttcctgagatcattttacttgtgggattgtaaagccagagcgctcacggagaattaaatctctcgatcggaaaacatggtttccatcagttcattttctataaaaaacctgtgaagtagttttgcatccaaaatccctcaaagaatgtttgattagactgaggaaaagaaatagccacatgacctagggaataccattgaactcagctgaaccttgagagacagattgtgacagattcttagaattttaagatgagtttttgctgtctttggttacatctcatttagaaatctgccttcctttggattgcgtgttttgttggcttagtttttgctctcattgagagaaataatattgctttgccatagtaattgagtttaactactgacactttccatagtctaaaattaattgcttttaagaagaaatattagttgaggtttccaacgttagaccccctagagtttggcccacaaattgttttggtaggttataagatgggcctgctgcccaatactctcaatttcagctgccaccaaagaggaccctttggcctgtctctgaatctcctggagtaagaaaaagaaagttgaggcaggagtgcatatgtgcacatgtgtgtgcagaatggaagaggagaatataaagggagagtgaggcacagtttcttgataaaaatagagaggagtggtgagggatgcagtgaaacaccccaacctgaggtttctgtctcctttcccttccctcccccctcacatgtttgggagagaagccagaagttaacacatctttatgtcacttttcatctaaatatcattatctctgccagtgcttttgtgctatgcttttgtgttatcattggtcagtttccagggccaaagtcgcagagtgaattgcccaaacttaatagtttggcaattaggcttatgaatttgtagaggcagtctcttgcaatatccacagtgatcccagagttggggatgggggtgatgagggtacacagcacatactcacccttcaggacccatcctcccctttcccttcttggtccttttctgaccgaagtctcatccaccaccagggcaccttcttttagataattaaacccgtgtactcagccacacagagcagtggctttcagacttggagatttaattgaaattaaaattaaagaggggcccaatgtaggctttccaaccttttattttagaaaataaatttatttgaaaagttttagggaagctcctatttattgtcaatatcatttcataacatactctttgatatcagacagattaatgaaatggatagcctcagacaaaagatcatgtaaatgctacagttcagccatatgaaaatctatcactcccccggcatctccactgcttttttttttctcattttgatgtgaactggattagacttctatcttgaaccaacacaaggccaaggacttgcttcagggaaccactgacttttcatggaatttttattcagggcctatcttagttcagtacaaatgaagtagaaataaaacagcaaggaaaaagcaatttattccacatattaatcacagcttattttaatcataagatggtgataaagttggaaacttagagaaatttgagataaatgtaataaaatgcattgtttgttataattgagggcctcccttcatctggatggcagctcttataccatgcctgtctgttttttgtccattaattatcatctcgttgggccctgtatttaggtagctaaaaatatattcaacataatattttgtcttatagttggccagtttgagtacagtaaatcttagaagcagacagccaattgatttatgagttttattatcttttctattagtatgtcagaactagagtatgctgacaatatttaatggctaagcatgaatctgtaatttttcttttcagttttaagcatcttgtggctatcaacattaacttctgatatcactaagagaaatgcacttattttataaaagtttatttccatcactcagaccttagctaaagagtttacaaattaggtaattttctctaaagtgaatttgcctcagctgttgaccttgagcccataactactgtgaaactcatcagcacgtcacatttctttaacgttatgcctatatctgagtgacactgctttgcaacgttgaatttatgtctgtcagcaaaatacaaagctgtggattgtttattacagtcataatatgaaaagtgaagaaaaataactgacactagacagcagaactcctgagactaaatttggcacagcctctgtgacttggggagggctgtatttaaaaacataccaagctactataaaaaggtctgtaattgtccaaaagccaaggactcggggttggaattcacttgggcctttcatatcaactaaatttttagcaagatacagttaattacctgttttagaaatcttaaaaattcatatgtagggtaatattagtttggtgatgttacatttttgtctaattagataggaaatgtgccattattaaattgttaactatgggtaaaatcagtgattattaagagcttatatatgcagcatattaaaaaacacgtaagtcctcttcacttgtggtcatggaagcatgccatttaaatttctttaggtaattagggtacactatttccaaatttttcatatatggtaaagatatgaggcagtgatttctgtgcataattacccaccagattaatctgttgtattagggtacatagatgtactggaataaaaagagggagctttgcatcactccttctccatttggtgctttctgtgatattgagaagtcccttggagtcacagcctctcttcttaagaagagaggaactttttcttgctgtttgtgtgcaaatggagttgacaaatggatagttttttattgtctgcagatgtgtttctgttaagcccacaaaaggtttagacattttaagcccttgttttttaacttttaagttcaggggtacatgtacaggttcattacataggtaaacttgtatcatgggggcctgttgtacagatatttcatcacccaggcattaagcctagtacccattagttattttttcggaccctccccctcctcccaccttttacccccctatcggcccctcaagtccacatttaaaaattagaagatatcacataaaatctagaaagtcagaagatgtgatccaagctcagagttttatgtggctggagccaatgtcctttctgcagggcacacacttactgtcctgctgccctggtccctgtctcccctcctctgagtgtacatgcatatatagctgtcatgtgatttcttgaggcatctctcctgtcaggtcacctgaccacctcatcaaagccacaagtgcctttgccccatggctccaatttctttgatggtagctattacatgccatttatttttatattaatttattataattttataatcccaacaaaattttttgcatgcttaagtgcatgtttgatggcatttctcttcagagatgaagcaagattatagctgagaccacgctgggcctgaaccattgagggacattgtcagccccagagactcaccagccctgggagaatgagacggttcttccttgggaatttggatttctccaggtgttgtgtagctttgatgtcatattgaattatctggtttatccaggtttctctttagtattctcagtctcttcagaaaccccgatttaagctcctgcttttggaagctagttcttcaggatctgaacacacttcgtaagctagatcctgtcacatcatgaatccacagttggaccagcattgccccagggtggtgagaattggttcctggggagcataaatatcttagattcacagtggtttgtggccctccaagggaacttggtacataaagagataatatctctctggtattaaaatttcataaagaggggccatgattagacaaaaatgccccaaaaaccttctgaggggatcagtagtgaaacacaagttgagaaatactaatctacataatgtttctagtctgtgtgtagatagcacagaggagagaccttgtaaggcaaaccaaaccaaagcatttcatgaaaaagaggaaataaattccatttttcaccccgaaaggttggaaacaaaagtatttcctgtggttgtagtgatttttctcccaatagttattataacccaaggccctgtgctgaatagatattctcagcttagaataaaacactggttaggttaggttcattactaccaactccgttttacaattggaaaaactggaagagagacgtcaagccttgcctgaagccagggttgccagcggaatgaaaacacaggcgattttggcatccagtctttcctctgaccacacttccctcatgcaggagagaagaaaggacattgctcatgctatgactaggtcattgagtgagggtgattagggagcacttgccaaattgttcctctctgtgtcatttgtgctttattgtatttccaccacactgtttccatgggttattttgtaagttcaggaattctgagcttgctgctgtgtggtttcctgacaagtacttgttttaaaattccatgccgtacattgaataagaatgtgagactcggttagtgacagtcagacaccagcattgtcccttgacttgtctgggttgcttctcaggcgattttcaacattttctaagccacagactccctgtcattggtagcaaccaatgattctcaaccaggggagattttgcttccatgggatattttggcaatatctggagtcatttttggttattataatttgggggtgctactggcatctagtggatagaggtcagagatgctgccaaatatcccaccatgcacagggcaaccccccaaaacaaagacttatgtgatctacaatgccaagaatgaaagcttgtgccagtaattgcctaacagtgaaagataaaaaatcattagtatctctgagactgattctgagttttgtctgttaaaaaacccagtaataataatggtgacactgctgctgcttctccttcatcttccttcttcctccgcccctgcctcctccttttccttcttctctggcagtaagtagcctttttgagagccaggctttcaaaatgtgagattttcacatgtcttatcttcttcagttattgtgaacaaccaaaggggtggttggtttttatctattaatactttcacagatgagaaattgaagcttaaagaagttaaagtaactcgctcaaagtgagaacttaaattcacatctgtctaccttcagagtctgacttttatcatgtgctggaaagcactgctaacgtgcgacagccagcattccctgaatacttactattagctgtctgctgtgatgcagagctgtttatgagatcttcatttttaaccattcactgagcagatctagttctgggagttttcttatttacagaacacctaatgcactgaaacccacaaatcattggtgtgatgtcaaagaactgatgtgactgaaatttttacttttcatagctgctttggcatttttgaggtggcttcagaatgtgcctcttatcgctaatgttcaagtgcacttcagatttacctctcagccctgggaatctgaccctgattttctactccagctgcacagactgtatcttgatttgtgaacttgcttcctgaaggacatcttccagggaaacaaataaactaattaatccattaagaatgtttacaaattctcttaccgggttactagaatttttctttcaccttggattcattccaagctcctattcaaagcctactgtgtgaatgtggctccagagttttgaatccccactctagtcctgaggagagatgcaaatgaacacttgcatttgtaataaaatattgtagcagttgggtagaagtaggtcctcccttgggaagatgttgggagttcctgactgtcagtgaggctgcactagcatttttcatgttgatattatgttgttctgtatgtatttattcaacttgaagagcatccttggtttattatattactaggttttcaacatgtcaaaaattttaaatttgtcattcaggaatataaagagatttgaaagtcatttgttatcaattctttttactctaagagacagttattttcatcttgggtttatcttccaaagtgtactgaacaggtttcctttagtgataatcacaaagctgaagaagttcattacagtcagtagattagacattagctatggctttgttttacctagagatttttaaaaactctaagacactgtacaatttaaaaagtaggcaggcaaagtaggccaaagaaatgtgcagtttcttaaagttgttaaattattttcttttacaagacaaattccagcttaataattggagatgtattaaaagaaattgaggatgctagaacttcatgaaaatccaggtgtaggactcttgagtatggttaggtttctctgaatctggaactgggaattcagcagctgccatttatggattcaccttctcctttgccatcctgaacatagtattacctctttctcatgtcaacttctttccactacaagctttacttccaagcatcatctgatttaccatcttctgtgtatctctgtctaccttgtaacttctgcatactactcatagtgtctctgcattataattctgcctcctccacaccttggcctgcccacggttcgtgctctacctcatgactttttaccatgcctttgtcaaactcactttctcttgcatactccatatttactactttaagttcatctaagagggaaattgactggttaaccttatcctcctgaaggctgactttcttggcattcaatttccaatcagtcatctgaatgcctaatttggaaggcattgcattttgaagaaagagctttgttgggcaaaatattagaataacctcaagaagattgggaaatagaaagccacctggccatagatcacttgtaggtaacctgtgaatgagctgtctttgggctggaaagttagggccttttagtggaacatggcttctagtaccctgcagttaccagggtagaagaatacaggtatgattaacaagtctagaacaaacctttcattatcaagagagattcatatgacttcttttttaatgtaaagtgctgtgggcatgcaagtagtaggaaaccaatgcctaagggagattttcagttccatgtgtgtccagagtattctacctttttattctattgcagcttttctaacatttatcatgtagtcacatatgtttagtgactttcctgtagaagctgataaatattaaacataaatttttatagtattctcttctggttctgctaatgtatttttttaaagtcagttcaacattttactaggcttatcattttaattactgaagttagcttttcattcatcatggggtggttctaatatttttgccaagcagaactcctcctatgagtgactggacctccataacacgccgccttccaaattcaacattcagggttagttgctggttggaagtgaaatgtcaaacagctgggttccacttcgctcagtcttttcctgccttctgggaacatagagaaccctggtttcttgagtagcttgttcttccattattgctatgtttctttaaataatagtctaatttttatattctgcatttttgaagggcaatgaaattcctgcaccttactctcttggtttttagatcctaaaattgagtagaaggcactttgtccaatgctccctataggtaaatggaatcacagtcagttgtgtcatttatatcggtacaaaaagtcttcatggatacaagcccggtgctcagaaaccactaaaattgctaatatatattgtctttctattttaatagaatattgagatttttaaagttttttaaaagttttgggatagcaaagtactccttagacatgttttcatagttttttccttctggtgagagtaaatgaagccaggtataatattaaacctttagtgccttgactttttttttttttttgacattttggtaggaaaataaaactaaacagaatgcttttgaacataaagcttcattggctttcttttttaatattgctttggaatttgttaggtgctggttttgctgttgtcctattggtcaactcaatgttgctatttatccccttctccttccccttccgcttccttccttctccctccctccctgcctccctccctccttccctctctccttttacttacttaaaaataaaatatgaaacactctttacacctaaaagaaggcagtgactagtacattttgtgaaagggcaaactgattaaattgagcagcatagagcaatgagaaagacagaggcaaaataaatagagactacggtagaaagtgcattaaaatgcatccttctttcccttcccacccacaaaaaacaacaacaataaatctaaactaaaattgaggtacttgtagatattgatgtgtcattgttctagtcaagtgccttgtcacatttcatctgtgagagggcaaaccacattcctttatacttgtatagatagctagcaaagtctggcttttggaaaaaaatgattaaatttcatcgataagcctgctgttaggcttcaagttatagacctgattgagaagatgggccatttttattctcgcgtttttacttattcattcaacaaatatttgtggagtttcttgaatatgccaagtgttattccaggcaccacatatataacagtgaaaaaaaacaaaatttcacatgtacattgagcagttttctcctttattcagaatgtatttttaaatagacctccattttccctctggctaccttgcattattctaaaattcagactgtaaattagtggaatccataggttctatttcttcctctgttcctgaccctgggtgacatctttctgcttctgtttttctagctgtttctagaatggacaggtaatatctctgaaacacgttaagcctctcagtgatgagattaccttaaaagaacaaagtgtggctatttgaaggtatcaaaccaaacagaccttctgaatctattctatagagtctaaagtgatttacatagctctacaaagaatggcatctgttgattaatgatcaagtggcattttaaaaaatagttttgatggaaaacagatagataataagtgtgtccactccaaccctaatttctccctgaccacacagataaacacttctctttttatgtcctgctcatatttattctctccagccagaatgacttctccaagttagcaaccttatttacttggtactgaggtatgggctaattcatcgttagtacatgaaccaaaccacctggctcatttggtgtgcctttaataaagctgtggtccttggaaggttaggtgtgtgaactagtccctcttaataatgagctcttatggcagaaagtcacatgctgttctaggaagatgggagccttcttcacattttctgtttcaattttctaccagagtgcttctcattgataattgttgatttcaaagatagtcatcgtcattgcagaagaaacagaaaagaacatctgcagaaaagggcttccccacctgggtagatgaaattctcattatttcactctgtttggtcagtgcacttgtttcacatactttgatttgggcccaatcactcacacaaggtcataaatctaggaggtaattaacagttgaaataggggatgaaggtagcttaagaagctcaatcccagttgcgtttctgagaatacaagcctacctgctggggatctggacttaacaaactcgatctacaaatacatactaatacagtcattgttaaagcattttggactgtcttacttaaaaaatatttcagtacaatgtaaaacgtccaaatggaaatataatttattttaacctccatttcttctttttaaaaaaatacttaagtagtataagttgtcaaagagcttatacaagtagactgaaacattatctctgctggaagcatggcgaggtgtttggatagagaggaaaggccactggaccttcagaagatctgggtttgaattctaggaccatcactggaattggagctctgacgttgtagaggctgcttaaaatttctgaaactagtttgcgagaataatcccaaattgatggggttatttgaagtttatatgagatggtgattgcatagaaggcacctgagaaatgttagtagcttctgagcgttattagtattaatcttaaggataaaggggataattcttactgaaaagagcacagaattgaatcaaggatggtgtcagcatagaattttatattcagcaagataacgggagcatgcctggcctctattgtttgcatgtagtacagttgttttaagacagatttagagactcagctgtctggtttcatatggccttcctacattttaagctttttttaaaagttattataacttatttaaaagataagtgagaacttttcttctcagctgtgaatgaaatccttctgtagagcataataaaatgccattgggtatgacaaaagttggttagtgctttgtttttttttttttaagcttaaaaagcaaaaaggctacttcagcctctgtatcatctctgagacttctgctgtccttgctacccattagcatccacaaagttgtgaaagaaccatgtagtgatgatgcttgagactctttggtgcagtattaaataggcatctcccccattagcagatctgtgctggccttggtggactcaaacaagggaaaataaatattctctggtgttgagttcctcagagactaccaggaagatgaattcaggctaccagaagatgaattaggatatgaagtgacaagtagagtgaagatgcagaacttgctgtgatcccaggactcccttcagtggaacctctgtgctgagaatactaatggcctattttcacatgtatgactcttccgggaatgaccacctggaattctacctctttccctcccatgtatgcaggtaaacaggagtggacttacatacactagtgtcattgtagaaggaatataggatgagctctaatttactcaaaccaaacaaaaacaaaaaagtaaaacatttgcaaattttactattttaactattgatggcaacaaattatttgaagtgtagttcacaacaaatacgtaacaagtcatggctttataaatgaaagccacagggcaatgtatataaccatttaattttaattttaaaaaatcgtatctttcttatataatagaaacaaacacaaatgcttcctttgaaattagagttttctgattataaactttgaagtgcatttaaaatagatgactgggatttaagtctaagtgtagtatggctttaaggttaaaaagtttccaaatatttaaaatttttctatatgattattgcccccacactgaggatttctgggtgttgtttcagaggccagagcatcttataaagaataaatattactctctatttctagtttcaatgaacctttgacccaataagagaaaagatgacatggtaaagaaaagggcactgtaagtgacatagagtctagtcctagggctgagtgtgtgaccttggatgaggcatttcactctgaatttccatctactgttttgttttcttttgtttgttagtttgtttgagacagggtcttactctggttgctcaggctggagtgaagtggcacaatcatggctcatagcagcctttacctcctgggctcaggggattctctcttcttctacctcagcctccaaggtagctgggactacaggagcacactaccatccctagctaatttcttgtatttttagtagagatgtggtttcaccatgttgcccaggctagtctcgaactcctggactcaagcagtctacctgcctcggcctcccaaagtgctgggattacaggtgtgagccactgcgcctggactccatctactgttttctaaattattacaacatgaattaggtgattgcagagaccccttttatctaaaacactcatactgtgagttggctcatccatttctaatttccatttgagtattttaatgagggtgcaaaatataaacaacaacaacaaaacaaaacaaaaacacattgctcctgggaggttcaaatgcattttggaaaaacaaattagcaacactataacagattatgaacatcttatattggactcagagacccagttgattttcttatgactgatagttttggcaattgcaagagaaagccagccactgagttttaaactgtcgtaaccaaacctacctactgtggcttctcagctgtttctgtttagtgtggaaatctaatgtagctgcaaactactgctgatttttattaagttgaagtctggaacttccccttgtaatgatagaaaagcacactttcaattaaaggaaaactgccaaagttctgaaattcatttattttattattacttggtttgaccctagaaatgggagatcaagcaaactagataggtttgacagttctaaggtcacaagttcaatttcctcacaagttgtttccagatcaaattcactgcaaatcatataacccttcaccttttgatatagaatattttatggaattgtggatcacattggggtcatcctaataatcactttggggctgggaaaatgacaggtaagtcaggccaggcaaagggattcagtgagcaagtctgggaagcagtatgtggcttgtcagaggaggaacatggtcttgcttctctatagtagagtcagagtatgctggagaaagcctactctggcttgcagaagccaattgttaaatttttagaatttcaaaagctggttgttataccattggcagcgtgaaactggccatggtgggattattcacactacaaaaactggtggattatccaattggggctttttttttttctttagagacccagttgttaaatatttgccagcgaaacactgagtagactccagttaacttttttatttcaagctctttggccatccgtgtattatttattttttataaacaaaacttgctgaaaacaattgtatgaaagaaaagtcaggtgtttccagaactgattgtctgattggtaatacagctcatttgatcatccagataacaaaaatgtttatttaaatagcagttgttcctactctttccttgtcatgcttttctttagtttaaatttatttcttcatgttcaaacatgtttatctttgtatttctttcttatgcagcgtacaaagctcacttgagtatctggttggatcaactttatagaatctgtagcataatgagtccataatttgtgatttcctagtgccaaacacccaagatatttgaggagtctaggtagaaaacaggaacaaattaacagttattttttagatatgataaactcaaacagtgcacctcaaaaattaagagtcaatttttttaaaaaaagtaaattagggagctaaaatctatgatgtgaactcttaaagatgaatatatgtgaatatggaaaggtattcctgtttctgttatgatcaaaatgagcagaaggtgctaaagtgagcatgtactgcataagtgcagtattcacatgcaatgattttttttaagtatagtgttttgcatttcatgtttttttgacaatgcaggtcaatagttgtactcaaaagtgtggtaagagaagactggcaaggaattgtggtgggccaatgtcaaatatttccatgtggtgtaatttagggctacacttttgagaggaactcttatttgggtgcatcatgggaaatgaaagcctcccaaggagacaggggctaaaatagttaaacagcatgcctagtaagttaacatagtaatgaaaggaaagaaccaaattaactgattctttggttgtataacataacctggatcaaatgcatcaggatggtctgttagttgacaattcttcaatagatcttcatattagaactactgatttaccaggagagaagaaattttcttgtcattttgttgataagaaatcaaccagtttgagttcctaatacagatgtagtagaggtggcatgctgtactttgatgatctctatatatttgtatatatgaagcagagtagtactttataccatatgaacatgtaactgtcatctgtgttctgtgttgccattcctcacatatagaacgtgtatgtaatcagtttctatttcatgtcatattcatctacatttgcagcatttcaaagattagtcggaaacatcttggcagaaatgggaaatgcagagttacttataaattccagaactacaaagacacagatcaaacatatgatattaataactagttgggggggagcattaaaaattagattatttagaaagttgaaagtatttgtgatcatttttctcttcttgaaaggaaatagatgctgagttttgtgttttgttttgttttttttctcccaccctcacatttcctttctccccctttttcatgttttgaattaaaagctaaagacaggctgaaagggtgtatatataactgcaagaaggatgtggtaaatcatggcagtggtttgtgatctcacagacatggtggtgtcagagactgaataccaaaagcgaatcctcagcttccaatggatttacttgaaatccttcacccttgtagcatatcatgggtaatagcatatcatggataattacatttttacaaacggtagagaaaatcattttgacacacacatagtattttccagccagaccagcttttcaatcttttatagctttcatgcattaaggctcatattttctttgtttatttaaaaaatattattaataataggtttgttctgtggtcaacttctgaatagaaaatactaagaaagacccctttttttcctgttgcccccaagtcaaacattcgataccttttcctttgtagaagtttgggctactcgagtttttgattaaggaaagttatgacaaccaaattttcatggagatttttaagagctttggtcatttttcagcttattgctatgtataatggaatgaattatgtttggtggcaaatcactagaaaaaaagaaaacaggagaaaaactcacaggagaaatactgtcattgatttctttgctaccatactactgtccaataaagtgaattctggctgcatgaacctagaaaaggctgttcccactagccattcacctgcatcaaaattccagggaacagaaaaaaattaggggacaatattctcttttcttaaccctttctgatcaaatgtggtatttcattttgaaaatgagattaattcccctaaggcttttgaaactttaataatacacaataaataaaatcatatctaataataactcaacagtttcatttggcaccatcatctagatgtactgcaactgcggaaacataaatacttgcaggcttcaaaagccccatttctatttgctaaatacacttggctggcttaaaattcctctgtgtaccatcattaatacaatctactttgacagcatttaattaaagtgctttttctctattaaattcattaaaagttctcccccactccccaatgtataactgctttccagatgctgagtggcaaggacctataagcctcactttaaataacttctcatttctctttataaagtgtttattacattcaatttagaaactgttaaatatggcttagaaaggaagtcagattccaagacatgttctctatccctttagccatctctttaaaaacaaatgttagtttaactcatctgaataagcatttattatctgcatatttttcttatactctgtcaacactactagacatttaaactgggaggtaataaagatatgatttccacatcagggttggggaatttgcattagttctaagcaggtacatggcttgaatacatttgcctgcccagattcggggagagtaagcatagcagtctagtattaataggttattgacagtttaatgtcttggcacctacttagcccatgcagtataataaccaggaagctgtctgatatgaaagccatcaatagcattttcaatcaaaacctttcagttaattgctggttgaccttagagatttcctttaggcaatagcattcttagtttagaccaaaaggaccatattgatttgtagagtttattcagagatgattatttaatacccattgctccactatgtgtggtaaattttgccttttctctttctgccctatgaagtgttttttttttagcattgcttttcacaaatattctttttaccagctctactttcaaaatatctcattaaatctgttctcttctcagaaatagaaagtttggaatcttgagggtacccttaatcaagtggtttttgtttgtttgtttttgtttttatttttatttattttttttttgagacagagtcttgctgtgtcccccaggctggagtgcagtggcgtgatcttggctcattgcaacctccgcctcccagtttaagcgattctcctgcctcagcctccctagtagctgggatttaggtgtgtgccaccatgcctggctaatttttgtatttttagtggtgactaggtttcgccacgctggccaggctggtctcaaactcctgacctcaggtgatccacccgcctcggcctcccaaagtgctgggattacagatgtgagctactgcacctggcctactcaagtgttttaatatgataatagaggtttgatagaactcgttgctcagcatggaattataattccaatagagaccctgacaaagctaaaaactgtactctcagtaagggtaattatataatgtcttaaaagcactgtaccctaaaaaaatgttgttaaatgccaaaatgctttttgatttctgcaagtataaatgaaatggctcatatttggcctctagagtttcttaacttccattatttattcagtttcagatgcatatttttagaagtaaattttgataaagtctaagtaagctacgaagacaggcaaaaagcagtaaagacagtttgtggctctaacttgaaaccattctctttgcttactttggaatatgtggtgttggaactatagaggttaaatcaaagtgggggcaaaaaaatatatacattgaattaattttgttactttttttctttgttgtttcttcacaaagtctctctttgttcattctgttccaaagaaaatcattctggcatttaatatttgttttggacaagacattcagtgttttctatagtattttgtatataggcaatattctttcatattttgctcagttgggagccattgacaattcagaattttattgtgatacatatgatccattttttaacaaatacttctggcttttataaattctgcattgtttttaaaggtttcctttgtttgtcttatatggattctctcatttttatttgttgttttgctgttttgcctccagcaacttttcttgtcatggaagctgtctgctgcaggccctttaagttctagtgatagtagaaatatttctgcagattggggagggagagagagaagcaaactgatgaatatgtcagtttttatccctgagaataggaatatcctatatatttcttgagtgttaataattttcaatcagatttttttgggaattaaagaactgtgtgagtcagtatggtatttattaacctatggtatttattaacctgtatacaaagtgtatgtgtgcatgtatcaaattattataaactatgataactcagctcttttcggtaataagtgtatttttagtgagtgcctacatagatttaatactttatttccccttaggactattagatgtgttctaaatttaaggatgactttcagtctgtgtaatatggctattgcctgtgtagacgtatatattcattcaaagcacagtgccttgacattgtgctaagtttagagtatgtggaggtgaatataacacagaatctacccttaaggagcccagagatcagtggagaggcagatatgagagcagatagctataatacagcgtataagtaagagaaagaaaagcacaaaaggggcatgcctgccccaaacctggtgagttggagaactcagaaggcttccaaggcgtagtgctgctcatggctcttacagattcatcatcagaggtttccaagaaagggtgacacagcatgagtctgggggctccagtgtagagttgttggagcacagcctgcaaggcaggggctggggagcaaggaccagcaggggctcaggctgcagtgaggttacggggccttcttgtacacagaagaggcctagaccacctgaaggccactgagggcctttagcaagatgttcggttggctgtgacagggaggcctgttgggaggaagtcagagtaattcaggcaagagattataagagtctgaattacagcaatgggagtacatctggagaagggaaaattaatccaagaactgtttaaaaggaataatcagcaacacgtgggatcaactagatgtggagttttagttgaggggaaggagtcagtgagaactctcagatcttggctggagcaacctggggggttggtcttggagtaccaatcaagagcgttaacgattaattccctgctaatgtcatttgtaagtatgtttgttttgtactgagttctcagctattaaattaaatccaccccgaagcgtattcacatttgaaagtataataacttgacagttccagtttctgaagacgacctacacagggtaagcaaatatgctcagaaaagccaaggaaacgttgtgtggagacacaattggacttgttttgtgaatctgagtagataaggatgctgaatggccttgtgggagtaacatggtcctctgctgctcggagactggaatcttgcttgtgagaaaaggagttactagtccagttactttgccccagggaattaggaactgagatttctcttcccagtgaccatccttggacccctgggaaaaggagactcattttcttgagaaagccgtgatctaaacaagagtgcctgtccttgttggcttttcacttctcacccgatatacctgccacaaagttgagaagcaaaatctgtccatacctggtttcaggtagtaagatcattaatgtggaggatacaaaaccaatattcccataatgaattaaaagtggtttagaatggaaaagcctaccctagaattaagagcccaaacttttgggaagtttctacctcacatatttaatttttccatattatttttctcttgcaagaaaataataccaagaaagccagtctctgatgaaattaaatgaagttgaaaactaaaggctatgtctgataagctctcacttgataccttttaagagctaagccaccaggaatctttgctgcctctccctagagatcaatggcctctgcctcatggtttgaggcgaaaacccttctttgatcatttgactttgtttacccagtttggacttctgggtataataaactataatatgtcagtggtgtggtaatgctagattttttttttcttttaccagagtggttgattataatgcactccttaagatttactttctataaaaggaatatttgtacttttatgtgtttgattcacacagtgcagttttctcaagtcctgttattaagtggttacattcagaaagcaaaaaatatgctgaggtagtattttcttggtgaacatctaatattttcactaaccataactgtcagattgttctgacttctgagtaccccaactgtaaaaattatacagaaaatgtggcctaatgtgggattctaaatagcctcatgtgaggcttcaaacacatggattaccttctttcatctctttcccctgaagtaaagcatctcttccaaacatgctttctccttaaataattgaagccctgtcttttaagaagctgtaaaacacttcagttgtgatgtcactagtgccattgtagttatggggattttaaatcctaaactggttcttggctgaggtttgtcaggaagggtctctctttatgtgctagcaaattttgatgaaactgggtatctgctttgtaaaaatggtacacagagatagaaatgtaaaaatctctttataacccactctaaatggacatttgggagagaaacttccccataaagtattctaatttttcctaacatttgtgttgttttcacttttaattccaaacttgaaatattgaataatagcctctgtcatttatagtgttattcttagagtctagtagattttagttgaaggtgtttattcacactaaaagaaatttgtgctaaaaacttaaattgaaacagaatataattttgtatttttctccattagctagctaaacagcagtaagcatatatttgttacatgttagactcgggggtatgtgattttggagtcagagctcaattttgtgtatttgtttcttcctctgaagaataaatgcagtagtacctgccaatattgtgagattatttcattctttttaagaagtaagaaaaacaaaagatgataaagagctttgaaaataattacaggatttaaataattacagaaatttgatatacgaccatggagtcatattaaataatctatgtgtaaatcagtaatagtaatgctttatttcagtgaagcttacataatttattgagatcctatgactgaaagtatacatagataatctccccccccaccacacccctccatattatccttgtttctaaatcatcctattctaaataggtgttttcaatttatatttttcatcactagatttataaatactatgaagggatttggaaatggtttgaattctgactctttggtgctttaccttaggaatcattatttaagtcttcattgacaattcttggctgactgagtgatgtctcttcttattaaatgtatctattcttttccttcatatatcttaaaacattttcatttaaaaggaattaaaactctgctctggttaaatttactgggtgaaatgtatttatctgaagtggtctctattctattattttaagcttaccttgaatctgttttaaaacaagtttcaaagctcacaaatcatgtgtcactggcattgatgaagttattttcatttgggtcacatttttacttcacttgagaattatagagccagctggattaactatttaagcattctgagggatcatgcttaatctgaaccctttgcacatctttctttcttagccttttgccattgctgaagtattagaaatttccaggttggttcttttaatatcattgggatcgtgtggtaccaagtcatcctaacctttcatcttcctcatttagttacctggttatgtttaacttaagagtatcttctttcatgtatgctggtgcaaaagccacttttttttgcaattatacccatgaagcaagtcacacatttatttaaaaatcagaatcctagaggtaactgttaccctgctcatttccatcttactctttattcgttttaaccagatgtaaggtctttaaagacactttaatctgtgccttgaattgggtcttcaagagataggcctttcctgtgaatttttaggctaggttttgtgttctgagaatactttgtgaagagtggtggaggagtgtcggaacagggagaaattagtgcttatggatgtcaggcaagtgagcgtgtggtgggtgggctggggatggtatctcccaggcataaggacacatggtcatagcccggactgtcctaaagggtccggtcttcccaagtcttctcatggattgtgtttgttgtttttgtggaatggttttggtcattcttcccaagtcttctcatggattgtgtttgttgtttttgtggaatggttttggtcatgttagccctagatgatcaaataaatctgtttctcagatggtgctgattaagggaaaggtataattgccactaggtacatcatgtgtccatgcttttcctcaggttctaactggagagtggattgttttctatactctcttcatagctatttgatatagttcctcatctccttatattgaagaagcatttcactcagccacctacctcttcagtatttgcagattctggccactcccagcaatcagattaatgactgtgatacttttttttttccccaaactataccaaagctgttggtatagttgttctcaatttataaccaaagaggaaatgatataagccaaaggctgttttaagaaccatgcttcctccaaaacccaggtttaacagcctattgtgtcacaatatttttatgcttttatctttgaccaaagtgtttattttgagaaacaattattaaactgcattaaaaacatacacagtgttccagtagtatcttggttacaatatttaaaaaaaaaaaaaaaaaacagactaaggctggatgaaattgaacacatatttccatgtcagacttcctaccattttgcttgtttgtattgatttctcttgacatggtcttcttttgttgactgccactttttttttcttattctctttctctctctctctctttttttttttaaatccctctcctatagctgtatgtgctaagagcaattgtaaaagagaaccaacttatattaaatccgcctggagtcaaaatgtaatctaacacctgtagtctgcaatttgtcatcacttcatggatacttttttttttaataacagatttcctgagttttgaccttaggatactgtgtaatccaaataaagcaacaaagctaaaccatggttttttaataagtcctataatgttaggatgtgaaattacaatcataagagccaacttaagtaacatcatttgaagttagaaatagtgctgagttgtgtatctaggagaatatgttttgcctgtgaaaatgtctttgtgtgataaagtcaggagacaaatcataatgcatgtgtaatttctcctacactctttccctaaggctttcctaagtgattttctcctacactctttctctaaggctttcctaagtgatttgactcaagtaaggatgtttttactattgagtgtgattcatgtcatccaaagttttcaaactttttggtctcagaatctcttttcactgttactattgaggaccccaataatgtgttatatttatgaatattaccatattagaaattctgaggaattttttaaatgcttactaatttaaaaataattatagataatacacagtcatccccttgtatccacgggggattgattccagaacttcttgcagataacaaaattcatggatgctcaagccccttatgtaaaatggtgtagtatttgcatgtaatgtacatacatccttccatatactttgaattatctctagtttacttatgatacctcatacagtgtaaatgctatgtaaatagttattatactatattgtttggggaataatgacaaaaaatagttgatacatgttaggtacagatataaccattcttttttttttctaaatatttttgattgtggtttgttgaatccataggtatggaacccatggatatggtgggccaactataaatgcatatatgtaaatgatatatttatttcacaataaatatattttcaaaacagaaaaataatagaatgccaatgttttatatacttttgcaaatattttaaagtctgacttaatgaaagacaactggattttcataattgcttcagcatttaatctaatacaatatgtggttttggttgacgctggtgaggcaaatccagcctcaggtagatgtgtaattacaataggaaaaaatattttaatctgcatttcagataattgtgatattcttctttgatactagagcaacattctacaagtggtagtttcttaatggttagttgcaaagtggaattgaatctaaaactatattgatgaacttttcatactttttcttttacctattcataactttataacatcatgcatgcatttggaaaatactggtttactgtattttgtaaggttatgcagcccttacaaatgttggcacattttattatatgacatatttaaaagcaaaaccaaacatatttgttaaatcaccactgatatcaaaaaagttaagtactgggaaactattaagcatatggtggccactacaagtttttcaaaactctaatttttgcttgaaaggttaaaaggtataattggcaacaaatgctgtcagatatttttcctggagtgataggctcactttagttttaaaacaatgtcaaatatgcagatccgaataaccatagtttgtctttagttgttctttcaagtcaaattgatactccatgacaaagatgggtggctcagctttcaagtccaacaatgacacaagtgctctttctcaagacaaccatcttccctcagtatgctacagaagtacttcatatgcgcttcccatttcttcacacagtacattaaaaagacgtatactcaaggattgagacttaagtaatacaattttactgcttcatcaaagatgctcttaaatgaaagtggcatcatttttgccatgagcgtgtggcagtgaaaaatacaactgcctggaccatttggtgctgctgctttgattgttgcaggccagcatttcccaccagtgcttttgtaccattggcaaattttgaagtgtggtctatgcaataggcccacaacattgaaactattttcatagcaaatccaaggcattatttacctttttgactttgctgaaatttgcagatggtacaaaagcactggtgggaaatgctggcttgcaacaatcaaggcagcagcaccaaatggtccaggcagttgtatttttcacagccatgagctcacggcgaatttcagcaaggtcaaaaagtttatgtttggctgggcgtggtagctcacgcctgtaatcccagcactttgggaggcagaggtgggtggatcacaaggtcaggagatagagaccgtcctggctaatacgatgaaaccccgtccctacaaaaaatacaaaaaaaaaaaaaaaatagctaggcatggtggcgggcgcctgtattcccagctactcaagaggctgaggcaggagaatggcgtgaacccaggaggcggagcttgcagtgagccgagatcgcaccattgcactccagcctgggcgacagagtgagattccatctcaaaaaaaaaaaaaaaaagtttatgtttatgttgtaaataatgtcttggatttgctatgaaaatagttttgatggcatgggcctattgcatggaccacactttgagaatcattgataaagaatgtcttcctaagaggatgtcaggctgtatgtatagaaggtgtcaccttaaacagactgtaacttgaggctcaatttcatgtaacatatgcttcagaggcaacttttctgtgccaggtgccattttaagtacaaagatgtatgtagtatttgagtgaaagaaataagaaaagttatcagtagatgtgcctatttgtagatctgtggggtgaaaaaggtttctgaatttgttgcttttataataagcatgttgatagaaaaaatgagtgactcattatactcctgattcttaaatattcctcacgttttgtaataactactactaattgaaaccctacttatgacttcagaactttgctgctacatacttagcatatattatctcactttccctcctaacactaccagcactacaaggaagattttacagattaacaagcactgtggctcagagagagtaagtaacgtgctcagaattacaaggctagtaactaagcagttgtggttttgcagtagaaactggatttgaaaccagaactttgtgacctcaaaacttctccttaccacgtgtatacaatgccatcttataggttatacagtgccctaggaatttttttttacacagaaaagaattatatccctactctcagatacacactagatataaattcctgtaattagtgatagcttctttattttttaaacattcttttgctaaaaaggaataatagcaagaaaagtaataactagttttgctgaacaagaatagtaactgatctgaaagtaaagaagagagaatatgggccgggcgcagtggtttacgcctgtaatcccagcactttgggaggccaacgtaggcggatcacgaggtcaggagatcgagaccatcctggctaacatggtgaaacactgtttctactaaaaatacaaaaaattagctgggtgtggcggtgggcacctgtagtcccagctactcgggaggctgaggcaggagaatggcatgaacccaggaggcggagcttgcagtgagctgagatcacgccactgcactctagcctgggcgacagagcaagaccctgtctcaaaaaaaaaaaaaaaagagagagaatatggaatgcagcgccacagaacaaagatactgagcactaattgtgtcccaggcatatggtatgccaatatgtagctcacagtccaacagtgacggagacataaaataattacattgatatttacattagttattaatcattaaagttctccttactgaatgtttgggccaaaattaattgtccttaatgctgattttgaaaaaaggggaatattagagggtagagctaggtttttgaaactttcaattacatgatattttatatatagtccatttaaaaaataatagcatgtattcaatcatctattcaacaaattctaattgagttatgcataaggactttcaaccaattgttgttacttttaagtaaaaaaaaattgtgtgtgtgtgtatatatctcatatcatcttgtttgtgttctcatctcctattaatgtaccttagcctacaggacctgaagctttgggtgaggcttgtcatagagggacagacgtgaccacctgggaaactgttttaacctattactacactggatcaaccaccttatacagtcacctccttaatgatttctcatatatatgtatatatacacacacacacacacacacacatacatacacacatgcttttttttttttgagacagggtcttgctctgtcacccaggctggagtgcagtggtgtgatctcagctcactgcaacctcccgctcctgggttcaagcaattctcctgtctcagcctcccaagtatcgggggaacctgcccttgatagtcaagtaggttcttttctattttccctaagtgtcggccagtctgagaaataaagggacagagtacaaagagagaaattttaaagctgggtgtctgggggagacatcacatgtcagcaggttccctgatgccccacaagccgcaaaaccagcaagtttttattagtgattttcaaaaggcaagggaatgtacgaatagggtgtgtgtcacagagagcacatgcttcacaaggtaataagatatcacaaggtaaatggaggcagggcgagatcacaggaccacaggacaggggcgaaattaaaattgctaatgaagtttcgggcacgcattttcattgataacatcttatcaggagacagggtttgagagcagacaactggtctgaccaaaatttattaggcgggaatttcctcgtcctaataagcctgggagtgctacgggagactggggcttatttcatccctacagctgtgatcgtaaaagacagccacccccaaagcggccatttcagaggcctaccctcagggacacattctctttctcagatatgttccttgctgagaaaaagaattcagcaatatttctcccatttgcttttgaaagacgagaaatatggctctgttccgcccggctcaccagcagtcagagtttaaggttatctctcttgttccctgaacattgctgttatcctgttctttttttaaggtgcccaaatttcatattgttcaaacacacatgctctacaaacaatttgtgcagttaacacaatcatcacagggtcctgaggcgacatacatcctcctcagcttacgaagatgatgggattaagagattaaagtaaagacaggcataggaaatcacaagggtattgatcggggaagtgataagtgtccatgcaatcttcacaatttatgttcagagattgcagtaaagatcggcgtaagaaattataaaagtatcaatttggggaactaataaatgtccatgaaatcttcacaatccacgttcttctgccatggcttcagccagtccctccgtttggggtccctgacttcccgcaacacccaagtagctgggattacaggcgcgtgccaccacgcctggctaatttttgtatttttagtagagacagggttttaccatgttgtccaggctggtcttgaactcctgaactcaagtgatccgcccgccttggcctcccaaagtgttgggattataggcatcatctaccgtgcctgaccttaagtatatttttcttggaacttttagtaggataatgctttccttttttggatcacagtttatgttctgttctaaaaaatgaggtaaaattggacaacaagtcaaaataattctaatattaacccaaaataaacgtggataaaagtcattttgtttgtgttctcatctcctatgaatataccttacgctacaggacctgaagctttgggtgaggcttgtcatagagagacagacgtgaccacctgggaaactgttttaacctattactacactggatcaaccaccttatacagtcacctctttaataatttctcattttctctataaaagaagaccacaaagtgttggcatattataagtaatccagctcaccccataatgatacagtgaattacatactttcctaaacttaatcattcaagatctcacttccttccctacaggcaaaaagcattatattttacacttggctcccagctggttttcattgaggccttcagaatccatttgaacactgagagctttaagaagagctgctttatctttcttagtcaactttggtcatggtaccattaggtctttttgttttcaaattttgaaagcagagaaacaacatgtgtccatattataattgtgctttatgactgggcaaggaactttgggtttcatttgcagttaatgtctcttttgagtatatttacaacttctcattcttcattgccatcttcatgcccatttatagacatatgtgtcacatttcagcccagagagattacagcaaataaataagaaacttactagacttttaactttctatttgtttattcctacccataacttattcatcagaccttaattgttggaaataggacttcttattaaaaagctgtgtaaattaataggtccaattattgtagatactccataaatgtttgatatatggatatactttttaaaaaattcttttaacccagggctgtttttaatatcatttcttttagatatgatgaacacctctgatgaagaagacaacaatcagttaaatgtaaattaaccattcttttgagggtagaagtgccagtgcatacttctggctgtgtttatgacaatgttgctatttgtaatactccgataaaaatccagtgctatattacaaactgaatttttcttactaagtaattatttaaatattttcccatctctctggtaatagtagcagttttcaggtcttagtatatttttggctatctcagattttatgattgaagttcattgtgagggctttccattaccctgatggtggaatgccaagcactccatgctctggccgtgtggctctctcaggtgtcattttgctggagcatggtactatccaacagtactttctgtgctaagggaaatgctctgtattgtgctatccatcatggcatcgcacaagtgacacaatggggcacttaaaatgtggctgatgtgactgagtgaacgtttgtttgtttgtttaattagtttaaatgtaaatacccacatgtggctagtggctactgtattgggcggcacagctctaacgtgctgactttcttgcggttttgcaattgtaccaagtatattcttgcctcgcagcctttttgtttgcctttctgttatctggaatgttcttccacatggctgggcttcacatcttcatgcctgggctccaatgctgcctctgtagggagccttctctgagtcaccttgtctcaaataacttcccctccccacaatcttcctccttatgcattgctctatgtatttattactagctgatattttatttacgatctatctcctctactctaaagactttgttcaatttttctctatattttactcatagaagtcaggagaccataatgtttaagggcatgggctttaacatatgcttgaataagatatgcttgacaagcccagttctgctgcttgcaaactctgcaccttaaacaaattatctacgcttttggaactccagttttcccatcataaagtgggggtaaaaatgcctgcctctaagagtactgtgaaaattaataacataaaatatatttatagcatttaggtcaatgtgtgtctcatgagtaagctttatatgaatggtagcacctattactactattattattgttattaaagctacttagatatttcattactgtgaaccttgcctgtcatactgaaaaatcaacagcagaagctatgaaaaagaaaggcttttaaataaaccatttaggactctctttacagaaatgaatttgttgtctagattaaccttaattttgatggagaaaaatccaaaccaaaaaaagaaataggatgagttgataggcttcagtgtgcaaagatcaagagtaaaaaggagtggatagttacccttacagaattaaatattccattatttgggaaaatcacatgaagagaggtgtttgccttagggataaataaaggtcaactactaagcccatttttttaaacttttatatcgaaatatgttatagtttgcatacagtaaaatgcacagattttaattgtacagtttgataatcttttagacatacacacatccttttaacaaacacacaggtcaatatagagaatatttgcaacatcccagaaggctatcttccacccgcttccactcagtaaacctcagtggaaacccattatgctgggatctgtcaatgcaggcttttcctatttttttctactcttttatattaatttgtttttcctattctttcacataagtggaatcatacagtttttggtctttcatatctgacttctttcactcgacagtaagtctgtttttatctatgtttgtgtatatagcaatagttcatttttcctactgctcggttatataagtatactacaatttatttatcgatcttattattggtagacacttgggttgtttctggtgatgactaaaactgctatgagcatgcgttttagaggacataggcattcatttctggttttatacagtgtttgtatgcatggcgttagtaggtactatcaatggggatttttttttgcccctccactgggcccattttgaaaaagggaaaaaggtaatgctggaaagaccttggtcctgccagctttttcataaattgttggaaagatgctcgattaatataaagaaaatctcagaaaattataatctgactgcataaaggactagtttggaaagagaattttattcattttgcagggcattctcttagttggagtaattgtgaattttgtgacttaaaatattaattaacaaaaaaattatgcccaaactgtcaaatgagcctaggaatgaaaccgcttataggtctctccatcagcaatcaatggcatgactctcagggcacttgcttgggacagagaccaaatttgattcgttctagttcactaacagggaatttagaagatgttctgagagattcagacaaaaaacaaaacaaaacaaaacaccaaatcgaaatatcagttaagtgagagttcagaaacttttcctgtgaagaaatggctaaaagagttgacattatttagtcaagatgtgagaaagtgaagaaaagatgacttgattctgtcctttagatgggaggattttagaagaggatttggattggttttcatgcctagagaagaccatcttataggcattaggtactgctctcctttcactcagagtacgtataccactagaataaagtactacatggtattaggaaggattcttagcaattggctagagagcaaattatgttgttcttttgctaggaattgtctagagacagtaactctctgcctggagtaattagaacattttaggggaatacagatagttaggacagataactttgggaatcttttaatctcagatattatgtatattgcggttgaaagggacttatagccaaagaaaagtgtcagtataatagaaaaagctcagctcctttgctaacttgtaagacagtttcactttagagatgcccatttggacattcactgttttgactgctctttccttacctgttagaagatgctagaagatataacttaaccatcttcatgtagatgtcatcatggtgcccaacccactatggtacattgtctgaccagaaactatatatttcactttgtagataatttctctgactattacttctcttgagaaacatcttcctagtctgtcatgggcagttgccttgtcattgtcccctggaaaccttctttatcagactgacaactccccatgtttgtaatttccaattcggaggagaatcctccgaattggaattaagaggagatgctacatgtttccagttcaatcttgatccaaatagcacctttgtgaggaacttgtcaggattcagttaattaatccatgtgaagttcttagaactgcctggcacagaataaacattcagtgaggggtagctattcttactgttctttctctgtttcatgtttggcttctctgtacatatgtattactagtgctcagttctaggaaacaaaggggagtgaagcaggctagttggttggacctaaggagaagaacaaatgcaatcatgcagaaagattatagtaacttcaaagtatagttttggaaaatctctttaaatctaaccagtgcacagtggaaaatccctgaagaaccaatctaattattcaattaaatggaaccgttatgctgacttttactacagaaggcaagcataatttagaaaatggggcattttaattctcttttgttttccaattagcgcaattgctctaatggggagtactcatgcttgagtctatgttcttccagtatatactttgcacataatttcagtctctctctcccccaaaattggaatcctcacctgttgacatagaggtttacttattgcagtgctcatactgcccagatcatggcctcagagcaaatatccttctgccatgaaagtggacctgaccagcaccagtccccccaccccccatccctggagctctgcttttcctgccgggtataattaggatgctaaagtaacggagctctcactttttttgctgatgccagcttaccacaacagaccacatgagtttactcttagttgaaagtggtaaggaaaatgctaagaacattcattttaattggtcaacattatgcagactttagtgccactgttttatagtcctgtgcttaggatttctttctgccactagccgtcagcttattatagcagatagtcttatttgcttctgattatcctttttattattatttgattattgattattacttgaaaaatttaaacttcttttgtttattgctaccttatttaggtaacagtttcatccgccctaatatttgttaagttctacataaaagactgacagtttcacattggtgggaaagtattttttcatcatatggccttcaagaccaggatgaatgacagatttttttttttcttaaatgcttgctttgatgctgatgtttcatagctaaaagacatggatcatatgggtagtgtgtggtggtggcaggaaaggtggcagggatggtagtgtgaatggtcctttaatgtaactagacgtgttttctttgcattggttggatttattcctcctgaactctggaaaatgtttaatttgttattctaaaatgaaaaagatccataaaatatgagagaatagtaaaaggagaattgtgttttttaaaaagtgaactcactcttcttaaaagttttgggaggatttaggaagttaggcactgacctaagtataggaaatgtggtctttgcctttggagccaacatgacacattttagtggggaagagcacagtaaccttgtaattctgtcatccagctgaagctgtaaggtgtgggcgatggctgcagttcctcatcaggacttcatgttccatctccccctccacaaagtccttctcacataggcctgtggggagagccgggactgagttcctttgagtaagcttacctaagattttgcttttttattaaatgagtggggaataggtagaaataaaagaaaaattatttaaattacaactagaaaactttaacattaggagaaaaaaaacccagaaattacaaagtatatgcaaaacagaggattaattagtttatagtgattttgagaaggtctatctatgttaagtataaaatggtcgtttaaattcataatttaagaaacagttatgtctttaaattagtttgaatattttctcattctaaaaaatacatttaaaatcaaaagactcaaaactagaactaaaagaatataaagtcatttctaattttacaaaggattgattttctggcttaagtaccaattattcctctataacactgtaagagtcattatgaagctgataataattactgtcatttattggatgtttgctctaagccagagatgaggcaaactatgactcatgggccaaatttagtcttattggaacatagccatgttcatttgtttttgcaatagaatagaattgagtagttgtggcaaagatcgaccctccagagcctcaaatatttactatcttgccctttcctgacaaagtttgccaatccctgatttaagacaagcactgttttttgtaacaattatgtcatttaatccttacaacatctctaggaggttggtttcttatcctacttttatggatgatgaaatagaggctgaaagatattaagtgatttgcccagggttactcagctaagtggaagaatatgaacttgaagccatgatgatagagtccatactttcccctttgtgcccaatttctttgtcgttagccttcagagaggtggcatatcttggtggttacaggtatagaagactctgaagccaggttgcctaaagtgagatgaccttaggcaataaatgacttgactttgcatctcagaatataagtgatggcaaatactactgttatgaacctcctgttttgtaggtgagatactaaatgtccagaaatgcttttaagctttccaaagacctgactttacaaatgactatagcttacctccagtgctagatagataacacatatttcagagggctgatggttttggaaaggtaaaatcatgagtccagtgttcatttttttctctcttaattatcaggtacttcatagacagcagtctcagccagccaaggagagttcccctcccagagaagaagcgcctcccccacctcctccgactgaagacagttgtgccaaaaagccccggtctcgcacaaagatctccttagaagccctggggatcctccaaagctttattcatgatgtaggcctgtacccagaccaggaagccatccacactctttcggctcagctggatctccccaaacacaccatcatcaagttcttccagaaccagcggtaccacgtgaagcaccacgggaagctgaaagagcacctgggctccgcggtggacgtggctgaatataaggacgaggagctgctgaccgagtcagaggagaacgacagcgaggaaggctccgaggagatgtacaaagtggaggctgaggaggaaaatgctgacaaaagcaaggcagcacctgccgaaattgaccagagataatgtgaacttctactaggcaaagcaatacatcggtccaaggattttctgctttcatttctttaaaagttttttgttagtttgttttttgtttttgtttttgggtttttttggctttatttttgtctttttatgtctgttttgtttttcttacccttttggacatttctttgttgcacaggatacacctatagactgaataagttcagtatttccgaatcagacatcgccttggcaaagacactaaagcgttacactttatcccgtctctatgactagatcatagtcattataatcacaggagactctgccttcattatccttgcacttaacggaagttacatcaggcaagttccaggatgaaaagaactatgaaataaatgaaggaagctacaagtgtgtgtgtatatgtatatgtatatatctctatatttacatatatatattaaaattgcatgggacagagactttgcaatccgaaagaatagactgtgaaatgagttcttaaagaaaagacttgtttatgtattaaaaaaaccacttcacagtgagtcgctttggctttttgataaactgcggcctgctctcagggtggggtgactatttttgaattcctatttattttttgtgtttgtccctgatttttttttttaattctatggcttcctatctggcagcttaatgggtaatttttgaggtatgtatttaacaaaataaacgacactgccgaaaaaaaaaaaagtgaagtgaaaacaatcagggcacattaaaatgatacaagtcaaataaatcttaaagacacaatgcacacttaaaatgactcaataaaatgacttgctacgttccgttattcaatttgtcattactgtagtgaacagatgcatttctgtggaattccaaataagtaaaactgaaattcagtgcagagaaaactttgtccactagtgcaagtcttgatcaaatgacattttgacattggacatatggaattcatagtatgagccacattttgttgtgaaatttatttacctgcttgtggcttcaaatctgaaaattaataagcctgctcgtttaaaagttgtttgttgttgctgtttttttgtctttttgttttttactagaaaatagttcagtgtaatattaagttagaaaagaagttgctgcccagttaaaggggctccctctcaaataaatctccatccttccctctcccaaaagacatttctgatttctgcttcactttgggcttcctcttcttcgtacacattccatctacctaatcaaacattttcagtccctgatctctcctgtcccttttcctgggatgacagccctaacaagaactgtttttgaatcgttgtgcagctccaggcaatagagtatgtgaagcgatttcagtagaatcacttactcatcctaaaagaaaacattatcccagttacctacatcgcaattaccttatgtaaagcagaactaatgctgactggatgtttaatgggatgagcattaaagctgcaatctactatagtactccagatctctttcggcttcctatgagaaacaccagaagcattactttccacttctacttacagtaattgcaagaggagacctcacattcaggactggcctagtgaacgtaatccatgctttaaactggccattaaacagtcccacatggttggatttttttttttttttttgagttgtgctttcacaaaaccttgtcaaagacctcatgcaatatcactttgaaagttattttctgtttactacacaaacattgtaatataactgttaatactatttatatatttgaaaggtataaaaggtaggagttaaaaaaaaaacctctatgtgtagatattaactcagaacttacaatatacagggagaagacatgttgcaatacaagctaattctagctgctcagtaacctctggagtttttaaagggacattttcctgtactttttcaaataatgatgtttaaaaattatcttgacataagcgtcatatacctttgcaaaaggatggttgtttgcagttagccctggccccatccttcctatttctgtagtatgctgcagctttaatcagaaagtccatggttgctgcttcctgatctccgagttactctttccaaattgtcttcttacactgttgctgaaggtcactctgtacacgtaatggaaactgattttgccaagctcttacaaggtggttcatctatcgatggcatccgcatttggtatcttttacacttcaaccaaaaatttattaggtatttttcaatgctaagtcttgccttttattttttaatttcactgccaagtttgcagtggttctaagtgaatctgtgggcattttagcctgtggtcttgccagatctttgcgaattacaatgcatatatgtctatttattcaatatctgtcatataatatctatttggaagaagaaactttctcttgtagtgcctcttgacaaagcacaatttcccgcctttttttttttttttgtgaaatgaaaaaaacaaattgtgttttattgcggtatcaacaatgtgaataaggattaacatattgtaaatgttcttttttccatgtaaatcaactatctttgttatcactaagtgataattaatttttaacttatgtgcattgttaggctgttagaattttttggttgttaaaataaacgcattcaa

SEQ ID NO: 127 - DNA, 4992 bp, Homo Sapiens
gaggaggattcgcagttcaacatcaaggtccctgtgcgttttattgcgacctgccggtgggaactttgtctccgagtcggagcagcatggagcggcggagcgagagcccgtgtctgcgggacagccccgaccggcggagcggcagcccggacgtcaaggggcctcccccagtgaaggtggcccggctggagcagaacggcagccccatgggagcccgcgggaggcccaacggcgccgtggccaaggccgtgggaggtttgatgattcctgtcttttgtgtcgtggagcagttggacggctctcttgaatatgacaacagagaagaacacgccgagtttgtcctggtgcggaaagatgtgctttttagccagctggtggagactgcgctcctggccctggggtattctcacagctctgcggcccaggcccaaggaataatcaagctgggaaggtggaaccctctccccctcagttatgtgacagatgcacccgacgcgacagtggccgacatgctacaagatgtctatcatgttgtgacgttgaaaatccaattacaaagttgttcaaagttggaagacttgcctgcggagcagtggaaccatgccacagtccgcaatgccttaaaggaactgctcaaagagatgaaccagagcacattagccaaagaatgccctctctcccagagtatgatttcatccattgtaaatagcacatattatgccaatgtgtcagcaaccaagtgccaggagtttgggagatggtataaaaagtacaagaagattaaagtggaaagagtggaacgagaaaacctttcagactattgtgttctgggccagcgtccaatgcatttaccaaatatgaaccagctggcatccctggggaaaaccaacgaacagtctcctcacagccaaattcaccacagtactccaatccgaaaccaagtgcccgcattacagcccatcatgagccctggtcttctttctccccagcttagtccacaacttgtaaggcaacaaatagccatggcccatctgataaaccaacagattgccgttagccggctcctggctcaccagcatcctcaagccatcaaccagcagttcctgaaccatccacccatccccagagcagttaagccagagccaaccaactcttccgtggaagtctctccagatatctaccagcaagtcagagatgagctgaagagggccagtgtgtcccaagctgtctttgcaagagtggcattcaaccgcacacagggattgttgtctgagattctgcgtaaggaagaagaccctcggacagcctctcagtctcttctagtaaacctgagggccatgcagaatttcctcaatctgccagaagtggagcgagatcgcatctaccaggatgagagggagcggagcatgaatcccaatgtgagcatggtctcctcggcctccagcagtcccagctcctcccgaacccctcaggccaaaacctcgacaccgacaacagacctccctattaaggtggacggcgccaacatcaacatcacagctgccatttatgacgagatccaacaggagatgaaaagggccaaggtgtctcaagccctgtttgccaaagtggctgcaaataaaagtcagggctggctgtgtgaactgctccgctggaaggagaacccaagcccagaaaaccgcaccctctgggaaaacctctgtaccatccgtcgcttcctgaaccttccccagcatgagagggatgtcatctatgaggaggagtcaaggcatcaccacagcgaacgcatgcaacacgtggtccagcttccccctgagccggtgcaggtacttcatagacagcagtctcagccagccaaggagagttcccctcccagagaagaagcgcctcccccacctcctccgactgaagacagttgtgccaaaaagccccggtctcgcacaaagatctccttagaagccctggggatcctccaaagctttattcatgatgtaggcctgtacccagaccaggaagccatccacactctttcggctcagctggatctccccaaacacaccatcatcaagttcttccagaaccagcggtaccacgtgaagcaccacgggaagctgaaagagcacctgggctccgcggtggacgtggctgaatataaggacgaggagctgctgaccgagtcagaggagaacgacagcgaggaaggctccgaggagatgtacaaagtggaggctgaggaggaaaatgctgacaaaagcaaggcagcacctgccgaaattgaccagagataatgtgaacttctactaggcaaagcaatacatcggtccaaggattttctgctttcatttctttaaaagttttttgttagtttgttttttgtttttgtttttgggtttttttggctttatttttgtctttttatgtctgttttgtttttcttacccttttggacatttctttgttgcacaggatacacctatagactgaataagttcagtatttccgaatcagacatcgccttggcaaagacactaaagcgttacactttatcccgtctctatgactagatcatagtcattataatcacaggagactctgccttcattatccttgcacttaacggaagttacatcaggcaagttccaggatgaaaagaactatgaaataaatgaaggaagctacaagtgtgtgtgtatatgtatatgtatatatctctatatttacatatatatattaaaattgcatgggacagagactttgcaatccgaaagaatagactgtgaaatgagttcttaaagaaaagacttgtttatgtattaaaaaaaccacttcacagtgagtcgctttggctttttgataaactgcggcctgctctcagggtggggtgactatttttgaattcctatttattttttgtgtttgtccctgatttttttttttaattctatggcttcctatctggcagcttaatgggtaatttttgaggtatgtatttaacaaaataaacgacactgccgaaaaaaaaaaaagtgaagtgaaaacaatcagggcacattaaaatgatacaagtcaaataaatcttaaagacacaatgcacacttaaaatgactcaataaaatgacttgctacgttccgttattcaatttgtcattactgtagtgaacagatgcatttctgtggaattccaaataagtaaaactgaaattcagtgcagagaaaactttgtccactagtgcaagtcttgatcaaatgacattttgacattggacatatggaattcatagtatgagccacattttgttgtgaaatttatttacctgcttgtggcttcaaatctgaaaattaataagcctgctcgtttaaaagttgtttgttgttgctgtttttttgtctttttgttttttactagaaaatagttcagtgtaatattaagttagaaaagaagttgctgcccagttaaaggggctccctctcaaataaatctccatccttccctctcccaaaagacatttctgatttctgcttcactttgggcttcctcttcttcgtacacattccatctacctaatcaaacattttcagtccctgatctctcctgtcccttttcctgggatgacagccctaacaagaactgtttttgaatcgttgtgcagctccaggcaatagagtatgtgaagcgatttcagtagaatcacttactcatcctaaaagaaaacattatcccagttacctacatcgcaattaccttatgtaaagcagaactaatgctgactggatgtttaatgggatgagcattaaagctgcaatctactatagtactccagatctctttcggcttcctatgagaaacaccagaagcattactttccacttctacttacagtaattgcaagaggagacctcacattcaggactggcctagtgaacgtaatccatgctttaaactggccattaaacagtcccacatggttggatttttttttttttttttgagttgtgctttcacaaaaccttgtcaaagacctcatgcaatatcactttgaaagttattttctgtttactacacaaacattgtaatataactgttaatactatttatatatttgaaaggtataaaaggtaggagttaaaaaaaaaacctctatgtgtagatattaactcagaacttacaatatacagggagaagacatgttgcaatacaagctaattctagctgctcagtaacctctggagtttttaaagggacattttcctgtactttttcaaataatgatgtttaaaaattatcttgacataagcgtcatatacctttgcaaaaggatggttgtttgcagttagccctggccccatccttcctatttctgtagtatgctgcagctttaatcagaaagtccatggttgctgcttcctgatctccgagttactctttccaaattgtcttcttacactgttgctgaaggtcactctgtacacgtaatggaaactgattttgccaagctcttacaaggtggttcatctatcgatggcatccgcatttggtatcttttacacttcaaccaaaaatttattaggtatttttcaatgctaagtcttgccttttattttttaatttcactgccaagtttgcagtggttctaagtgaatctgtgggcattttagcctgtggtcttgccagatctttgcgaattacaatgcatatatgtctatttattcaatatctgtcatataatatctatttggaagaagaaactttctcttgtagtgcctcttgacaaagcacaatttcccgcctttttttttttttttgtgaaatgaaaaaaacaaattgtgttttattgcggtatcaacaatgtgaataaggattaacatattgtaaatgttcttttttccatgtaaatcaactatctttgttatcactaagtgataattaatttttaacttatgtgcattgttaggctgttagaattttttggttgttaaaataaacgcattcaa

SEQ ID NO: 128 - protein, 733 aa, Homo Sapiens
MERRSESPCLRDSPDRRSGSPDVKGPPPVKVARLEQNGSPMGARGRPNGAVAKAVGGLMIPVFCVVEQLDGSLEYDNREEHAEFVLVRKDVLFSQLVETALLALGYSHSSAAQAQGIIKLGRWNPLPLSYVTDAPDATVADMLQDVYHVVTLKIQLQSCSKLEDLPAEQWNHATVRNALKELLKEMNQSTLAKECPLSQSMISSIVNSTYYANVSATKCQEFGRWYKKYKKIKVERVERENLSDYCVLGQRPMHLPNMNQLASLGKTNEQSPHSQIHHSTPIRNQVPALQPIMSPGLLSPQLSPQLVRQQIAMAHLINQQIAVSRLLAHQHPQAINQQFLNHPPIPRAVKPEPTNSSVEVSPDIYQQVRDELKRASVSQAVFARVAFNRTQGLLSEILRKEEDPRTASQSLLVNLRAMQNFLNLPEVERDRIYQDERERSMNPNVSMVSSASSSPSSSRTPQAKTSTPTTDLPIKVDGANINITAAIYDEIQQEMKRAKVSQALFAKVAANKSQGWLCELLRWKENPSPENRTLWENLCTIRRFLNLPQHERDVIYEEESRHHHSERMQHVVQLPPEPVQVLHRQQSQPAKESSPPREEAPPPPPPTEDSCAKKPRSRTKISLEALGILQSFIHDVGLYPDQEAIHTLSAQLDLPKHTIIKFFQNQRYHVKHHGKLKEHLGSAVDVAEYKDEELLTESEENDSEEGSEEMYKVEAEEENADKSKAAPAEIDQR

SEQ ID NO: 129 - DNA, 5239 bp, Homo Sapiens
gggtgtccctttggaggagtcctttccctctcctcctcctccccctcctccctccccccatcatcatcataacaaccatctccgcaccagaagaagacaccctgacccaggaccttaaacattaggacctggggaagagggaaggggaaggagtaaagaggaagactaggagaacactgcaaagccaagcaccagaaactttccaccctggattctctacttttgctccatggacagagccccagtcagccaagtttcagacagaccgtgagcagtccctgtgcgttttattgcgacctgccggtgggaactttgtctccgagtcggagcagcatggagcggcggagcgagagcccgtgtctgcgggacagccccgaccggcggagcggcagcccggacgtcaaggggcctcccccagtgaaggtggcccggctggagcagaacggcagccccatgggagcccgcgggaggcccaacggcgccgtggccaaggccgtgggaggtttgatgattcctgtcttttgtgtcgtggagcagttggacggctctcttgaatatgacaacagagaagaacacgccgagtttgtcctggtgcggaaagatgtgctttttagccagctggtggagactgcgctcctggccctggggtattctcacagctctgcggcccaggcccaaggaataatcaagctgggaaggtggaaccctctccccctcagttatgtgacagatgcacccgacgcgacagtggccgacatgctacaagatgtctatcatgttgtgacgttgaaaatccaattacaaagttgttcaaagttggaagacttgcctgcggagcagtggaaccatgccacagtccgcaatgccttaaaggaactgctcaaagagatgaaccagagcacattagccaaagaatgccctctctcccagagtatgatttcatccattgtaaatagcacatattatgccaatgtgtcagcaaccaagtgccaggagtttgggagatggtataaaaagtacaagaagattaaagtggaaagagtggaacgagaaaacctttcagactattgtgttctgggccagcgtccaatgcatttaccaaatatgaaccagctggcatccctggggaaaaccaacgaacagtctcctcacagccaaattcaccacagtactccaatccgaaaccaagtgcccgcattacagcccatcatgagccctggtcttctttctccccagcttagtccacaacttgtaaggcaacaaatagccatggcccatctgataaaccaacagattgccgttagccggctcctggctcaccagcatcctcaagccatcaaccagcagttcctgaaccatccacccatccccagagcagttaagccagagccaaccaactcttccgtggaagtctctccagatatctaccagcaagtcagagatgagctgaagagggccagtgtgtcccaagctgtctttgcaagagtggcattcaaccgcacacagggattgttgtctgagattctgcgtaaggaagaagaccctcggacagcctctcagtctcttctagtaaacctgagggccatgcagaatttcctcaatctgccagaagtggagcgagatcgcatctaccaggatgagagggagcggagcatgaatcccaatgtgagcatggtctcctcggcctccagcagtcccagctcctcccgaacccctcaggccaaaacctcgacaccgacaacagacctccctattaaggtggacggcgccaacatcaacatcacagctgccatttatgacgagatccaacaggagatgaaaagggccaaggtgtctcaagccctgtttgccaaagtggctgcaaataaaagtcagggctggctgtgtgaactgctccgctggaaggagaacccaagcccagaaaaccgcaccctctgggaaaacctctgtaccatccgtcgcttcctgaaccttccccagcatgagagggatgtcatctatgaggaggagtcaaggcatcaccacagcgaacgcatgcaacacgtggtccagcttccccctgagccggtgcaggtacttcatagacagcagtctcagccagccaaggagagttcccctcccagagaagaagcgcctcccccacctcctccgactgaagacagttgtgccaaaaagccccggtctcgcacaaagatctccttagaagccctggggatcctccaaagctttattcatgatgtaggcctgtacccagaccaggaagccatccacactctttcggctcagctggatctccccaaacacaccatcatcaagttcttccagaaccagcggtaccacgtgaagcaccacgggaagctgaaagagcacctgggctccgcggtggacgtggctgaatataaggacgaggagctgctgaccgagtcagaggagaacgacagcgaggaaggctccgaggagatgtacaaagtggaggctgaggaggaaaatgctgacaaaagcaaggcagcacctgccgaaattgaccagagataatgtgaacttctactaggcaaagcaatacatcggtccaaggattttctgctttcatttctttaaaagttttttgttagtttgttttttgtttttgtttttgggtttttttggctttatttttgtctttttatgtctgttttgtttttcttacccttttggacatttctttgttgcacaggatacacctatagactgaataagttcagtatttccgaatcagacatcgccttggcaaagacactaaagcgttacactttatcccgtctctatgactagatcatagtcattataatcacaggagactctgccttcattatccttgcacttaacggaagttacatcaggcaagttccaggatgaaaagaactatgaaataaatgaaggaagctacaagtgtgtgtgtatatgtatatgtatatatctctatatttacatatatatattaaaattgcatgggacagagactttgcaatccgaaagaatagactgtgaaatgagttcttaaagaaaagacttgtttatgtattaaaaaaaccacttcacagtgagtcgctttggctttttgataaactgcggcctgctctcagggtggggtgactatttttgaattcctatttattttttgtgtttgtccctgatttttttttttaattctatggcttcctatctggcagcttaatgggtaatttttgaggtatgtatttaacaaaataaacgacactgccgaaaaaaaaaaaagtgaagtgaaaacaatcagggcacattaaaatgatacaagtcaaataaatcttaaagacacaatgcacacttaaaatgactcaataaaatgacttgctacgttccgttattcaatttgtcattactgtagtgaacagatgcatttctgtggaattccaaataagtaaaactgaaattcagtgcagagaaaactttgtccactagtgcaagtcttgatcaaatgacattttgacattggacatatggaattcatagtatgagccacattttgttgtgaaatttatttacctgcttgtggcttcaaatctgaaaattaataagcctgctcgtttaaaagttgtttgttgttgctgtttttttgtctttttgttttttactagaaaatagttcagtgtaatattaagttagaaaagaagttgctgcccagttaaaggggctccctctcaaataaatctccatccttccctctcccaaaagacatttctgatttctgcttcactttgggcttcctcttcttcgtacacattccatctacctaatcaaacattttcagtccctgatctctcctgtcccttttcctgggatgacagccctaacaagaactgtttttgaatcgttgtgcagctccaggcaatagagtatgtgaagcgatttcagtagaatcacttactcatcctaaaagaaaacattatcccagttacctacatcgcaattaccttatgtaaagcagaactaatgctgactggatgtttaatgggatgagcattaaagctgcaatctactatagtactccagatctctttcggcttcctatgagaaacaccagaagcattactttccacttctacttacagtaattgcaagaggagacctcacattcaggactggcctagtgaacgtaatccatgctttaaactggccattaaacagtcccacatggttggatttttttttttttttttgagttgtgctttcacaaaaccttgtcaaagacctcatgcaatatcactttgaaagttattttctgtttactacacaaacattgtaatataactgttaatactatttatatatttgaaaggtataaaaggtaggagttaaaaaaaaaacctctatgtgtagatattaactcagaacttacaatatacagggagaagacatgttgcaatacaagctaattctagctgctcagtaacctctggagtttttaaagggacattttcctgtactttttcaaataatgatgtttaaaaattatcttgacataagcgtcatatacctttgcaaaaggatggttgtttgcagttagccctggccccatccttcctatttctgtagtatgctgcagctttaatcagaaagtccatggttgctgcttcctgatctccgagttactctttccaaattgtcttcttacactgttgctgaaggtcactctgtacacgtaatggaaactgattttgccaagctcttacaaggtggttcatctatcgatggcatccgcatttggtatcttttacacttcaaccaaaaatttattaggtatttttcaatgctaagtcttgccttttattttttaatttcactgccaagtttgcagtggttctaagtgaatctgtgggcattttagcctgtggtcttgccagatctttgcgaattacaatgcatatatgtctatttattcaatatctgtcatataatatctatttggaagaagaaactttctcttgtagtgcctcttgacaaagcacaatttcccgcctttttttttttttttgtgaaatgaaaaaaacaaattgtgttttattgcggtatcaacaatgtgaataaggattaacatattgtaaatgttcttttttccatgtaaatcaactatctttgttatcactaagtgataattaatttttaacttatgtgcattgttaggctgttagaattttttggttgttaaaataaacgcattcaa

SEQ ID NO: 130 - protein, 733 aa, Homo Sapiens; identical to SEQ ID NO: 128

SEQ ID NO: 131 - DNA, 88032 bp, Mus Musculus
gcgaacagcgctgcagatatagatggcagcttcgtgtcagtgagtttgcgttccccttcctgatccacgcgctggagtgattagagccctggaagggaattgttactcccgtgaagtccccttttcctggcagtcatctgcactgtacacgctggatccctctctccgatccaccccactcactcgctcctctctcacctcctctctcacctcctctctctccctcctctctcacctcctctctccctctctcctgcattgattttttttctctcctttttttagttgactgaaacaaaacaaaacaaaagggccactggatgtctgccttcttggggggtgagccagacagactgacaaacaaacagacccagctgagctcgggggagggtttctcctccggttttgcccggcagcagcagcatggacgtgttggctagttatagtatattccaggagctacaacttgtccacgacaccggctacttctcagctttgccatccctggaggagacctggcagcaggtgaatgatttaaattacttgtgtaaatcgtgtggcggcggcggagacgcaggggctgcgtttggtgtgggctttgagttgaaatttttttaattaattttttctttttatttatttatttattttttggctgtgtgttgtttaaaatgttttgtgaaacaatcatatgcgcttacctctccacccacccctagccccttagtgtgttgagctgagccggtcctagctgcctgcatttctgtcaccaacacacatccttgcgcacacgttgtcggctcgctgtcccctagcagagaattgctggcgaacttctcgggtttggaggagccgggtgggaaggtggtcgagcaatggttgacaggataccacgttcctagatgcaggagttctgaccttagtacttaaatcagctttatccatttcaactggtcctgaagaccgtcaaggggggtggggggaagcacggagtgtttttcccagtaatttactgagtgtcaataaagaataggagcttgatttttagatacaaggtgagctgtacgaagagaagccaggtgacaaaagatgcttaaggatatgtacaaggaagatgagaagatatgtctctcttaggctgacaatgtattgtatggtttctctagctaatgcctccagagagagcagcctgtactgtgtccttgctttttgtttgtttgtttggggtgcctctcaggttagcaccaccttggacaaagggtggtgtgtgcttccttgcttccctactttgtcttagaggactagttaagaaaactcctaggatgctaaagggtaccggtgccaagttctcttggcatctccgggaggttgaagcctgactggggacaagttcactgggctttgtgaagtggaataaagaaagtgctggtcagtggaaagtgctgggtctgctacggaaacagtggtttttccagccgcgattaggaggtgctgagggggacattctgcaggaaagatggtggtgggtgggggcggggcggctggggatagggacaccacgggtgtttaaaaactctacagtgtgcaccgtggaaagtccaggaagacagtctggatttgcacgttcagagtgtgaatttgtacagtccatcctggagagagagagagagagagagagagagagagagagagagagagagagagagagagagagagaaaccttgcccttggggagggccctgggatccttggtgtgtggctgctcatgtaacttctctgctcagtgacagcagcttgttaaggctaatgaacggctgagtttcctttgccaggatccaaagcagggtttgccagcttgaggctgggatgtaacagttgctgctttaggaagagatgctaagctcacggtatagggagccagtggtaaagcgctcaatcttaagactgtgccattgttactagttgttgcctggctggtagctgcgggagttttcctccaggtattcgctgcccgtgtctgtgtgtctgtgtagcgcatggattccagttggaaggctggcagatgctgtcctttgctaaacacgcaggcagagtactcacatcgtttcctatatacatcctttcctgctgcccttaagaagagtatgtctcatgtcggatctccctacatcctttcttttgtattttgatatgaagcaagccaaaatgttgccagaatctcgttttttttgttttgtttttaggtttttttttccccccctaaacagccttcttttcaccctgtcagcccactggtgtggaatcagttgcatattaactacagtctagactagttagggaagggaatctgttgatttagtcagcatgcccgaggcaggccttgtttgtgactaactgttaagtagtgttggagggaagaaagttggctttatttgttacaacgttccctccagatgaatcacacaactttgttttggttccagttttcagggtagtaaagcctgctcgtggggctgggggtgggggcttctttagaggaaacctgcttttctagatctgcctggaggatccagaaggtacagcttcaaggaaacatcactggcttgacaattagggatgtattagatctattgtttcctcagaagccagctctgctcttcctctccccctcctccttctccctcctcccccttatagaaacctagcttagtttttttttttaaacacatcgccaggcaaaggaattttcacttccaccctctttcttatttcttgtctcaactgtctccagctgccatcttctctcatcttaatacccctccccaagtccacatggaaacataacttgcaggcaagcacttctaaacaaggtaccatggcctggagcaccctgctcaggactctgttctaggatcctgagttcatgctgatgacgaaacctttagcctttatctcttccttcctccccatctccacagccccttgcttctgactcttaggggggtagcggtggttttatgcaactgctagctcaaaattaaccagatggtgaaattctgagactcctttgctcaaaacagctcaagaaggttgctacaaaaaccccaggcagaaggaagtttcccgatgctctggggtaatcagattttagaggtcaaatgaggaatcattattggatgtttttcttaaagcgagcaatatactcggggacatgcgcccaggaggagggtgtgtgtgtgtgtggagatcctgataatctaatttggtttctagagaatggctttgaatgataaacccaagaacatctgtgcattggaaaaccgaggagggactgtttgtccatgtcgcttcaaacttaggccctgggatagtttcctctgtcagtgagcctatggcaaaggcagcgatggagacagtactaccttgtgtcactttaatgtgaattcgtggacagggatactcaaccaggattccagctcccagatggacatcccagatccactgctctccatctctgagctctaactgcatgcccaagcacttggcccaagtaatatcatctctgcctgtcgtgtaactgtaaattatactgtgtttatgtgcctatgtggtctgttatttatgacattcatctgacacagctctgaaggctgccggcctgaaaacttataggaaatatttcaaaagctgtttgatcaaacgttgaaaacagttgagattaggacggaagctagagtagattttagggtaccatttgatgataaagggagatacatccacaatgttacaagagaagttggactctttgaactggctactgactcagaaagtaaaaagcacttcatatataacactttcattttcttccagattctacagagctgtagaatttttatagtctttattcccagcatgctgtttcataaggacagtccaagtaatgattctgagtattgtttgctccatgccattgggaagcatggcatgcttacttgaaaactcctatggcattatgatcactgttaatgctgattcataattggcaaatggggtcaatttcaggcctccgttttgcttggagaaaaattttccactgctactggaaacaaataaataaatcatagaacattctaccctcctcccccagtcccccattgttttaaactaatggcacacttggcttctgtaaggattgaagtgtccctgtaactctgcaatttcatcttggtttcaggcatcctgaaacactttttatgagggcttttggtatgaggcatctctaggggaaaacctacagaaatggttgccttccaagaacagcctcatagtaccgggagctgggatttggtctgtgagccacgtttcttctccctctatgtgatcttcccctcccattgccttccacagaccgggcagccaggtgctgtctcaaccagaaagacaaagcaaactgcagggtctgtgtatccgcaggtttgccactgtcccaatttgcagaaaaccttatcattaattagaatttcttggcagcagcaccaccctgagaaatttgtagacacaaaggagccttggtaaccacattgaaagaataaaatagctggctatttatttatttatttttgtatgtgatttgtgtgttcgtcaattactgtaaatcttttttttttttttgaaacagaatcaaaactgccctgattctccagcttttctttataaagatgcagccactacagaaacgtggctttaaaaatgagagcacgtgtgagtgccatcagtcacacacttagcctttttgtaatagattcatttttatgttcttttcatacacacatcttcatgtgggcacttaatccttcagtctacctgtctgccatttggtgttttaaagtaagaaaggatgtcagtgcagatgttgcttctacacctgtccttagtaagggagaggaactcacccttctttgttctccatgtatcacacacccctactcaccaccctgaggagagagggatgatggggggggggggtcctatccatttaaaaggcgaagtagaagatacaggctgacagctttgccctgagatgatttatggatgggcatgttggagaccttaagtgttcaaatgtgggctcttctctcccagcccccttctaaatagaaatgcctgttgaagctaatttgcttctccacttaaatggagatagtttaaagagggtcagaatggagcttttaatagccattctcttaccaatctgaaaagtcccccttcacagaatccctcttgtttagtacaaagcatactttggccagtcccagccagctcatgttggtgggatacctgctctgctatttggccagctagttggtagatgttcccacctctggttaacatagaatgtctggaggttttaatcactgtcactggatccatcgttgatgattgcatacagtgtctccctgatgctggctcactcgctgtagctccaactcacttgctgttggagttacagctgcagctacagttacagcggtagctctgactccaacagcatgcatgtttaggatttgctgaaagtttaggacagctccctaatttaatgggagccatgcctggacggtgagggcagagactttgtgtccctttgttctcccaagtcagcttagtgcttgcttagcataaacaggtaaaaatgtgttcacctcaattgccagtccactctgccaaaaaaggacccagaaaactctagagctcctcctgatacctaatcggaatgtatataacactgacaagctagaaaacactactttctcccctcttagaacatcctcatgagaaaatattcttattaaatctcatgtaggagtcccccacataaagtattgtcactttttagaagtgtgtgtgcctgagtggtcctgatcttcctctcttgatgttcctgcctcttaccttgcaacatcacttctactgcctcgggtagtatgctacccaagatgctggcttgtcatttgatgtgagcctaagaacttggtctggtggtctgcagtctgtctgtcctactctctgttataggagctctgtctgccacatgctataggtgtgtgcagagtcagcagctgccttgggaaatgagtcccagtgttcacctccttgagatgagaatgggggaaaaaccattcctgattgagctgccagtagacccagtgtggcagtgtgagactttgctctcaataaagtattctgtataaaactatattaagtctattccgtgttaaatgtttaatttcctaagcccttatttatgcagactgttctgtttgggtgatgcaaagttaaaaaggatgtagattctgccccacttcattctagaagagggcacatttaaaattaattgatatagaataagagaacactgaaaaaatgaactcttcagtactgtttttgaatactagtctgccttgtcttattttttgttttgttttttttttgtttaaaaaacaaacaaaacccatggggcttgtttatataaaccaggcatgagatttgcttagctctgttgtgggcatgcttttagctctgggcatagtgggggctggtatacaacagtgtgacttcacatgtccataatgtccaggaaatggcgtttgtgtctgtgtcattcggaaatgacttgacgtaattaaaacaattaatgttgagccacatgcaatatctatttctgaatatggattcattaacatttcctgagggtcatcttgaaagtctggcctctagcttgaaacagagctcagaacctggaattttatcatttcaaatcctgaaaggggttttggtttatttagctctgaagtactagagttgaatcactgtggatgtcacagccaaaggaggtgttacattcttcaggttcatgttagcactgttgattctgagacccagggctcagacactggagtaagtttcaaaccaatgcttatttctcatcctaccatttaaagagacatgagaaaatattcctgttacttctgtgtaccagtatcagacaaacaaacaaagtaactaactaactaacaaacacattggcattgcctgggccctagatcaaagcatagagtagtttaatgtcatccttctccaactctcaatactctgtagtaattttgaaacagtaaaaatatgttctttttatgtgtgggggaaggcaagagcccccaaagtaataatgctactcaaaaaaaaaaaaaaaaaaaaggtgttaccttttaagactacaaatgggtgggcaggtgcatcaaaatgtttgtccttagaggatggataaaaggcagacatgggctgagatagaaagcagcaactgtgaaatggccctgtgacagtgacatcttgcataaaaccaagggactgtgtaaaacaaccacctgttcatggcccagttcataacaatcttttgtgttctgacttttttggagatgtgggtagatgtgaggttggaatgttatataaagttaagcaaaaggtactactatcctttctcatcaagcaggaggaagttcagtgtcacagacagtgtatggacattcatccatctgccgtctcacgcagggagggcagacttctctgtttattcctctaccccttcacactccctgctggtcctgatgggagaccttctctcctggaactcacctcatggttctcttatgccaagagcttagaaactgaagtttctcccctacagttgaagtcttccttattttctcaaagccgtgttctgctctgtctctgggggtcctcatgtttgaattagagatatgccacaagggtttttagggttgctcactgttgtcacagctgaggacacttcaaagtcccatccctttgatttctacctttgacttttcttctccctgctccttctgtggatatgaggacccttctcatgatctagcttcaacttacccagccgtctttcacagctctctgtatactctggagtaaagaaacttctagattgaagaaccctaggagttaatatcagtctcccattgagttgtctttggtatgttagcacgggccttcagttttggtcccctctgccagtgctctgggtttaccttcataccccagtcaccttctgtagtcagctttcaagcctctagtgcctccattttacacacaggatgggtccaaaacctctaagtatcaagttggtccaagactgggcctgtgtaaagttagcacatccttcctacttttctgagtgacagattaccatccaaatgagatgtgtcgctttcgacacctttgtttttaatttagggttctccttttcctccttttccacctctttcccctccatactcctctttgactaaatcagtggctctcaaccttcctaatactgcgacccttcaatacagttcctcatgttgtagtgaccctaaagccataaaattatggctactaaaattacttgctactacctcataactatttaatttgctactgttatgaactgtaatgtaaacacctgagttttctgatggtcttaggtgacccctgtgaaagggtcattcgaactccaaagggtttcgacccacaggttgagaactgatggtctaaatttatatcctttaacttttagacagtgactatatttctcaggaaataggccccctgtctccctggtctttagtcaatagcaactgctaagatttttcacaattttttgtccaactcttatttctgtaggatatttctcttcttgtaacattttccacttaggttatattgcttaaaaaagagttgttatgattttgataattaccctttaatatttaatctggggttttgtgagtccagtagaaattccatagttacttgaatgattactgtggctattgtttaagatttaagtttttaacagtgatattcagttgcatagaccaagcaaattggggtcttgttgggagggactcaatgagacttccacatttgtaggcttctagttgattccagtatgcagcctcggatttgaaccattgctatacagagggttaactgctagtcacgggcctcctccttacatcagagcactttatgccttgtataatttgaattataagattgccagatatttctaacaaagcagaacagagctgataactattcttcatccagctcatttgttaggggtaactgcccaagtgttccacccttcatattttggctttccagacttggtgtgtctaaggcagttctgtttggctcacatttcctctgacccaccctgagtttgcttaacctggtcaaattccacttctggaagctttgtggtgttgggctttaatatccagttatatgacatttcagataatttgttctcggtaagtctgtgttcatgattttccacttaccttagtttaaaaccactctccatggttttaaaggaatctatgaatggatgtagcctgtcagattatacagataggcattaggtaccgcttctccatttttcttaccacactgttagaatttgtgtgtgtgtgtgtgtgtgtgtgtgtgtgtgtgtgtgtgtgtgtatgatcaaaggagctatcctggtagtaagagggacaaaaataaactgcagaaaaattgctactgaggacattcaggcaaagaggcagcctccagatccatgcaaggcttgactcctgtggtaaggagtatgaacatgtggtgacattcacaaagaagccttagaaatgcctctttctcaaactgtgatgtttgcaaaatggtatctcctggagctttgtccttttatctataaactgcctttgaaggggcatggtgggcaagagagaccaccaggagaagagctcagggcttgcagttgaaggatgcttttttggaaagcacagcccagctgtgaaaatggcaattagccatggaggagcaattgccctgcaagagagtgcccgcctgctcttgaccctactcacgttcaccttccagggcggagagtgcagaattcaatggaatggtcatcgtcttgttgcttatttttggagaggcagcagatgtgcacaatctacaaaagaacagaaatagattctacctagctatacattttgagcttttatgttttattcacctggcactgtagtggctgctcgaggggtacagctcctcctagggcatgggaggtctgtgaggaggcggtgtgggtagcagctctcctgtgaaccataggagatcctgctcagtgttggatcgagtcactgcgttctgcactcaaaacctgtcagtccttagctgtctgtcttcccctgcgactcaaggttcatacttcctttactactgaccaagagatagtttattccatgataaagagtttcatatttgtttatgagcatctccacaagcagatatattgaagttaaaagttctgaggggctcatggcctcttgtgtaactgagaagcaggcaaatattacagaatttcctactcaggggtgagaaacttgaggtggagatgatgaagccagttatcttacagtggctgaacagtaaacaagttgcaaaagtggtgtaagagtatgcctgcgtctgcccttcttgcttctggttactattcttaccatcgtacaaaacatcaaaataatactaatacccgtcagatacttcccagagattatctcctttgagtatatatgccattgcattttatcttctatacaaccatgggagacacagatttctgcttgtccccactttacagatggagtcactgtggttttagatcctgtagcttacttaaaatcacatgccatgaaagtggtttggcagaatccaaacctagatagatctccaacactttcaggtgttatatggatactgacccttagtttggtgggagacgtgaatagaagtcagaggtatggcttgggaccagtatacctgtaaaaatgtatgtagatcttgcttcctttttttttttttttttttttttttttggttttttgagacagggctgtcctgtagaccaggctgcaggctggccttgaactcagaagtccgcctgcctctgcctcccaagtgctgggattaaaggggtgcgccaccacccctgaccctagatcttgctttttgaaccttggttttctcaatcatgcacggtccgggtgcattacacagatgcgtatctggaacctggagaaggtcattgccaagactgattcctaagagctggttctgtgacccagcctagggcatagaagtcactcagcaaatgttcttagtacttagaactaggaaaaggaatatgttgaccccagaagctggacctagggtggttgacatccttgggattttcttggcttgttcatacagatatcggagctttcccacccttcttttgcacccttcttatgtataagttacttccattcttctctcccttctctcttctccccacccccaccccctttctgagagccagaattaggcacatataacataatacagtgctagttaccacacctcccatttccagcttacctgatgactgagcttacagcagctcctgagaacaaatcaggttttatgagatctataaatatcttggataggaattttatttcattttcctccttcaaataagacataatggaagcactcatatacacgaggaatattcttcctgtgataaagtggggtgtttgtgaataggcctctgaaaagcaatcgtttgatatggttgttcatgttgggagttttctcttggggagggggcttagctgcacatacactgctataaaacttaaagattatatcttggaatttaaggtttaattcagagcctatgaagaggtttatttgacagatgccagcctggtgtagactgcactctttcctttagtagatttttgcatctcttgtctttttagagatagagaagccagctaggggagtctgattgaagagtgaatagcagtctccctgaagcagaggttctcagccttcctaatgctgtgaccctttaatcaggttgtgctgacccacaaccataacattatttttgctacttcatacttgtaattttgctacggttatgaatcctaacgtaagtatctgatatgcagaatatctaatatgtgaccaaaggaggttttgactcacagattaggaacctctgccccgcagagttccttggctagttgcttcccttccgtttgactctaggttaaggtgttctcatccctccttcacttcatgggctgtcctgggaagatgtcaagccactgcacagtgctcgggatagtgctttcctctggatttagactttcaatacttgtaagcttagacattgtcttattgtattaaccaatacctagacatggaacagccttttctaaaaccttttcctttgaatagtatctggaaggaactatgagcttagacattaaatcatatagtttacagcagacacacagtgaagtagctgctgtgtgagcctaacttttcctgtctgtacaatggaaaccccagacttcctgtgtcatatcttcatatcttttttttttttttttttggtttttcgagacagggtttctctgtgtagccctggctgtcctggaactcactctgtagatcaggctggcctcgaactcagaaatctgcctgcctctgcttcccaaattctgggatcaaaggcgtgcgccaccaccgcccggcatgtgtcatatcttattcagggctttctttagcagtttaggtatacatttaacaggttttgtcgtttgcttttgtttttggcattttgaggattttgtttttagggggcatttttttttttttaatttcatgtcagatttgaccactgaagttatttatttatttctttttagcacaaatccctcctcttctcacccccatcctctgtaactcatttaagtagagtataatttaattcgttcttgaaacagtgagtcatttgaacaaggtatacaacagaagaggagtttcctcctaatgttatttaatttttctgcttaactttgcttccctgtgcaatgtagttctagcatttggctctgctatgtacagcgtttcttctcgtgtttctcctccaaaggctttttctcctcttcagtctgctaaggtttactatggagatagaactaggagctatgatataatcagatacataaacaggaaactgactgacttgaagctctgtcttatttgactagtattcatattccaattttctttatactttgggtgtttttggacatactcgtcaggctaaccccatctcccatgttcctatccggcttcatttgcaatcacagcccaggaagcctgcatgtgggtttgacccccaagcactcgaggcactgtcacctcctaacagctactgtctagggacagttttgacttcgccatcactcaggatccattttaattttctttttaatctctccatcttgttgaatgtctttgtttgggactgattctattttataaggcaatttccaaattgcatctcactttttcctggtcatccgggttctgttgtagatcacggaaatgtggggtagaaaagaccatctgtctccccctcccccgcctgtgcggcccggttgctcccaagtgagcgagcggtcattcttccttggtttctgcaacattttccaacttggaaagaaagtgactttgagtttcctgagcatgcagcctcctccttgtcttgagtgggagtaaaatggaatttaaaagaaaaaaaaaaaaggcaaaacaaaaactcaaaactcctcaaccccttcagtactatttatggtgaaaaataaaattaataagttattaaataaaattatgtgagaattaaagaaaacaaaaacaaaaacaaccacttaaaatttttttttccccagtcaggcactgcatactcattaaccaaaaatgattttgttctggtgattcccttagcctctttcagagactaaaccaacaaatggtgggaaaacactttttggtgtgtgtgtgtgtgtgtgtgtgtgtgtcagaataaccagttcagggattttcttagaaaccctgatatagaaacatgtacagaattctcctttagctgccctttttttttttttttttttttttttttgtggaagttgactttgtgggacttatttcacttaaagaagtgatgttctctgtgtaaaaagtcccagtattataataaagtcctttccaagtctcaagtgctctgctgtcttccagaaattgccagcatgccacttgtcctttattttctagtgctttcaggatgctattttacattaggggtgcttaaaggaattattcttttatattggcttccttgtgttactaaggatatccctattgttgcccagatggggactttttattttttcagggtcatttttaccctctttaaagctgcccctgtgacttacataatatgaagtatttccccttcttttctccaatctctatttttttcttttgtaaaattcttggctgctaaatggtgaatcaaggtcagtctcaatctcccccccctcctctcctctccctcctcctccccttcctccccatccccttcctccccctcccctccccttcctttctccttttctccatccgtgtgtatttgaacaagttttcaactccaagtgccatttatattactgtggagcgaattactatgaaaatgtaggagaaaaggaacgatagacaggatacgggcatgaaaggagcctacaaaccagacatggagtgcagcccacttgctagacccgagatgaatgcctgttgatgtttccctccaacctttgcactgtgagacccaggtttataaagattaaaactttcggagggagctctagacatttcgtctcccttctcctccccctcgatttgcaaataacccggctgagctttaagggtcattaagtccaagccaggattggtctctcaagaatcctcagcccctttgccataaagtaaacgtatttgcatgttagcacagtgcatggtacaggctcagcatggcttacttaagccaatgctgaggggaggggaggggaggttgcactgcaaggggctttgtgagcatcgtgctgaataaacacagaatcaaccttgggagacagattgagtccactctcagcttctttacatccttctaatacaaagggtaattcacctctggagtagcctctctcctgccttagcctctctggcctccatgcttcctccttcctttcttttgattgattgtattactaacactgtcattactagttaagatgaagagaacaggttgcagatccaggatatctgattggcagacatttggttcaaagtttataatatttgttttaacttcatgcttttcattttacgattgtcccatattaacaagcatttttagtaagaaaatttaaaacatgtgaagcttgagttaggaatgatgctacagataggtaccctgacttggtagaagtgtggattgtagatgagactgaagtgatggtggcgtggaaaatctgagaataaaccacagtgaaccatcaaactatttctcctgtctgcagtgcaggtgctgtaataacaggattgcagtcctgagtggcacatggatgtaaacacttagtatgccatcacatgctgccctagtctcctgctttctgggctgtggtaggtgcgtgcacatctcttgtctggtagagtgatgtgtgcgcagagatggagaaaggctaggtttgggggttggaagtgagagctctgttctaaaggcagatctgtgtggctaagtgactcattaacaatgtatactgtcacatgctgttctgtgataagattgggaatcacctgggtaggaagtcctggacttaaagggacggcagaggcccctttcccttaagtcttgtcaagtttctgctactcacgcttctaagaaaggcacagaacagcacgtagctggctggattatggcctcttgccttagccagagatgaccttggtgggaataacaaggcaggaaaggagtgtgaactctctgataggagggccatattgaccttgggtggggttactgcaggtaggaaaggacgtagagactacattgactggaccggccaagctccatgaagtcttcacagctgatgcctatgtttatctgctgttcagaatcggtcctatgctgacaagcctttgagaatcaagtgtcagatactgaggccattttcattttgtgccccctggaacactggggagtgaggtgacttctgggtttctggaagtgactctcttatgtcttcctgttaccagggacataccaagagtgctgtatctacagtgaccagtgctagaggaggggctacccaaggaacacggacatcctactaggaccataccccagaagaaaattgccctctccctgccgtcagctgccaatagctcctcagctagggttgggtgcttgcaaaacacttcctgctccatgatgtaatgttcacttgtttgatcttgtgcagatagccatataggtgctgtgagatcataagtactgcagttctgccatgtctaggagacaacattgcacaatgattctccctattctccctctaacgttcatcttcccgctcctcatgatattctctgagtccagggggggtgggggttggtatagatgtcccacttagggctcagcacttgtcctagtttgatctttattgctgtgaacaaatattgaccaaaaccaccttcgaaatgttttctttagtgtacaggttatagccggtcatcaaggggcaggcaccaaggcaggaacctggaggtaggaacagaagcagaaaccatggaggaccgctgcctactggcatgatctctctgcttgctcagtaacctctattatgtaggcccacctgcctaggagattacacctccgacagtagactgggctctccttcatcaactagtgattaagaaaatgctaaacacacatgtccacaggtcattctgatttgagtaattcttcagtaggttctctcttctcagctgaccttaggtttgtgtcatccttgacagctgaagccaactatgccagtactcaacagtcactcattctcagtgatcagtgaccagcgatcagtcttggcattgactgctgcctagtgaaaaagaagctattctgaccaaaattcagactacctaacctgtgggtatacacaaatatttagaaggcggttttgacaacatgagtgtttagcaaaaataccagcaagttttacattaaggcctgtgacctacctagccttgggcttttggacaagcacagtgtcaggcatgagtgggtctcaaatcaaggcagaagatggttggttacctccatatttaggtcatgctaccactaggtaggtacatcatgcggggcaggattttgcagtgtgcagagtccgccactaggtaattccattgtagatttttctctaccagtggcctccatagcaccttcgggctatgaaagctagccagcaggaagttagtttactatttattttgagattgatgtctcagtatcctgcaacaaaagcatgtaccactaatttcttatttttttttgtacaagattttaaaacaataataataattattattattattattaattgtgtgtgtgtgatagagagagagagaacctgtgtaggtaattgaacaactttgtggagtcagttttctctttcaaccttcacctaggttctaggcatttgatctcaggttgtcttgtcggccttgcacataaaatacttttacccagtgagccatgtcactgactccgatttcttattcttgtctaaggaaccaacacatctacatggaacctaggagaaggcagttatcagcccttaatggctgctgaaaagtgcacatgctctgggtagaacaagaggggtgttgagacatgtcttttctcttgtggctataagcaaaacaaagacattgcgagagggtcttggagcggggtggcagagcaaagactggggttgtagcacatggtaggatcaccaagagtttagacagtggagaacagtttgggggatagacgaggggaggagattatttccctggcacggtagacagtagcaaatgaaaagagtgctggagccataggcatggataccaggagccaaggagagagtctggcagagtgaaagttattggagaggtggtaacattggctgtgtacagtatttgcccatttaaaggggaagctaccattcactgccagccagatgctgctataagggacacaaaatcttctgacaggtctcagagttcaagaggagctaaaacaaacaaacaaaacacacaaacaaacaatttaaaaaagaaaataatcagaatttaagaattgtagttccctggttattaaacaaaggtagaataaaaatattgaatgttcaaataaacactgtaggtcaggcttggacactgggccattgggcatttagcccatttatctttggcataggcatatctgttccttcatgtccttttgaagtgaaagtttgaattttaggatgactttggacagttgtgtcatctaccaggactttcttggtctgcctacttgagtagacagactttaggtagaattcagtgagggtctcagaagttcacagcttccaatggtctaggctgtagatttctgtaagaaacaagaggtgaagctgggctaatagtcatcaagaggtatgaagctgggctaatagtcatcaagagatgaagctgggctaatagtcatcaagagatgaagctgggctaatagtcatcaagaggtgtgaagctgggctaatagtcatcaagagatgaagctgggctaatagtcatcaagaggtgtgaagctgggctaatagtcaccaagaggtgtgaagctgggctaatagtcatcaagaggtgtgaagctgggctaatagtcatcaagaggtgtgaagctgggctaatagacagtaagaggtgtgaagctgagataatagtcatcagcctcctgaccacttcttcaaggatttcttgggacatatatttagctcaacttcccacctgagcagtggcattagagaagcaacagaacactggagcatgcaactaggtttagccaccaatatgacttttgggcaagtgtggccataaaatgcttaagtcatgagctggataaactccatctggagagctgtatctttctctgtaaacttaaataattgtgtactttgacggtttagttttgatttttaagagaggataaaaaagctcaactatttaaaaatgttaaatggttcagatcaagtagcaacattcaaagctcataactatgacagttagcttcattggaaaacactgttatgttcttttaaaaaatcaaatatatcctaaaatagttcaaaaactggctggctttgtcacccttgcccagggaccatagaagtagccaggccaggggtaggtagtgatgtttgtaaatctttgctctccctaagtaggtcccctttctcttacattaggggctccccactgtgccttggcccttaaagcatgggcttgcttcatttttgaagaactttttattttgaagtaattacagactcatgggaagttgcaaaaagagtacaaagagacctatgtgtcctttacccagcttcctccaatggggcctacacactcatcctaagacttgttttattttaagacatttcttaggaggtgtgggtgtggccgtggccggagggatgcatagaaaaaccacactgttatgagaaataagggctgaagctgaggtgggggaggggctgctctgccctagcctctgtccctttcagctgttaaaatgaaaagccagtcacttttccttctatgtatgagagaagaaaaagtaatttaaagaataatctgttgtgggggccgacatacataaaatttcaatcaaaaccatatgaaaacatttattgacagtttggggaaaggggaagagttataagagaaactcagaaaaggtccttacatttacgtttctaaagagcagtctaggtaataatggtaatgaaccagctatgttttcctgtgtgtgtgtgtgtgtgtgtgtgtgtgtgtgtgtgtgtgtgttaagtcttaggtgttagcttacaggatagcaaggttcataggaagtctggaccattaagagagccctttaatagtaatttctactctttcagcaaggacaatagatggacctttcttcctgcagccttcacggagaagacccaggagctagacaggtgcaagtcaagcgccagctgtgttattgatcaggctgcacacagacccagaaggagcaatatagtagtctcacatccatatctctaaccacttcttgccctggcttgcttgagccaccatcggacagatgtgtatcatttgtcattcctgtgctgcctgggttcagtggaatcactgagtcttggcttgtgatagggcagactcaggaaaagacagctctccagggagaggtaggggcagctaggacaagataggtgagccatacactgagctgtttcctcttccttttttcatgtctcttgggcagcagcaggtgaagggagtaaaaggaattctggccagctgagtttccagggtaccttgaaagaatttccttgtcagtgaaggtctcatggaatcctaggacctcccgtaagaaaatggagattaaaataaggcagaacttcccagaggatgtgaagggaaggtggcagggacacagggatcattggaggagagaagggaactagaaagtagtgccagcagacattggccttgctctggagtagggctcaacggagtttctcctcttagtatttgggagagtggcagaatggagctagttaaagggaatgatttcgggaatgactttgcctaaaagaaaaaacggagggaaaatgagaggagtgtttgccaggaaccttagtgggagggtagtataagtagagcaacaagaacacaagagtccctggctttcacactctggcttgcccacctgctacctgcctgttctttttcacttcacatcttcccccatagtccctcatccaccaacagtgagtgaacaggtgagaacacgatcattgacattcactgtaaaccagcggatgcttgacgaggaaggggagcctgcctcatctgcagctctagctcagggtttcccttgttttgttttctttcattccttaattcctccttcccttgatgcttccttctctttcttccatggtagggctaaactctgtgtgatgtgttgaggataccatagtgaaccaaaggggcattgtccctgctccatggcatagcttagtgtgtagaggtggaacctgaagagaaggaaataactatggaagagtggagtatcatttgggacagaaggaaagcaatggactgccaagagtggatggtgtccacagatatgtctgacatagccaaggaactttcctacccatcttcccaaaactgatctcccagaactttcccaagaagtttatagttactactcagaaaggctctaaaatggaacaaatatttgataattcttggaactcttgaacatctgcatttcattattttgagtctccttacgttgtataaaatccctttctccatattctgcatgttgctaaacaaagatgctatcaccctccatgttctcagtatggtggctttgtttatctatttaaactataggtcaaaactttttagaaagtaatgtctgtaactgagcatgtgtgcatactttttaaaaatttttccatagcctttcctaaacagtgtggtccagtggctagtttcaaagctcatacactgtaaagagtctcaggaacaatctagaaattatttaaagaggcctgcagattacatacaaatgtcattctattttagataaagtgttagaatagattttaatgtctggtgtagaggggttgttctaaaaaaatgagcctcccacaatgagcctcggattctagaattgtgtgttgttattagcattggatcaatgtgttgtttaaagttttttttttttccttccctagtatgggggaaaaagttaataggtgtttctatgtcacttagtaaattctgtcagacaagaggaaagcctgatgatatgttggtaagcagcaccacaaagctcacggatacaaaagcagcaggtggctcgtggccatcatggtggtggtttgtttctgagtgtagattgtgtcgaatgttctagtcctgaagttctgctggaggcctgattagcaagatgccattgtactctgttgacagatgtgaatgttgataagtaaaacaggctgcaggagtctgattcctcttggttctttctggggaaagtggtgctcccttaatagcaaatgggctgaactaatgtctggtttagagtagggaatgcctccacttccatttagacacaaaagccagaatccgagaagttgaaggaagctgtgactcggacatggggagtgctacggatctgaaaacttgctttgtttacctttcgtgacagttgtcactagctctactgaggtgtggtgtctggggacaacccgtgctttcatgtgaaggcagaaactaggagtctcatttcactggacattgtgggctttgatggtgattcggatcttgtgatgggggctttggggatgagtaatgaaacctagtggcaggaatggtgtctgctgggtgagggtcctaggcaaagtggaaatgagtcaaagatggcatcttggtgcagattgaatgatatatactctgctttttgtcctggtgaaaacaaaacaaacaaaacgtgtgccttttggtgcttgaaggcgactcaagaaatttgagtggaaaattagtaacaggagatgctttaggcatttatggctgcagatgaaggcacaccatgcttgtgtgatgcacttccaacttttgccttagctccttggcattcaagaagctcttcgctggcctcgactttacctggtgcagctcttcttggtgcactgtgacaacatttggacctggagatttttccttttagagggagcactggattcctctgttgccccttcagggctgaggcctccctggcatggacagtgtaagatgggtagatagcatcctctcttacatctgccagtctctccccacccccctccgtcccccacttctctccatgtaggcagtattgaagctctctcacatgatattgcagagtccataatgctgctgtattgattttgccggctgcagtcacaggaaagcatgtgggggctgggcctggagctgcttgcaactctcagaagctgcaggctggagctagagtttcaaaggtcaggcatccctgagcactctgttgtgaatgagggcgccctggctggagcccttcttaggtggccagcattgaacctgagcagttgcacagtcccagctccataaccaggtgcctccgctggacctagactatcaccctgcatctggtgatgggtcctgggagctttgagtgcccttggctgtcacagtagggtcaggaactgcagcctacaggaatgggagaggtttcctctttgcatagagagccagaaaaacatccacagaaagatttgcaaaagagaaaaacacgcttaggccatgaacctgtggttggatctttgacaaatcatttttgagggttttgcaggaaagtgtctcattgtaagaaaaatttttgtgtaggggacaagttattccaaagatctaatttcaacacacacacacacacacacacacacacacacacacaatctgtatttattttaaacctaatgaacaagggagtggcagctcaagttgtttggtggtgagacttccttagttcattgagggctgtgtttaatttaggatctttattttttttttttaagttgtctgtgggtaggggttgtatctgtgttgatttttttttttactctgttttgattctattttgtgtttgttgtgagtgtgctttatgttgggagtataaatctggaaaagcaatgcccgagaagactttgaaaacatgtagcttcagaaatcccacttccctgaactgccaaggaacatctcaaagcagctagagcctttcaaagagtgtcccagtgcagcagaaatcacatggcagaaactagccatgtgatctgcagctgaatgcctctggccttttctgggccttgctggtacttttcttgctattcttgatcatgtgcatcagaaccccctagatcaggactcttttcccaagtatacattgtagccttgatgcctccacacctgcactgtggcttatccttagagaatttcattgtgctgtcctccactctgcaaagctctctcatttgtcagggtctaccccaaatgtgatttttgtccttccagtgtcatacattagttccttttctgtgttgccccagcagtgaacccatcccagttactagttacacagatgccagatcaccttccatggtttgtatttctaaacacaaacacagcccgagctccataaccagatgtcctgactggacctgaatggctatccaggaacaggagaaaggaccattgactgccattattggattagaaacaccagtataatgtactatgggcaacttgtaggggggaccaggatcccctgaagtctccatcaatgcctgataaaaagtagaaattcagaaagtgagtgttgaattactttcagagcagtgaaagatataggccctgcctcttgatgatgtacaattcagatagacagcctaccatcctaccagaaccttctttattctaagtcattatcctatgagaaagtcctaactatcagagagtctcggtcacctcacagacgaacatgcaatgagagacagacgtggctgtactaatgttctttaacatttttcattcagttgaaggagaattatgtctttagttgtgaaccctcttctgagctcagcaggctccaagagagatgtacctacgaaccccagacacagttggccctagttaatcttggtagttaacaaaacaaaaagatatgaatgtgaaagtgggagagatttgtggggagggggctgggtagacatggctactagggagatgagatgtctgaattgtccctatgcaaagtgtacacatatgaaattgtaaaaacaaataaatataaaaggcatatagaataccaaaaaattatattaaaacataatcatctagttcaccaatgacttttttaaatacaaaaatgttttcatataaatgttattttactgaacagctactaattgtgcccaacaccatgcttagcccaacagacatttaaaacttcagggttgctgggtgttgtccttgcttccgcctgccactcccatgctgtctctgtagtttgtatccctatgctgagatgcttagtaagactagagactgcagccagggtttcggaataagaacattcaacagaactcagcatgcagtgctgtgcactcagtactccttccagtgggtttctcctgcagaggggcatctcctcaggaaatgggggagagtggtttgggtcttcctagatggtagctacctaagagccatagtccacagcaggaaagaactgtacagaggtacctgtatttttgccctcttctcctttcttttcaaactgaagccgtagtttgcctcctatgggacataagcttatctggtacactctaatttttaataatttggatatccaggagtttttagataaccttgaatttaaagcttctttaaaaagtgggcagggatcaaccttgggtcttcattttctacatgataccagcaagctgaaaccatgcagtctctttctcttttagatggtgtatgcaatccagtttaccacagttcctgctcctttctgctgccttatgcctttcactaatatatcttattttccttgtcccttgtttatatttgagaactattgatttatcaggaagaggacttaatgcctataggcagttatgtacaaaataatactatctgctacagggtagcagttggactttgtgagatggggtagatgctgtagtttcaagtctatgattgagattcctggagatttgggcttttgtatgtagagggatcagactggtaaataacatctcctttgtacctagcttcttatagacaggcaagatttggccgtaagtttattatatttacagtcaggggatttttatggtattgaaaaggattgtgtacagctagtctgttttattaacacctttagttgaagaaggtcaaggtgactcactgaaggacacacacagttaattaagtaagaggatctgggcgaaagttctcttgactttggtatatatcctttgccccatattgctcttgataaaatatgctttaaaaacatcccaaagttgaaagcctttactatttaggacagtctggttgtccttttccccaaaggtactaacaaagatgctctgccaccatccacatctgaaccacactcaacttcatctacagtgcccttttctcatttagtctgttactaccaggtgattacagacaagtgctttgagattaatgtttacattccaggtaggaagcaaagccaaatgtctgctgcatcttcacattccaaaggaagaggctttgccgttctgttttccactccttccatttctcctccttctctgcttttttaaaaatatatttttaaagtcttatttttcattattttgtttaagtatatccacgggtgtctatgtaggggtttgcatgtgcacctgagattaagtgtcctgagagaccagaggcattggacccccctgaatctcaagggggatcaattatgagttgcatgacatgggggctggcagtaaactttgtgttctctcaaagaggagtgtgtactcttaaccaatgaactgatgagccatctctccagcacacctccctctttgtgtgtgtgtgtgtgtgtgtgtgtgtgtgtgtgtgtgtgtgtggtgagatgctcaaggagtcaagggcatctgattccctggagttggacttacaggtagttgtgagccacccgaggtaagtgttgggaacagaattcagactctcaagaagaatagcaagctctcttaaccactgagccatctttccagccccctcctcttaatgccattttcctgagtttctttttgctagctgccttttctatttgatgcttgaacaaaatgaatgagtgattggtaaaaatgcaccaagtgagtcagtgagatggctcaaggggtaaaggggcatgcagccaagcatgatgtcccaagttcaatcctgaggacccacatgggaaaaggtagatccagttcctatatgttgtctttagacctccacacatctgccatggcatgtacacacacactcacacacacaacccaaaaacctaaatgtgtaaaaaaaaaaaaaaaaaaaaaaagacagagagagagaacgaaccaccattttgaagggcaatgtgagggggaaatattaggtttatttaataaaaaatatatatatttatttaggtcaggtgatatgtttacaatgttggataataggctcaaaactctcctttactatacctgtttgttcatatttttggcattgatcaaataaataaaatgaagccttcagcataagttttctctggccacatattaaagaattacactagtttcatttctttacatctcaacagatcacattggaagtcgagaggttaaaatgactacatcccatttgccctcaatggtttcaccaaagtatggaatgaccctggaggactggggtactttctgaaccaaggtcacccatccatcccaatgttatcagaagaaaaaaagtgtagtcacaagtttctcatttggcatctatttttgtgtttttgtagttattttttgctgttgtttttgtttggttggtttggtttggttttgattcagaagatcccattccctcatctgacatgcgcgttcctcagacattgctgagggaggatgctgctctgaagctttcgacctcactgagatccttcgccagccgtccagggtggggcagaattgttgaacctaattgttattttccagaaaccttttgattctatttctggtttcactggtgatttagttgtgtaattgtggaaataccaatcttcttactaggtcagattccctataaattggaattttaatcctcacagcctataggacctcacaaggggactcccaggtgggagattgtgaaaaatgctaataagcatttttagatggttttcagaacattaatatattctctctctctctctctctctctctctctctctctctaaagtcaagtgattcccattgtgtggattgaatgcgcagagtcctacactcacctgcgttctcgctatggctttgtccttgtctgacagcttggttttggttttgtgtttttagagagaaatggaaggtttgtatagatttctgaatcagcaaatcttgggattcagctcacagtatatttttaaaaactctgtagatagtgacccttccattcatagagacattaacaaacgctgagagtacagatgtcttttcttttcaagaaaatgagtcacgtgcaaggaagagtagtaagtcgttgaagatcaaaccaaatctaaccaaactcgcaatgataagacatttcatacaaaacatcaaaatttcctttaattaaagtaatggctctgccgggggcccacattccaggattctcagtagagaaaacatgttttctttataggcgagttttattagcagtgatgttccggtatgtggttcaggttaattaatgatgcagtcaccctggtgtcttgccataagcctttattccagtaagtagggcactaggaaatcacattggcctatcttgccataccatagagaaatccgtaatttgggccattataatatgtttctgtgaggtacgtcaacaaagtaatttaagaattcttacatgaataccacctttgactaagaattaattcactataagtggtaagtgtcccatgcaatgctttgcatgttcttaactattttattggccgaaatgattgaaacctcaagttcggaccacccacaaagtcccatggcaccaaccttcattgtataaggagatttgtaccaagggccatttttctctcctgagagttttttattattattattaattttttatcatggtaatgttttaaaacttaatttgggttgtgcatacgtagcaaccttccttggaggttgaaacaacaaagcaactggattggaaattagatttcccttccgcggctaatgcagttctcattcctttgggagttcccgttcgcatgggctgatgatgtctctgaaactctatggaaattggttcagacaggaacaaagggggaagagaggacggacggcagtgatgattcaaattagtgtctcttcttcaatgagagtctggtgtgcttgaaagtgcatgtcatctgatatcagtcaagccacctaaggttaagtgaggtgccagagtgacaggaatccaaacttcagggtcccagcagttgagtcttcctgtcaagttgggttggatagttaatttgaaacctgtaccgtcttcacacgtggttcagaaatgggccacacgcaatttcatctttccttacccggtggaaaaccatctcttcttttctctttgatctgttcccaggcagcccatgaaagattcctagtacctaacttaattttgaaagggtacaggtttttgactcacgacaatgacagctttaggaagagacatctagagtacattaaaaagaatatacacttgctgtcagtggtgtccgtgcaaaaacacacacattcaaggaaatcctttacagacacttttcaagatcttcacctcagcgcatgctggtttgaacgccatcccctggtaattgaattttggcttatttccagtgtttgagagcctgtacccataaaataatgccttgaaagaactagtacctcccagtagagatatctttttatgtaaaattcttgaagggaatagaggtgaaggaaatgcttctatgtttggaaattgtgggagaaatagacaaatgagccaacaaaagggtcttgaaggacctcacccatgaaattagtctgaatgtcagaaaatggtggttcctggacacgtccaggcttgaatggatttttccatggaaagccttcttagttaaggtttgatggttctatagctgctagtcctcgaggacagactgttatgtgcttcatgctttggcgttcagtggtcagagttgcctttgtcactgacatcccattagtgatggcggaagtggtagtaaatgttatagagtatgttgagcctctctattgttcccctgttcccccaggacagcggttaataagcttccatcatgcaggtgctgagaggggtggcttttgttcatctgagtggcactagaagttcatgatgcaatacggactgcagagaagaaacaggcaggtgtttgcatctgtctggagtgagccagaacgtgcagccaagtctttgtcttcagaggagactgtttccctcctgcttgatcagtgtgaatctgtggcaggtgccttctaggtgaaatgatggtacctttcaaagcaataggacagcattttaggatggatttcttggctcaagagatcacctcaggttacctaaaatttcaagttgaaacataagtttcatatgttcattcaaccagaatatcttggaggttcataaaggcattttgctgcgtgctggggcctaattggtacatcacagtctattctctgaactactgttctttgtagggaaagatgggcagttcaacatgaaaacggagagctgagatcagtctgggaccttgtaaacactgaattgcaagtaaaattaagtagtatggagatggatggatggggggtattttgggttggcttgttcaggcaagccaaagaagggctgtctgggtaggtaacagtgaactgaaacaaagattaaacagtgctgatgtgcagtaacccaggagcccatgtactggggagtaggagggcaggtacaggtactacggtttggaaaggtacttggtcttagaatgttgtctgcctacggaatgtaatgaatgaaagagagacagagagaaagacaggtcagcaggggcctgagtaaagtagtaggggatggatggcaggccattggtgaattacagcagaagcttgaatgggagccgttgaacatgtggttttgtagagaagcaagggaacccctgtgtggggaacactgaggagagaggcagaggaagtaaataatggaccagatccagaggctggggggtgggagggagacaagaagagcatggtgtccatttgtccactctgctatccttggtgttttttagaagcaagagaaagaaagaggagatggccaagggagatggcctctgtgggtcaaagaaatggattttccttccactccaggaagcaaaacttcctctactccatgaaataaaccttcctctcagcttagagtatgagatttgctctatactgtaaacacgtaaacttatcccctgaagctctgaagtacttacagttaaagcctggtaagaaatttgaacacagacaaccagcctgcctcttatgtttttcagtgaagaaatttttgaattcatcatagttctgggctccagtctccagaattgtgaccactgatgggttttcaatttgatcagagttgcttgctctgttcattcattcacccacccattcactcattaagcaaaatatatggcaggtcacaagtcaggaatgagtccagttgcctttgtcatgcacatactctagctaaattttcattttagagattgatgaaatcaatagcctcaaggagccaagaaatacaaaattgtagccctctgttaaaccaggatcactgagtgtcagaggcattggggttcctgttcagaggcaggtctcatacagtcccggtcctccaaaccctttcccttcaccacactattgacattgggcgtctcatgctttgaccctgccctccatggtcgggtcttcctttgatcttcccattgctatttcacgccatctgagtgccacagactgtgcatacactctaagctcagcccatccttcccttagatgagaatcctgagctcagagaggttgaggttgctccatcatgcagccattttaaatattttaggaaattgattttaccggcacacagttacacaaaatcacaactgttgcacaagaaaagcggttcagggctggctttcattgtgcccttggctgccatttttccatggtctgaggaagtacaacactcttcctgtaccctgcattgtctgtaacgttccgatcccgaggttcctggaagctgtatttgagtgtcttctgtgattgtcagcaactagattgcatctgccactgagggccccagtgggctttgaacctcttcttctccggaaattcatgctgttgagagggagaggacaacaccgtccatgcgtgcagtgatgccctgagtcaaagaagtgtgtgtgtgtgtgtgtgtgtgtgtgtgtgtgtgtgtgtgtgtgtgtgtagtagaggaagggcatatttaattaacccaactcagaagtctgtaacagtgttctaggagggagtccgtgagatgactttactaaataaataagaatcccagaagcgccagtcaggctgagcagcaacctgggagaggaaggggagatgatgtcatggtttcggcatgttcccatcctgactgctgagagtaccgaggctcatggagtttgtgtagggtgtgtgagtgtgtacagggttaataggaacgggtggggtgtgtacgagtgagctgtaaaacaggattaataaccccttgtcagacctttccccgttaactgtgtttttcagtaattttagtttgaatgagagagagctctctagccaattagtgtttatttgtttcttttggcaaggcatgttgggtggtggggagaggaatgagattggtgagtttcaaatttgtgttttgtttttgcattttggaggaagtgagtagcatgagtttgggttttcaatgctgcctcccccatccctgcttttaagaggcaggaggcaagacgtggccagctggtgccttgaactgacacaggtgcagaggctgtggggggtggggagccaagaataattacaggtttctgaagcatcaggccctgcctgacacaagcgctcgtcaagaaaactgctctttatggaaaattaatggtgaagcttaaaacccgtcgggctcattgttgttcttgggacaccatcttgcagaaaagaggtctttccccaggtccatgggctctgtgagaagcctgccttcccaaacaggaactgcttagcgttgttactgactgtaatggattttttcctttaggattgtgaacttgagacccctgtggggttgcatatcagatatcttgcagatcagatatttacattacaatccctaacagtagcaaaattacagttacgaagaagcaacaaaataatcctatagttagggccaccacaactggaggaactgtattaaagggttacagaattagaaacattgagaactactgccttagggagtcatcttgtttaatttttagatctatctcttgacagcagtatatagagagtaattttctttgattcttaaggcatggattttattatgttcatgagaatgaaataatgactaaaattgggacatctattgagacttggttttagggtacttaagtagcaaatagtaatagtatttccacctgtttgatcctaaatggtggcttggctggaagagatggatagaggagacaaaggatcatctgtatgtctagctgttcgtgtgcactagtatcttaattactccagagttggaatttaattagcttagtagctgaggaacagtgaggagcctccttgagggccaactgaagaccggtggacttcaaactgatatgtttggggaggtagcacccaaaaaaaacaatgaaaaactgagttttgtctgtccgtctgtctgtgcttggtccatgtggcatccagttgacactgttaccttgaaaattgatggtaagagccaggataaggcattcctatttggagaaggagggaagcctagaacccagggcccagctttgcccagctttgcccagctttgccctgattgtgtgacttcagtgtcaaatttggaacagagtggtttgtaggattcacgttatgtatgcattgaaactaaaaatccctcaggagatcaaaggggaatttgaggatgctgtacatcgtgtatcccaggggaagtaatttcaaagacactgtcctcttcccgggcctttaatcccatctccttccttcctggcttcctcaagaaaaaatatccaaactaatgttgtctttgtatgttggaaatgatttggggaggagaagcactaaagaggttttgctataaatttcctaacttttgtttgtttagaattaattttcacagcattgtctctcagaatttacaaattgctagagggaaatgtttaatttggtttcagctctggcaaccagtggatctgagaaagagtcaggaggaatttcattggctctagaaccctggttgttttgtggagttcagcagctctgacagcagtgtgtaatactattgtacctatggggtatgctactgatgtggggttttcttttttaaacctagtagttaaaacacgaagtaagagatttttacttgtgctgtattcttgctcactcgagttttctagatagaatccactcctttccagctttctaatgctaatgtgctagtgataaaaatcaagaaatggtaagaattgtcttgggactgacttcctaagatgtaggaggtggattgtacactggttcatttgctcattctgccctgaaggatgttcagtgtgactgtgttctccctcaacccattttaaaatgttgagaccacagagtcctggtgctcggaaatcgagggtctccacaggcgtactgggtttgtcagtgctggctcttctcagccagccacagagataaaaaggtagcaaatctcactggttctttcccatctttcaactctgacctaatttcaaaagagtggaactacgtcagcatctttgatcccatcttttgaagagagaaaacccatcaagttcacacccatatcaaccttgatgaatctttttgttgatttttaggagttagaagaattcttttttgattaaaagtctaagtatatgcacagccacaaagtctctggaaagactaatttagaaaatgtctacagcaaaggaacctgacttccctatcagtacagtagcttgtctggtatcatgcagaatttccattctgggatgtgtctgaagatttcaaagcacacatgcaaaatgtgagttttagggtcctcccaaaagaaagaaaaggttgctcccctctttttctttatgagactcttcggggaccttggcactgtggttaatagcacgtggcaaaaccgcatataataattggcaggaagaggttcccctgggcagccaagtgcagttcacctgtgtgtaattacctgggtgaacattcttgcttggaacaaaagttcaccccttccttgccaggagcattgtcatcactcattaccatcattaagagcaacaccaggtcaaggtctgatcgaagaggaagcaccactttgcatgtttcaaaaagtgggaggctggctttctccatgtttctgcagctatatgtctttcttaaaattgtcttatctccatataggcttaactcttgacccttttaggtgagggaagtggcattattgtgaggaaggacaactggcaaaaggaccacaaatgactatggattgattaacaaattgcgtattgactgctggccttttatttctttgactttgcattattccagaaaaataaccattagcaaagtgcaatttcttttccttttttttctttcttttttctttttttaaaattgccatcttgaatacatagatccaaagactttagtgtacttacttgtcatgccacagttattaagtagtagcaaaaatatttcacctatgtcttcatctcattttcaaattgggacccaaaataaaaattaaaactttttatgccctagtaggttttgggggtggggacaccaggagcctaggctagagtctgcactttgtgcttttaagatcataatcttaagcatccagacatcctgcagtgtatgtgcactcagatgcatttagcagatatgtttcattgcccaggcttggggaagagtgtctttcaacatttggcaatcaggccattttctcagtaccgtgttttgtagaccagccttcctgtgggagatcgactccgtactgaaatgtgagtgaagactgatctgtacagggttaggttaggtgaaagactgcttcaagtctatggacctggggaaagtcaagacgaaatatgagtgagagaaaccctttagggaggtcttgagaggaaatggtaacagtttgccctctgcattagtaggtctgggatagtttatgatacactaggcatgggtcgaacaaaagccatttggtgattttggcatcatatagccaagtattttacatttctcttgaacccaggacagtaactgcttactgccagtgggaggggaattttgatgggcttatctgctacaagactggaattttgctgttctccttcaactctggtttctggaatttgtcataaaagtagagggtatggcagtaacaggtttgaagtctttttaaaatactgttttatcattttgtgtgtgtgtgtgtgtgtgtgtgtgtgtgtgttaggaatcacactctaaactcaggtcatcaggaatggccgccagcaccttcacccatggagcctgttcaccagcacattttctttcttttgctaaagccaggtcttggattattacctttaacaagcttgtttcaacaagcaaaggggctgtgaaagcatgaagcaagttattagaggagcttttagggtgatagctttggaggcagcttcagatggtatttactaagagactaggcagggaagccatgcgtttcagagttgggatatcacagtcttcacggagctcatctgtgactcataaatatccgagagtcatttagcacttgggaagattctcaggttgagacaatggatcaagccttaagttgtgttgctaggtcagccaggagaagcctcactcagcaaagtgagttagcagatcggcataatttgtgtcattaaactgacacctgctgacccagacttggagtttggtggctggagtgtcactggaatggagagaaacatgtgaactctattcatatttatagcctggagacattactagcttgctgatgcttgctctatttcatttttcctttccctgtaactgactatagtattactattatcaccaggaaattatcattgagaaaaataccactagcttgtttacatacttcatttgaattgcattatttttaccaatattttattggtctgagagccattgtatttaaatgtcacgtcatctcttttagtctgtgacagctttttagcccctctttatggtgtatgaccttgacatttgtaaacggccagttgttttgggtaatggattctatttgggcttgtctgatgttttctcatgattagattgcgttggtgcatcttgggcaggaatgccacttataatgcagtacctcttcgaacttgaacctatcacacagagggtgcatgttgtcactggtatattaagtatgatcacgtgggtcaggtgctatccactatctttccccactgtgacgttgccatttttgtctttggatttaacgtctggttgggtgtttgtcttgttcttacatgtctgtctcttgacttgagcttccattgatgagtcttaattgtatcattattgcattgctgtttgtctcatgattattttttaggttattatcaacctttttccacataaattataattttatacaaggaaaaactgttcttttccctgtatttaaacattcatttatggtagcacggggttttgttttatttgatgggttataattcattatcattaacaacattttccctcattgtccagatgtgtccactaagacctctttaacagcacagagtctttgctgcaccctcttcctttctgagccaccccttacgtttccttattttctgagtccataggatcttctaggcttagctacagtgttaccccagtccatggaacaagtagttttccagtgaattctgctgctctttggtggataatcatatttaggaaccaaggctcctgtgccattgctagtagggtatctttacctttaatttttttattaagacagtgaggtgatacctgtatgtatacctggacaaattataaacatacttctttctgtatgcacctgtatgggtgtgtagaattaataatattaaaacccatgaacacttagtagcaccagtttcaaattaaacattgaaggcattggttaaagcagtcttacagatacttacaaatgatattgcaagtgaactcttggtcttggatataatttcatcctaacattctctttacctgtaccattttagtttctatattcttgacaggaaattctttaaactcttcatcctagttcctgctgaaagtatgccatttatctaagctacttattatttatttttaatggagattacagggactagttttcttaagacaaaaaaaaaaaaaagtccctcatagtaactgtatggggttttctgcacctcctgactgacagtcatggaagataccctacaaattatagcctttctgaggcagcccagattttagaagcttcgttgtttccttgttcctagcgcagagactccttggaggcaaaacctggtgtactgagaaagctattttttaaatccttctataatagtgtctgaatgtatttaaaatattccagcttctcagaatgtacaatatgaagggatctgagcctcataccaatccatttatttcacatctttgaattgaaatctgtataagtagacagggtatagtaaagctctatctgcagacaacaaggtgtgtcacattaatccttgcacaggaaacagagaactgccccaaggacatccagtaacccatgactcagctggcttctacctggagcatggccgcctctcaaaactctggttctgctctttgggcaaaagggcaagaagtgttcttgattctgattgtgtattcaaagccatgttttagtagtcatttctaaaactgcctgcctcagcaagatgggccatactctgcactgtaatggaaacctccgtaaatgtaaagggcttgatacccataaagtctgtcatttgatcatgaagaaataaaaccaggaaacagtaatagatatctagaaaaagaaatctacaaatatctagacattaacataccttttacttgctcccagtaatgatggagtcctctactgaaacagctataaaataataagcataacagaaaaacagtgagggtgttggagagctaagagaagcaaatagattttgatgacacatacataagaggaagggaactaactctacagttatagtccaggtttttgttttgcttttctaatcttcactaggggttggagggtggggcagttgctggggtaacagacttttgacaagtggaggagatataatggccacggccgtagtgcacagtcatcacatccttgataaccattaagtacctgttgggtgccaggcactgtatgtagtgggaaacagtttaagggggcagggtgggcttaatagcttcaagattagaattttatatcacagaggtgaatctactagggtgctgactgagggtttccgcagtgaaaagaaggtgataaaattcacagcaattaggtggagaacaaaaggttcagatgtgggattcagaaagggctccagcaaagggtattacaaattctagacccaagaaggtggcggtattgggttattttgtttgtaatataaagtgcctggaagaaccaagccaggaatttatttagtcggtaactaaagcatcagaacttagttttcaaataagccttccgtggtgagcgcctccacattagacagtggagagttccttactcactgagcccataacaacttacgggtgcatttgctaacaccccactttgtgaattcttgccactttcagcgtctgactgcttgctctgcgcctgcattgcatgcatctatggtcacatctttatcatataaattcccgagccttgcttcaggcatagtagttgtatgaatacttgtaatgtgaatgttgagtgaatatggaaactattcattagctcatgccgctacatatcatcagtgaagcccaaagctgatttttttggttatgatttctggttcttattcagaaatgcaaagacttacctgaagtctgactaaaaactggttggcttaagtgttaccaaaataaaatccttgacagacaccacatgacttgctatatcatcagaatatgttctgaacagaataacttcctatagccagcacactggctggtttgaagcatcgtggaggcagtaaatctggagctagtcatattttgaattgccattagcatttcttttttgaagcctttagaagagggtggaagtgaggtgattgtgcaagttagcaatgccattttatgtaagagtctgtctggagtagcaaaagagagaactttgaaatacaaacttacttttgaccaagtccttaccattttgcaaggacttacttagcaacttggtcgaagattttttgctaaaactaagcttttttggttcctctctatctaccaggtgaaaggtttatgctgtggtttataatcttacatcttttatagctcttttactcactccttaggtcaggctggccagagactcagagatctgcctgtctctgacttctgagtactgggattaaaccattgccctgccacacccagcacctttgataggccttaattgatgtctttgagcttactttgactggatagtcagaggtgctaagcaatcatgatgagatccatgcctcttgccacacagtggagagcaactgcatttgttatggtgtactctatggataataggggttttgtcttagtctcaaggattttataatagacattctgtagaatgatatctatttcttgtagtagtcatggaatccaggcccaacccaaggcagggctggctcttggatgatggcttcacaagttgcttctttgtttagctctggttttctgtgcagatcaatttgtaaagttgacttagttttgtgacttacccaagtctgttttgaggattgaaatggggccatgagcagtctatttgcatcttgcttccatggaatcctaggaatgcttgcagtgtctcttacctgctggactgataagagtggaaagagatcaggatttagatgttggggttctatggattttgcaaagtgtaaggtagttctgggaccctgggtctctctctgcaacagtggttaaagtcattccatgtggccttgctgaactcttcagaaatactcaaagagtaaataccaaagcatcaggttcatagacaagaagatcatttcagacactaggcatgaacatcttctctgtcttcctggtttgcctgtcaatacatgcatggtgtcctggtgtcctttacctcagatggttacttctctccttccttcctccacagacatgccttgagttggaacgctacctccagacagaaccccggcggatctcggagacctttggtgaggacttggactgcttcctccacgcttctcctcccccatgcattgaggagagcttccggcgcctagaccccttgctgctcccagtggaagccaccatctgcgagaagagctccgcagtggacattttgctctctcgggacaagttgctatctgagacctgcctcagcctccagccaaccagctcttctctagacagctacacagccgtcaaccaggcccagctcaacgcagtgacctcattaacgccgccctcatcccctgagctcagccgccatctggtcaaaacctcacagactctctcagccgtggatggcacagtgacgttgaaactggtggccaagaaggcttccctcagctcggtgaaggtgggaggggtggcggcggcggcagccgtgacaccagctggagcagttaagagtggacagagcgacagtgagcaaggagggggaggggctgacacatgccctgaaaacaagaagagggtccatcgctgtcagtttaacgggtgccggaaagtttatacaaaaagctcccacttaaaggcccaccagaggactcacacaggtagtggtacaagttggccgcaggtcgtttcttcctcttttgggtgttccctttgtggcgggatgggcttctcttataagaagttatcttcatgctcactcgagggtacagagaggcaggagggaagtggagtgactcacttccgaccctaagttccagcacaggacatggatttgtcattgcctggctgaggagagagctagtttagaggcaaagccaaccccagcagagaaccagtctaatggaaagggaagggggtggggggtgcagtggtaggactcacaggcctatgtggcattccccagtccctccacactggcatttgccatagttttgtgagtgtgtctctacaggtttgatcaacagtacaagctgaagggctacatttcaaagcattcacagttaaacaaggtagccagggtgtccctgttcaatcttttccccggcatccctgattttttatcaaagtcaccaacagcaggagggtttcagagttcattagatgtgatcattctataattaattggcatctcctcttttgcattgttctctggcgcgtgctttatggggagatggcagaattgctttttaatgagcttgttaccgagaagaagttgctaaagtgattatattgctctatgtggggggtggggggaagggtgactgggggactgtatatttcactcagaatttctgtgctgatcccaaagaatcatactggtctttagggcagtgggactatttgggagtgaggggttcacacagcaaagaaggaaattgtcattttccttgagactgtctttgttttcagctctggggttggagcttggggtgatgtttcttcttggtcggctaatgtgccactaggagcaattactgggattggtggttgttaagtgagtcagtaacagtgtatcacttgtatggttcttgtatactgtgtagggagactccccagtggtattagagagaatgagtgttctctgggtaagtgggtgatggcctggggtcagatatgatagtgcaggcctttaagtcccaggacttggaaggcagaaacaagtggctatatctctatgagttttaggccagtcttatctacttaagtgagtaccagtcagttagggctacatagtgagaccctgcctaaaaccacaaccaagccatccaacctgggtttgggatggggcatggggccatattgacatggtggtggtgggtgttgtactctgtgtcaccaaggaagttgccttgactaataagtcagacatcctgggttctgtttctagctctgacactgactaattctgtgcctatgtgtctattgcttgagccctgttttccacatttgtcaaacagtatggccctgaaggcctctttcagctctgatgtttgggtggaccctgtgatgtctttgcgcgacggtgaacagttttcctgagggaaaatgaatcctgtgtgagcagacgccacaggtttaagcatcaggggtacttctgtgcaatgaagagagcttacattgcttcctatgtcctgacttaggcattcacccctacgactgagctgaaagcgctatgtggctcttgctaggtttgggcaatggtctccctagcacagcttttgcacctcatggcccatcttcagattcctatctgaatctgagctcaagttcttcagtttgacacgccaatgtcaatgcttccttgtgttatctgccctttcctttgatactgttctaaacttttaatttttctttctttctttgttgagtcaaagatgctacagtacccccagacgatgatacacaactcactcctcctgtgctctaaggaaaccagagaaggcaaagttaagcaagaatgttgagatgtgctgggttgtgaaagacatggcagtagatagatccctttctgaacttttgacactaaacagattccttcttatataggagctcagcagctctgaggaacagagatttggggagtggtgggtaaaattccagagcattttcttctttccaccttttaccccaacagagatgtccagatggtaactgtggtgactggtgtgttatttgggcctttgttctttgaaactgtctactgagagtatgtaccaaggtggagcttgatatgcacagctccagcaactacttgctttgtgatgaatacaagtgccaagatccctctcaacaggatttaccaactggcctcgttggtgtgtattataagaaaggcagtattgagtagcagttaagagctaggcgctataaccaagtccacttgggtttgtgttctgtccctactagacttatgacttgcataaattagttcctctgagcttcagtcttctcttctgtaaagaaagataattgtgtccacataacagatagtttccaaggttgaataagcagttctcttggcaggtcataagagctcattaacagcagtagtggagttgttttgttattattactgctgtggtggtttgggttgttactctcgatgttgacactggttagcaataactgggtgagacaactttatgcaaacttgagatctagagatgagtcggttggctagagctagagaaaggttgaatatccttgaccacaaacccaaaatgttccaaactcttaacactcctttttagtgtgtttatgagggttctgggtatgtgtgcacacacacatggatgccagaagtcaatattcagtgcctccctcaatctctttcccatcttagtttgtgagaaatgctcttatactgaacatgaagctcactgattggctaggctctctggcacagtgagtgtttaggatcctcctggctccacttctccagctttaggattatagacatactctgccatagttggcatttatgtatttatttattcatctatccatccattcatttacctattcattatttacttatttacctacttccttccttatttatttatctacttacttattgaacatagactcttttctcatacagtacatcctaaatttccattccttccaactctccttccacctcttcctcccctaaatctgccccccccccaccatttcctttcagaaaggagcaggcctcttggagacaacaactaaacacaacaagacaaggtacaataagacaaggaaaaaccctccatatggagactgtacaaggcaaaccaataggaggaaaagaattccaagagcaggcaaaagaatcagagataccccgactcccactgttaggagtcccatagaagcaccaagctaacagccataatttatatgcagagggcctgatgcagacccatgcagtctctgtaagtccatatgagccctctttagttgattcagtgggccatgttcctactgaatcatggaaagtaagactttggggtcttccatcccctctgacctttgtaatttttcctccccccatttctctgagttccccgagctttgagagaatggagcccatggagacctctgatttagattctctcctcataattattagctgtgtgtctctgcatcctctccagcctgctgctggaggaaggtctctcatgaggacaaggcaccatctgaggatggccgactaccattcagaatcacctcatccattcttttatgtacttgctgaagatcagaacgcagatcctcatgtttccatggtaaacactgacctagcagccatctcagctggccctctgcaagcttatttgagatccccatttgacaccacaagtagacagttccacacctgactgtttacacaaagaacagtcaaaatgcaggcaaatcaaaaaatattataaaatattgctttcaggctatgtatgtaaggtgttcatgagacaaaagtaatttgtgtttgaactgagtcttatgcttcatcatggttactgcaagaccagaaaatacaatgtctctgacgttactgcacccaagcatttagaagaagtacgttcgtagtcaagtgagttttcttatcttactccagtggctgatgtgtctctggggaaggatgatgcttgtggatgccagggtgcagagttaaactgaccttgcaggctctagcctatggaaattggcagagatgtagaacaaggctctcctgagatagcaagagaagcagtcactatccatcctacaagagtcttctacatctccactgtcctggaagacaagcatggtaaaagaagaggagccagtgctgtaagaaagagaaatgcatgagaagtggggcaggagtagagatggaggatgggagagggaatatgaattaatttggattaaatggatgggaatcaagtatttatttggaattggtgtgaatggggcacatggggaactgaaaacaaaggcgctaatttatgtgctgtggatgaactaagtaatgaaaaaagcatgaagggtaaaatcagattaagtgcctacatataaagggaatgggctgcagaaagcttaagggcatgggtagacggcagtgggatctggggtgggagagtctgcttgctgatagaaggagtgtagaggggagagcgccagccaaacatcgaaatgaagtttaaaaatggcctgtgaatggatccaggcgaactattcaaggataagattcactccaagtcagtggaaatatatcttatttttatggtgtttggggatagaaaaagaccttaaggaaaatatcccagagaaaggagagatactggcctcttgttctctagagttcatatttatataaatatgtgtgtgaatgtgtgtatatatgtatatatacacatatatacatacatatatacatatagttatataattatatggtaatatgttgcagaggagacataattgccaaatgaaatgaaataaaataaaacctgtgagcctctgtcttctccacataaagacaatacattgttggtgatgtggatttgctcacattcaggaattttttttaaatgttattcatttagtctttatatagatgagatttagtgggctggaaaaacactcactcttctttttttcttcttcttctttggctgtttttgaaaatgctgaattctgcaaagtttttggcccaaagcatatcaagcaatgagatgtgtggggttttttgttttattttggggggggttgttttttgtaacagatgatgttcaagttggtaaattgggcctaaatgctgttttctaaaggaggagaagttagagatgggatccagggttgaggggcaagaagttgagacagggaatggggtgacagggacatttagaaggatcttggaagagggaggtatgtgtgcatgatggcgcctagttaattcagcttttcagcagtcatgacattgtacgcctttgacactcccttttctgatatatgtgatagtctttctcagttattgactctttgtggtcatagttttccctatcccgtctacaactagctgaattacccttacatttgaataccagggacctttactcccagtgtttaagaaaatcaccccagaatgttcattttcatcatcacacaatctgtaagatgtgagtagtcttatgcacagagacaaagtggtttttcccatttctccctggtcacttctcagaagaaacaactttggcggacgagttctgtgtgcatgagacggcatttcttgtttggagattcacagaaaggcatgtccgagttcagagtgttcagagtggacttgtgtagacaaagtcaacacagagatcagcaaataaatcttggtttctgggtcactcattggcagatatgaaggggccccgctctcttgggtgctccttggagaattctttctgtgggatgggagtgctggaatggaggggaggtatttgatatacaggaggagataggttttgcattgaggggtgtaacaggatgctttgcagctaagggaacacaagagtgaagttggctttaacacttcagtctgctttggggcagttttaattgaagtcaagaggtgatagatatttcaaacaaagggacaagtgtggatgtttgggagataaacagaagtaattttaatatacatataatatacataaattacacatagtgaaagttctttaaaacttgaacataatttgtttgtttacttgttcaacagacaccttaaaagtaccactgtgcgccaggccttgttcacacgcaccttttataaatgcgatcctgatcctttcagttcccatgttaaatgagtattgtcttgatttacataggaagaaatgaaatcttcagagaggtcagatcattttctcagcatcacacagctcacagatgattgcgcaaggaatcgaatcaagaaacagtgctcaggtctcagtttttaactttcgtgctctaatgacaaggggaagtaagattttcttcataatctatccttaacatagtttgaatacaggtggacaaggaaaatacctttaaaaattgttaaggagttagggccaccttacatatacttctctttaggcacctgggactcggaacgaggaaatagcaaagctagctactgtcattatgatcattgccatcttcgtctttaggattaagaggaggcatgtttgaggctattgcagtttgttaaaacaataggaattaatcactgtccctgtggagtaaaaagggcaaaaagcatcacacgggggggtggggggggaaactgaggtctagaaaggtaaactgacagtgtaggctatgcgattctcccatgggcagaatcacagtgggacgctgctctcctggcctgtgggttttcattcaaggcaacagttgccttgcttcctctgtttgttcctcagctgtccctcaagtgggtatgaagtgctgacagtacctgctggccttgttgctatgactaaacacctgacagtttaaggaggaaagagtttaccatggttgctagtttcagggatagcctctcaccacaagaggcaagatggcagcaggcaggcaagatggctgatcatattgtgactgcagttaggcagtgcagagaaatgcattttgggactcatactttctcctttcttttcagtctggcactcccggctcatggagtggtgctggccatgtttaggtcttcccacctgttaaacatctaggaaatgccctccaccagcacactaaggttttcaaccttgagacaatgctaaatcacatgaagttgagaatcaagtctaactgtcactttgcccacaggtgtgaggtaccgagccacctagtcaccatcagagaacagggaaggccattctgaggaatctttaggaggaattggcattgaatgggcaagggctttatcaataggaagaggcagcatggaagattcgggattaaaaagtcacttttccctttttgcgtgggatgtttagtgatgctcttcatgcttttaaatgacaggaatgttataatacactaatttatataaatagaagatctaattcaaggtcaggcatatcagtaggataaaattaaatacctcagcatcaatctgcagggggcctattggcccactttcaactgcctcctgctgtagataggattcctttgaattcatacaatagccactgaaatagggacaatttaaagacattaaaggggcctttaagttgctaagacacatggctgctaatgacatttatccatgtgttgaggcagaaagtcatttaggcctctattatgggatgggaagcagaatagggatgaaaggctgagtttacaaggggggagagtttaatagtctgcatttagtagactcggaactagaaacgaagatgtatgaaatgaggtgataggagacagttaatgggagaattttatgattctgagaaatccagacttcaccacatgataacctagtaatatgaagtctctaaacatttatgaagataaatttatgtaaacacatgttgggtagaatggtttaaactcagcatatacacaataagcacattaattttatcattatacttatagtataatgtaataaatacagattttgtgggatgcctattgcagatgtccttttaatggataattggtgttcacacagtaaataagtatgttaaaataaaggaaccaaaaagagagaaacatgaaattaatcagtattttattgctctactagaagttcttccttactctcatctctgagaacgtgtctcttctagaacagaagcctaaaatgcaatttcctaacaatgttgaattgggacccttttctcatgggagagtatagagcctggatggcggccgggtgttttgttataggaagcataggaagagcataatgatcatagccctcctctgaagatgtcagcaagtgaagtggtgctctgtaaggagcagaagttaagggagtaaggggctcttaagggaccttgctggcagtaggcaatagattttataagtctcctgatctcctgaagttgagcaataatgaagtgattctgtttgaattaggaaaaagagttgagccttaaaaacaattagagaataacaacaaataacttggaccttgtccttttcctgaaaatgaaaagatgacagacgaaagggttcttgtaaaacagcgtgtctttgggggaatgtgtgtgcacatgttctgtacacacatgtgtggaggccaaaggacaacctcgggaagctttcaaccctgtttttaagacaggatctctcactgtgagctgaggcgggctgattagaccaggctggctaggctgcaggcctcatcttcctgtctcttctaccccagtgctggcaggtcaagtgtaccccatcacagccagctttttctgtgggtactggagtggaactcagaacctcaaggttgcagaacaagcattgagctgactgaggcggatgaaaagttgattgtttggtttttattgttgttgttttagaaggaagacatattacagtatgtgtgtgtgtgagtgtcatagtagttgaccccttccctttcctcacccccttcctgtcccctcacttgtctaattcgtatacctatatgttgccttctgtgttcatgtctcttaaatgtgtgcatgtctgtgtatttaagtaaactagattgtacacgagtgacctcttcattcttctgattaccctgtgttgtccaaccattccttctttagactcctcccctgcttacctcttcctctgctttcatgtcatatatgtgttcagacttaagtctagattccacacatgagaaaaaacatgcagtgtttgtctgggtctggtttgtttcattctatttagtcaatttgagtctaatggaagttacagttgaagtcttgacaggacatcactgggaaaccaacgtttcatagaaaggcgttctgaggagcccgtggaattgcttgggaatctgggcctccatgctgactagacacatataaagcctgaccctactcatccagacagttcctaatgggtgcatactgaaggccccgggaagtctggtttcctcaagtctcaattcctttcttctgcactcctaccgaaatacctgagacaaagcccttagtcccctcctccagttctctttctagccttctgtaaattaggatccagaagcagtaaataaggttgactggtggcttacatataactgagaacaacaaggcaatttcttcttttaatttttaaaattctcagttataggagattatagaatatgaagagtcgctaagtcacttgggagacatgatggatggatatattcgaattgactccattcttcaccattcttctctctgggttctctgtcttttcctaagagtagcttccctctagttttgtgtacagataatatattggcatgacaattatcatactaaatgttagtggagacatgaccattaaaataatcaaacagcagcagcttttaacgtgttcgttattcactgaggcaaagctggggttagcctccctccgtacaatgctgttgctcccaagcactcaatgctattgcctttggagcttatgattcatgaggcaaacggagatggagattaagaaataacacattgaaagttccttacagagcctagatacagtcttgtcctaggccaaacctctttggaaggccctcatctcttttgaccttcgtcttcccctttctctcctctaagattgtatctgcactcaggtaagatctcttttgtttgtgttcacaaattaaaatgtgtttataatttgaacctcttttatgttatgaacaagtcccttagcatcataacagatactctggtttcttttgttgtttctgccttcacaacgtgtccatgatgaacactaaatatatggaaatcagggaagaggtgcattctgtcctcaggaacttacgtttcaaaattcccaggcgtactgcgacaaaacagtccacctatttcaccagatgcactaaagatcataaaggatttcatccaagaaggtggatctcccctccatatgggaaattgtctagttaggtgtgcttttctttctaacaccatcctttggagccctcgtttccatatcaagggagtctgaaagaaagactatgcattgttcttaaatctacatcatgtcaaaggggaaagatcctagaattctgacaggcatcttgagaaaaggagaactgtccaatgtttgatggcggataggatataagggaaaggctccctctggtatatgttccaccgaatatcaacatcgagtataacacaaaatatattttagtataactgtagagaagtcatattaaaagtttttctgtatttgtctgttcacggagctcgatgtcacctcagtgggattcattgcttggttatgaacggataacacggaagcaggagctccccgacagtgggatacacagcatccctcactccactcgacttgtaggaaggaaataatgattgctcatattgaattcgcaattgctcatgagcctgttgaaactagtattggtattttagaaagagcaacaaaagctacatctcctttctatgatacaggtaataagacattttatgttcctagtgttcaggggagcatcagaaaatcaatatgaataaattcaagtacagagaggatctgacctatttgaagatgcagagaaaggcaaatgctagcacatatcataaacacctttatcccgctcgtatgcagacacttgcatgtagaaaagggttcatgggttccttagacatttaggcagagggagaattgctggcttttctttttcttcattctttgttgttgttgtttagcgtttcaaggcttatagctaaactgattttaaaactaaatactgtcattacagaagttttttttttttttccctgagttcttccaatttctctggggacaaaataatggttgcttgaagcagaggagaaacagtaattagggcaaatagtaatactgtgcatgattgaggaaaacgtggggtgggggagagaattcaacacacagacttgtacagcttgttactaggaaaccacatcagcattaaatacagtgtgctaattggctatcctgtttctgcctgggtaccagcctgggcctgctacacagctgtttctgctccttctggttgctaggtaactgcatcatttcttctccccctccccctttgtattctggagggtaattggctacttctgctcctggtgttgctgctgggtaccagtctgggcctgctgctctgctgttttccagagggatttagtgggggaggggaggaaaggagagaggaagatatgctggcaattaatggagcataagtgcgaattctacacaatgtctggcacctgcgtccccttatcctgctttctccactaaaccctttagctctgaaaaaaacgcattaggctcttgaagtctttcctttctctgtgtgccttatgagtgtagtttaaaagaaataaggcatttaaagaccaatcacataaatgatagattgggccttcttatggaaaaaaaaaactggcaaaacattacacactggtatttgatagaggcaccaggagaatctgcacaaacgttaaaattaccaagtcactaacaaagcagcagctcgagcgtctccagggtagtaccactttctctcttaaacggacaggattcttttgtaaggcttgttgattcacggtgcacaaagtacaaaataaagtgaaccaaaacataataggatttttcccggtggttttgttccctaccaagtaataaaggaaggcctctggaccctgctgacttggcagtataggttttgttcatctggtgtgcacagcacatatcttaggcttaaggtcagtatggtgttgcagccacaaaaaaattataatgcatgttttacacaacttgatcacttacggcaggtaaccagatacgaagcaaaataaatctgaaggtaattctgggattcttaaaaagggtgttttttgtttgtttttaagtaaaatgtataattgctgttgatatcacctgttcaagtagaagtttccatttcatcattactgaaattctcactggaagtgtgaggaggagtcttgagatgtgaagtcatgctccaaggatatccactttaaatggttgagaaagtctgtgtaaattggggccccttgaagagacagctcattcccctgggatggagcagttttattgagaaaactctgagcatgtcggtgactgtacacagaaatagtgatcaaaggcgactcatttttactggacacttatggccactgctggttttccatccttgcgatgtccctgtgcccttttggaattccgtgtgacaggaagagcctgatggagatgcagaccctttccactgttaagaccaggctctgtgaaatcacttctgcttaacagggcttcataatcggtaggtagactcacattctgctaggtggatgtcgagactgtggtgtgtcccataggccagcagaaaaccagctatccattagttgcattcagcgagcaagaaacaaatctcacctttggaggataccacagagcaggtacacggttatttctgttgtctgtattaagagttccagttgttaattactcctaaatactatatattgaaaaaatgtaccatttgctcatatggaaccaccaaaagtcaaaacactcgtttgttcctagacaagttttatattctgatggaaagagtgttggtaattggaaggtttagccattgttggtaacaaattaccagaataacaacttcttaaatgtgtgttgtagattgttcctagctgacttagcagtgtgtgaatcgaaaagtcccaaaggagttctgagcagttttgtgcctggccctatttgtctttgtccattactcggatatgataatatggcctcactgtatttctgatcaaggaagctcaaggtgggggggtctttgaagtcttgggtgattgtggttagtcccagtgacaggtgaccatcagtacacacttctgagttccctttgtactctctgaggaaatagatttcttttcttggggcatttccatttctaaagcaattgtaaaaatgcaggtattgaatcaagtatgcttggggtttgaagaaaggaggtagaccatatagctgcgtcaactctttagtcttaaaaacaggcttgcaatgcttgtgcttcacaaagctaacacctattacatcaggctagacagctgggccatctggaaagaggagtcagatcagtacttcctggcatggatcagtgatagctcttagcattcctctgagggcattggaactggtgcccccagcatggggcagatgcagccctgtgcttgggagcagagctgaattctaacccactctgccttttaggtagacattgtgtgtttcctgtcttacatggccaccttctcgctagggtagtgacctgctcagatacctgtttcctgactcttaagcactgaggctaatgaagcttcaacaagaacatgagagtcagcagtccgaggggaaactgaggccgcctctccatggctgaacaggccactacatgtgaaagcaaaccttcactcagttccagacgctttcacaaatgtgagatcatggcgggggggggggggggggagtgccctgaggagacatctgccaaggtctgaggaatgcatttcatctgctatcttggtagaggtagagggtggtaatactagcatctggtggatggaggttaagagtctgctgaatatcccacgatgcacagaacagcttcacaactgaggtggagagctagttgcctgatacagccttgtcatctgctctccaagttgctctagacaacttgaagaatatttcctatccacttaagatcatcacccaggctttcccttctgtttaatggtctttaacaatatggaccagatagatgcactgcacactttattatttctgttgagacttagaacatatgctgtttcttcccctgaggaggtgaaggaaaatcaccttacttgctagatgcttagctttctagattaacattcatgagcaccatccatactgcttttgctgaaggctcctgacctgtaataatttcagatttttttagaggcaaaaaggtttgaattacatgagcttccaggctggtatataggagggcaggactttgctggaagtgggcctagctgaccagggcacaagactccacactgccatgtggtattgtctttccatacctgtctgctcacgtggcatgcccacagagatttatgaaaccgatttccctgctatcaaaaagattaactcttatagtacagaaataagagatgtatttccagcctaaagatgtcacctttattgaggagacttggcattgcatttgatttgctgcttcggtacattttccgtcattcaatgttcagatctgcaatagcaccgcaaggaatatcctagaagtatttggaatttgtagggagaacagtgctatttcagataaaaggacttaaggggcgcagtctcctgcacgtgtactttatatgtgcattttgcgaggagatgtgaattatgcattggctcctttccctttattcacattcatagaaaataagactgtcagacatgctatccccagatacaatggacaatatgctattataattgtatgccactcttcttgctgtttggatataatactgccgacagtattgctcctatacatgtgaatgtggctgtagagagtacgtgacatctgtggctttcacgcagattagcttatccgttgccacttggagagattgccattagtgatttggcctcgtggggtcacagtaagtgtcatgttttggatcatagttgttattggaccttagttttaaactctgttgggaatcagtaatatttatcttgatgacctatagatgcaatggttattttaccagtttcccagagcagatgtgccaaagaagggagaggctgaggcattgtgtcttgggctagctttgagggtgagaaggcaattgggtacgaagtctgggaatagcctttctacatcacttaatcactttagtaagcagtactgcctcttacatcagtttgtacaacttacaaagctctctctcatgcatcctctcatttaacactcacctgtctgttagttattctcatacccattttacagatgagaaagactatagaagatcgctaagcatggtcactggtgactgtagcagagcttcccacaccatttccccgaggacctgctgtttctttggggaaccctgacaacacagaccaagtgtgtttggttttttttagagaaaataaatgattcactggtttctattctgtgtaacacacgtgtgccaacgatcataggaagaaatcagtcttgtccaatgggatgacaagttcacagtagctgagaaaatggagtgtcttatgtattctctccatgggttgccatgggtagtcctcagtcataggtggatattgtgtggatattctcaaccacaatctagtttgaaagatgcaaacagatgcaaggtgcagactcttgaaatgacatcttctagcagagaattgatggcaagaagtgtgagcagaagttttcccctggtcccttagtagctaccatctttgctcacaaagctggaaactcaaatgaaggtactgcagggaaattaaaggatgctgtgtatgggtctcatataaggttttcattcagatttccagagtcttcctggctgtgcttgaaagaatggtttctttgcttatatttttgcttatatgaaaagtatgaagttaggaataattctgttgggtgtgaaccccccaccctgcccccaggcccagttttctgtagatcattgtagatgagctaaatgtcttcagaagaggatggcttgggaaatgcaggaactatgtgtccactaatgggcaagagcactaaccagggctagacttgcctattgtgtgctctgatctctcctctgcattcagagacagcacacagtgaagaagaacggctgtcccccaccatcctgtctaaaggatgtataggaatagcagaactgtgggcactgcattgtcttccagagatctgaaggaaaaaaaaaaaaaaagatactaacgccaacgggggccaagtgaatggcatgcattactgctgagggctcacccttccaaggactatgcctgtggattctcctttgtatggtcctttatttccacgaatcattgtgtttccaaatctatttcttcctttcattttatcccgcttgccaaggaaataaacttaagaagccattgtaattggcacagcctatccccatctccattcgataatacttgtttggaatttgccgctaagcatttagagtgcgtactagtccatccatgtgtcctcgtgtccctgccccgatgccacaggttttttcctgtgatttcccttgctgtccctccttcaaccaaaaccaggatggttaatgatcaaagccaagggctggaaaaaatccttttcagccaaggagagccctgcgtgcacccttcccacatctgtcacggagtagcctcgaagggccatgcgcacaaagcttattggatcaattaccacgggcccactgttaaactttttttttttatcttttgtgagatgaataaagcaatacttaaaattagctgagcagctcttgccctattgaggcatcagatctttgtatacacaactacattgtccaaatgcgcgtccttttcagatgtgatttagactcaaaccactgaaattttgaggtctgtgggtcaagggcccacactgacatggtttgaaaagtcacctgatcatttttgtgtgtggttgcatggagggccgggagcccatggagctccctgtcttggtgccatgtcacaaagaggatctggctggcatttggcagatagtttgtgtgtgacaagccgggagaggggggagactgtgcatgtagagactgtgggagccagtggggagtacttgggaacctctggggcccaggcaatgaggcagcctggctgtggagaaaacagcagttataaaatataaatgtgtttattattatactgggcccatgctatataattttacacacagtcatatttgtgatttacggctgcaagtccatatggaggggaggcttgctaatttagccaaattgacaaggagggctctgaagacgctcagggtggaaggaggagatggagctaggaaaatggtctcctgaacagcctttaaaaggtgggggcagggactgctctgtcagagaagcctttgttcatttattttgataagcagagcttggctttaattattcatgataatgcttgccctggaaggagcaggcctccgatgtcacggcagccgcaggctggtgttccgctctctgtacagttaacactcaaatgcccacctcacttttcttgagcgatttcctgtgctttcctcaaactgagacctgagaactagcttcatttacaccctgtgccctctgaggaatcagtattggctgtagtagagggaaaacattgagtttttggaactcaatggaaaaaattagggagtccaatggttctttatctgggctattttactgaatgcttacaggtaaggcaggatttttttcagtgcaggagcttaggtgtctgcactaagtggtcattgagttgagctgaccttgaagcctgggcgtgattatgaagctttttctgcctgccacactattgtgctaaaattccctaggaaggaaactaagaaacgggtaccagtagcaaagaccccgccccttccagcccagtgggtcccatttgctgcactttcagcctctttcctggactcagcatcaattactatcatcatttccggcagcattccaaagtgtttcttggcttagcagaagccgtaggtagttggtctgagctcttcagaaagaaagcactttggagcagcgtgctctaattccaccatccccagggcatctatgatgcattcctcttgaagaagagcttcatgcacactggctgctgcaacctcagaatactcgataaaccataaatattagcaatcttaacgctgagtggtggcatgtgcacgctgcactcggcagagccctgggagacagccctgatatgctccctttcagccagtggccatgtctaaagtcactgctgtctaagtatgttctgtatcttcccactttctccagctctgctgctgtgaatggtcacatccatgctggaaccactgtcttctctccctgaggtacttatagagccttccagggtcccctgctttcttcaccccaaaccatcatctgcttcggcccattccccactgtagagtgagtgatgtcttccaagtttaatcctgatcatgtctggcctctgttgaaaagctcacagtcccacactcatagagtgaagtccaagatgttaaacctgtccataaaaggtttcaacacaaagatgatgggggccacttaagtaattaaaatatttttctaccactttcaattaaaatgaaatcggttgttccaattaattaattctagtactgttttatttacttggtatacccaaaatataatttcaaatgtaatcaatataaataattactgagctagtttatattccttccattactaccttcctcccccatttcacagactgcagtcctgtgtgtactgtacacttaggatgcatctccatacagattgctcacaatggaatccttcagcatctgcagtgctgaagacgcgggaagcctgcacaatctgccttttccctattctccagtcacattgggtatctctgtggtgtgtgacaagactttctgaggagatgcagcacacatgtctacccactgcagagtagtaattcactactactggtgaaccaataagttttcttggggttacttacaggaacagaaaggatcaaagacaggtgcatcccatgcatagtacctcagcataggtgacagctcacaagggctgggaacctggtgcacgctgcatagcctgtaggcagtcagctccacaggttagagagtgtcctctccagttgcatcagttgatctaaacattttcttccaggcagctcagctggtttctctttgttctaggcagtcggtctgttctcagtcctttttgcagcttgtcttctctgaggtaattctcatcagtctttacggtttattcttgggagggaggggcttagtgaatctgctcagtttcagggacttcctggagctattttgggttgtttgccttctatcttaaggagcatctctacaggatcaaatgtttccacctgggaggacagtgctacagaacactcctccaaggttcagttcctctctttgcttgggccaggtataggagaggctatgtctgaggaatgagagaacctcgatccctgtggagaacctgtgggaaacattctctggctgaggtttacagccttcgcagacactggtgaagaattgactgcttgctttggagttggccttgaggcattctggttttggtttccctagaactgtttcaggtaacagagatattggagaaagcagagaaagtgaaatgacaaaatgctgataagggtgacctgcagttttgcctatccacgctcctctccagtagccagtagtactattctgtacaccaaacttgagacctcgaacctattggagaggagagcttttagtctttgcaggttacgttccttcgcttcttcatgttttaaaagcactactctatgagtacatctaagtagctatggcgttctttcccattgaaacctctgttttatcagaacctatctccaaagggaaagtaaagatgcattttctttgtctattgtaattgttgaaaggggcagtgatgtagtgattatatatgtttcgtaagttaaggttagattgcctggtctgcaatcttcattctttctctcatacactaggtgaattggtaaatagcttcatttctgttctagaagaacaaaggggccactgtctcactgggggctattgagagggttaaagaacaaaatatccataaagcaactcaaggtcctaagggatacagtacttaaaaggtgcttgatgaatgaatattaatgtacggcccatcccaccatgatttgtaaaacacgagcagccgttaagaagaggtagaatcaggacacttgttcaagatgtctctgcagagatgcatttaactgttaaacttgtctaggtgaacattttgttcttctcccccacattcattctcatttttctccttcgctctctctccccctaggatagatgcctagatgtatcaggcaatattatagacatctagaaaagggaggcacatttcactgaatgaattatgtgacatcgatgagttacacaccatagttaagtggtgtttagactttgggctgtatttataaatgcaatattgaggttatgttgtagggcccaaaccctttgcttctgtaaccagcaccacatcatgtgtttaagagcggggatatggaagagcatctctattgaatgaaacactagtctcaggacttgtcatctagagacccttcacactggtctctaggcatcttcaccatttctctgtacttcataacaggcctgtgagactgatgccagacaagaaattagctccatttagttgaggggaatgaattcacagacctcataactctcctaagaatgcacagtaatctcaggagctggactagaacccgggcctcatgctggagaggagcttgcctgcatatgcatgtagatgtgtttctactatgctgtacttgcatacgaggtaccttttctggagactgacaatgtgactgaaaggggagaaaagtgactgagtaatggaatagttttttatgctgtaggtcctggtcattggatatggaaccttttcatctgcttctctgttatcgtatacattcactgggtccttcacagcttttgtgtccaagattcaagctagctcaagattatgtgtaagatttccccccccctccccgcctctctctctctctctctctctctctctctctctctctctctctctcaacctgggctcttagctctgttctaagaagctgtttaccaccaggactcattgtcatcttatgttctctgtcccgaagggtcagattttaaggaattgcttgtccccattattcaagatggctcccagcaagtccactttccactcctgtcttaacaaccagggcttaatcatgcatcatccagcaacccaatggagctgagattatttggttacttgcttgcctgtttgtttgtttattactttactttttgagaccttttgaagcagggtcttgctttatagcccagtcttccccgagcttgtagtgctcatgctttagcttccacaacactgagatgatgataggtatgtacactgagtggtcattcattaaccagtagtcaggggatcttactgtagctaagaagtgtgtaagcggagacaggagctgctatatgctcttgctcttaaaagtagtttctggtttagcctataatacagccctcctaatttaaaatgcttggctcatgaatttcctaatgtggcccatggtctgggggaaatccctagtgcaatcctagttggtggtgcattgggaatcaaaataagtgtgtgcaagttagctccctgtgaagtggaggaagttggttggaagcttcctgtacattttgcatttcatgagaatatagcactattggaataataggaagcagatacgaaatcaccaccttgagagagcaagcctatagggtccgattggccacatgctaatatttcttgcacattttctccctcctgaatgcaaagtcaaattgcattgacattttcttcccaggatgccttcatttttcagtacaagaataaagagaaaatatcatagctgtgggtttagcgctgaagaaattcaggctgtttgaggttagggctctggagtctgacagattgtgtgggggcgcttctgcatatgtgggtgtcaggtgtttgtgctgaattgtttgcagatttgaggggaaggggaggtcttgtgtgtgctaacgtagattctgtggatggttccatcatcaagctttcacaatgatcactattaggaagcatcagaccgaggacaaatgcagattgaggagacagtggtgggaggaagggcagaagatagagcaggcctgtgtgtgtgttcgcaccaggttaatggaaggtctctgacagatctccagtatgcttagtctcttctaggccatgtcacaaaaggcaggagggagggacagaagaatggaggcaagcagtcaggcagggacaggggtgggggaagtggggagtctgggggttaggggaggggaggtggagaacccacctgtgatggtgacacttcccaagtacaagcttctagaagtatgaaggtcatacattgtgtcatgttctaaacatacagctatcacaagctagttccagggctctggcctcaagacaattagtttgtaattaaggccccttggtctgactgttaccatctgtctgtccattcttaggattattccccatgtattcacccttcacctcgctgagataagccactgccgcttaccatatctgggccttttcacatattggtccttctctttggaatggccttgtccctgacatccttcagatttcagtatgtctgctgtcctctgggagcttctgccttaatgattctaatgagtcaaaggcctttcctctccacatggcggcacacacacacacaccacacaccacacttaccaaacaccctgggccctgcagtgtttctgtgtgagcctgatgcttcccctgtgggatttctctgatggagtgagtctttccattcactttcatctccagccatgtaattggcagatgcatattagaactaatgctggtggaactcagtgcatgttacaaagcggagcttcttttttcctatcagtgaattagagaagaagtctaagaattgacctggcttgatttctgtggacagagatgaagagtccattatccttaagataatgcatcttaaaggtctgtggatctggtagacaaggcagtaacaagctcttgtactattggattttggttgatcgctgacttattaattagcaagtgttgggttgggtgcaaacgtgtatctgagcctgtgttagaatcttcctgatgaaagaggtaaacaacaaaacatttctaccagtgtttgggatagcatttattataaagtatatagcatatagtatttattatatacttagtatttattgaattacaagtataaaatgtctcagtttaaaaatactttgcatctaattctggtgggaaaaatcaggacagaatattgtgccattaaaagataagtatctacaagaaacaaaaagtaggggtccaaagattgaagatttggagaaggcccaaatttggggggtgggtataaaatgctttagtagggggtgacatgtggaagcaaacaccatatgaatggacaaggacaccccagtcaggagcagtgtagcgaggtggtagtatttagagatggtgggcactccatatcttagagacggtcagtagctggtgaggtaggaaagcaggtgacagtttcatagaccctaagtacctcagcagcggcatgggagcatcagtggccctagcatgtcattggtcaaaaatacgaaatgtagactttcattttggggttaatatttttcttagacttttatgctaaggtaaaatagacaggtgggttggtttagataatggcgagatccaagctctgggaaaaatgctgatcattttggaagagatttgtgtaggtcctagaagacttaacccttctctgtgtgaccttcatctctaaggtagattggcacgtactgtgttgaaaggaagttcctctagaggaggcatctgactcccattacctctgagtaagctctctaatttgaactttcggggctttaatagaattacatttttgacttgttagattttagagcaaactaccttatggaaatgactgggcttagactgtatcgcccccgtctgcatgtgtatactaagggaaaaacaattgatagcatcatgatgttaatcaaaacactctcaggatgctgactccggacattttatagtatatatgcttttgaaaagcagctctgagaggttttgataatcctgtcctatttttttaaaaaacaaatatcatctctttttctatttatagcacatatagtagaaagctaacttctcgtcctaatagtaatttgggctgatattactcagtttttagtcagcagtaaaagaaagtaaaacatatccaaggcagtacattcaatgtcatcagctgaatgatgtcatcaactggatgatgtcatcagctggatgatgtcatcagctggatgtgctgttcagagtctctgatgtcatcagttggatgtaccgttcagagtctgccgtcttagcccctgcttattctctcagctgtcgtgtccttccagtcccctccgctttctgtgattcccaagcaccaatcacctcacatggtggagtatcatttaagccagcccttactcagccttggatgttccatggttgttccttttcttaaaattttattattattattgttgttgttgttgttgttttcgagacaggatttctctgtgtagccctggttgtcctggaactcactctgtaggcgaggctggtcttgaactcagaaattcgcctgcctctgcctcccaagtactgggattaaaggtgtgcactaccacacctgactggttgtttcttttcttactaccaaattctagtcaagaggaataaactcactgcgattttcaattggatgcacgctctggggctgtcagtctttgaaatgggttgtctctgtagggatccaagcattgtctgagaaacaaaggtgaagtattttgtcctttacaagctttgctgtactaagagtctattctttaatactttatgataatctttatatttgaaagcaaatcccaagcatcaactaaaggtgagtttaaatgaagctcatattttttaacagtcaaatttctatctaaatatcagcaagaatggcgggagcttgacttacagaggaattattgtggttgtaaatgggagaaacatcttacagattcatttgaaattatttcacatggtggtgaagttgttatataaaatgaaaaagataaatgctttaataactttttattcaaatttaacatacacctagtctgtaactatattgtaaccagtcatcagcaacatatatttaagtctccaaatataatttaaatttccaaggtatatttatgtttcatgcttttgttagattaatctccaaaatagctgatgaaaaataagttttaaaagtaaactcaaaccacataagaataaaacaagaaaaaaaatttataagtatcttggtgcctctaaaacaaacaaacaaaaaagtagtagttaaactgtctcaagttcaggaggtcatcatttcctgtttcataactggagagcatagagtgccgaatacggctctgtctgttttcttctccctccccctgcctctgtccctctctttggaggattcctttgagattgcttgccttgaacttgctgtgtagccaagaatgacctggaattgctgctttatgcctagatgtgtcaaggagtctacagtcttgggggagcaacagtgcagctatcctaaccactgtggggtgttgtagtgttccggctctgatagtccctggttcttctttgcccagccccactagcacttattagaacactttgtacacgttgaattaaataaggaacttgcctaccaccatcctttggcatcctttggcttgtgggaagctcagtgaggtgtgtctccaagcacatgcaatgcaatcccatattgcacattgcaaacgcttcttaactttcaacagttaaacttacttcagtatctacgtcatttccctgttttcatgaccaacccagttttcctccaacatttcaaacacactcacgacaaacctgacactttgcttcctaaagtttatgctatgctttgtgaataaagaattaaaaagtggaacatggccacaaaggatttgtctgtttctgtgtgttcttctgtccgtgatgtgcagggcagtgtacagcacagagtgactcggtgtgtgccccgcttgcattgtaagactcctgaagaagccctgtgaccttgccctcacatacacgtgacaagggactctgctcccaccatcttttctggtatcccatgtttcagatccgttttgctgcccccaccacaaattaaaggaacaccttctgttctagtgggactttgtagttcaccagtcatagtcagacactaggtttcactggaatgggtgcgcacaagccccaaaacacatgtggacggcagaggcaaagtctgttttcacatcatctgtgctgtgtacgctaggctaggtgacgctcaccttctagctgattctcctatctccacttcctaacccattgtagaaagttgggattacagatgtgcaccgccacatccagctgtctttacacaggttccagaggttggacttgggtcatcaggctgcaggcttacattggtagtgcttttacccactgagcaatcttccagcccaagaacttcttacagaagatcactgctgctggactctgtgaggacacgctgtcattgtatgacaacagcagagctagaataagacattcccccctttggagcaatggtttctgaagcatctactggaaatttgctacaagtgggattcccgagtcctcaaatgaatcagacactcagggtggagtccgactgtttttcctgggtcttaaagggcctctaatgcaaatggaagtgagagacctcccacaataagagattattcacggcaagagacattgctatgggaggtaaaaaaaatctacttaaaatcatgttgggcctcttatggcacctttgtgaagtatatatgtcaaaattaacacatatatgttaaaggcataactcaatacatatgttaaactttcaatggtgaaagttatgtagacccacaaagagggtaaaatatttttatgctgcattttttttgtttgtatgtttgttctttctctctctatctctgtctctctctctctccttctcttgcgtgcacacatgcacacacacacacacacacacacacacacacaccacacacacagaggaagtttatgctgtgctttgtaaataaagtaaagaagttagtaatggttcctgatctcagtgaagtttgctctctagcagggagagactgcagccatctactaagtttggctgtggagatcagacaaggcttctttgagcctttggatttaatgttccaagcttctgctcctttacaggccctttacacatgtccctgtttaaactaaacaaagttttcttccttccacacttgctgccttcacctggacaccttatcttgaatatcacttgatcaggctccaaaactcaatgcatagagattctcaaagcagattctttcatagaaggatgactcgggtgatcaattccattgtagcaacaaggaggagaatcttctaactcgggagggctgcctttacttttggggagtttgtcaggcccttccagacagagacataagcaacaagggagctggggatgtctgggaggagcagggggcagaaagtggacataggagataggtttaaggatacaccgaagtagaataactgagtgtggctaccaagactctctctcctccatcctcttgtagttgaggattcgtgcaagattatgagtgtgggagaaagctcacttctcccacatgtaagaacatggaaatgtcaacactgggtgtgaggccttggggtgccatgggcagcaagatgctgatatggaggaggatgaacctttaaggctgagttggtcatggggcttctgtaaagctcagttcagagtagaaatatatgtaagccacagagtccattttttatcttctttaggcaaaaagaaggttgggagttatagcttagtggcaagaatttttgcttagctcaaacaaagcactgccaaaaaagtaaaaacgaaacaggtaaaagtgattttggcaacgcactttacataaaccaatgtgaacaaatatgataacaggaaatcaatatgaaaaaggtatcaatacatcatatcctccactccttttagagtgagtctttaaaacccacaataaatttcttttgatggcatatctgaatccatgtgttaaacttacaggactatggtcctgctaagagtacaaagcattttgcgctgctttagtttttaaggtccattttacagctagaggttcaattctctggttcccttagtgcatttcagggatgcatatcgcatgggccttgtgtccagtgtcctggtcaggggctctgagagtaagtcagaccctctcccatctccatgttctggcgtaggatctgtacatcttcgagaatgtgatttcagttatttatttttgaacaactattgtgaagacatccaaggctatgaagagttcagataacccaagctggccatcgccttaaagctgtttgaagaatgaattaaaaaatggaatatatagtgacttgccctgaagaatggatacatgctttgtgtgaatgcaatggctttggtcctggcacctgcgaggccttggtgagggaatagtggatgagtagaaggtcagtgcgggacggggattagtggagatgctctttattatatgtggtagctattgcagatgcttttaatgttctggagaagtacagtttttgtcttcttttctctctgtcagctaagcctttactggagaagaagagaaactacttaagatacagctagaatcaaagagaaatctggacagttttctgcagaagccatcagtaactcagcattggcactttttaactgcaggacctatagtctgagctctcagcattgccaggttgtggacggatgtttgctagttgttctcttcctggcatttgggagctccgtggcattgcctctacgattcattccctgggtctttgaaaatggctgatggttgcttctaaagggaaactgtaaggattctctatccttctcacctgagagagttccacgttcttaatccaagtcctgaaaggaccctaaccttgacatgtccagatgcctagtaatcacattgcaaataaataaagattcagattaacctatgcagtactctagacacgtcaaagttctcctctttttaagacgtgggttagaaatgacgttttttgcagatcaggaagtggatttagagtatttgcatgcacaatgctcatttacatgtttctttaaaaaaaaaaaaatccctgagtgcaggatcctgcttcatgctcctatttcatggtaccatctgtatcttaaaggtgaacttgaagctcagtgcatctgctccaccagggatgctctctagtccagtccagaggcagccttttaaaatgggcttcataaattgatgctttccagggggcagttgctcaggagacctggatccttaggtgtgagatagagatggtcaggatcttcattctttaggccctgagagatagggaagagatggaagtgacccctgctagtgaaggaatacatcgtagaggagcacatgttcaagaggaatgtcagatttaaaaggccaagcaagttttacctcttacagcagcaagggattagaattcacacaagctatcttgctcctgtgtgggcaccagtctttgttgacaatgaagatgcagtaggtttgggggactgttgttgttattgttgttgttattcactattcatgtagtgtgttctgtggagaacatgtgatagtgggttagaaatgatggttttgcagatcagaaagtggatttagagtattgggctaatactctatattgggctaatactcagggctgttggcattacagtaacaaaatggatgcttgcctgaagctgactatctagccgaggaaaacgatagcacccaccaataccatgccatctcatttcaaagcaaccaagagctgtggataagggaagaggctgcaccttgttttcatttagagacaaggcttcccctttgtggtccaggctggctttgaactctgcatccccctacctctacctctcacaagctaagatgacagtgtgtgccaccgtgtcaccctttactgacttttacagaggctaaagacggtgggtatactctgagccagagactaaatgaagaattatgtgaaggggcaagaatgttccaggcataggacaaaacaagggtggacagaggccctgaggtggaagtgcatgcaggaagcagaggggcaaggtggtgattcctggaaggggaggttggtagaggagaaagatgagatgagagaggtagccaggagtcaggtcatactgactgcatcatctactgcttgcaggcttgggacttttactctgagagtgatagggaactattatacacttggatttcattttaaccacttttaaggcaagaatgattttggtagcctggtatagtataaggccaatttcacaaaaaaaaaaaaaaaattgtgtgtgtgtgtgtgtgtgtgtgtgtgtgtgtgtgtattagactgcatgcacatgtgcatatttgaatgtagaattgagtattggatatcttctttagttactctctacctcatttgttttgagagagtctctcactgaacctagagctcactggttttgcaaggctgcctggccagtgagattcaggtatcctgacttcacccacccagctctgagactatagctgtgtgccacaatgcttggattttcacctgggtcctgggattccagactcaggtcttcatgcttttatggaaagtactttacctactcagaataaggttttcaaatttgtaaaacaaaattcaaatgctcaaaacagaatctaccacagaatgtcaaggaagccaatttggatggatttatactacctcaaggtccccagaaagggacacattctgtgatttgaattttcaaagtttctgtgactcctgtaagaagaataaagtgtaagggcccagagtggaagccatccagtgtcatagggctgaaggatcagcttccctttaacttccaggacctggcctcagaagctggtcttttcaagtgcaagaggaaaaaagtataacttctgtttatgtttaatttacaatctttttgaatgcaagaagaataatgtatggctttatttatatttaatttgccctcattctttttaattgatctattgaataaaggctttacgatatgctagcatagtagcacttcagtacatttatataattcgtgaataaatctacatatgtttggggtctgtggccagaaagcatttatgatggtgttgtttgatcgatcacatctgtgggttgcagtttagggagagtgaccctgtgagaagcagggagaacgccatgctggcttagagcatgctccatttcagatccattttgtggaagtgcacgaattcttgctgtaattcaacctcgataaatgtcagttgtgtttctcaggcacccttacctctccttaagagccctcatccaactgtaaatcacctctgaggtggcatgttcccccctagggaagcaagtttcttgaggtgattgccaggcaggcaaagtggttcttgatattcaacgtgaaacctgggggttctgaagagcgctctccttcccgcacggcaagctgggcgcatagctgggcacagagccacctctgtgaagggaacacctatatctactatgtgatccactggggactccaggcctcatgctttttgtgtcccttgtctcaaatgcccttctcctggacatttttgctcactcttggggcagagcaagctgaatggtatagccattctaggtgccacacacctgccgtgtgcatcacttttatatcttggagcagtgtctggtatagacaaggcggcggggtgaaagaggtcaggtgggaagaagaactgagtaacagcttaacctgttccacttacaactgagcatccccccttttcctattgttcatccttcctttctcctctctctatcctcctcgtcaccattgtatgcctctcccctctcttccttccactcccacccctctttctccttccctatctcctcctctgtcccccctctccgcaccccctacacctactttcttccctgacttcagttcctatctacctttccttccttttttccttctatcacattaaattttattttctcttccaaacggggaaatccctttataaagaaagaacattaaagcttttattgagtgagcaaattttcccgcaggtaggctcgtaggaacttgtgccttgttggtatcatcagtgtgtctacacctcatggggagatggggtctatgaagacatagtctgggccgtgatggaaatgctaacaataattctacaaacccatctcacaagtacagacgcacgtaagcatctgggcaccgaatgtggaagtactgtggcctaagtaccctgctcctgaatgaggaggcatagtcccaactccatagatctgctctgctgacctctgaactctatgtggtccaacacagatcctttgaacacactttgaactgaggacatccagtgttaagtgccacctgctcctgtccttcctggaccctccacagcatgattactctgctggatcagccagcgccagtgtgaggttgacctggagcaaaggatattggcttattgctatgtgattttatggtgttccctcagttcttggttgtgatttgaccatgtttggaccctggtactatgaacctccagtctttagacagtgttgttattgttattgttgctgttgttgttgtttgaatgtctttgtgactggaaggcattttgaatttctgatcatttaggggccatagttatttttgtatcagatctccatgtgaaagaacaaagccatgtgagtgattcgtggcattaagtaccatgcccactaggctttcagatcgggcactggatgtcttgcttttcctgtggtgtccctctcattctgaacattcctgaagagcaccctggtcttttctctacccacatactaaagagctattaaaacttgaactgtctccctgtttccccatatttaagctgactacattgactccagccttggctgtttggagctgtgagctctcgtttttttacttgacatctgattaggcctttccctgctagcagctcatgcaaacacaggaagcaggggtgagggagaggaactgaggttcattgtctattcagtaggtacccgttggatgcaccatagcttatttcaaagtcacaggtttactaataagttcactcccattggacagtaaaagtacagcataatgaattcaaacaaagtcactcccaagttgaggggacacctcctctctttccttcatctggtacatcctttcaagtgtcttacagcaaggtgctagcttttaggtgaccctagtactgcttggtgttacacacatgcatgcacacatggtttccaaaaaatgaatatttccttccaggctctcagcacgttatgtattcttggttctctctgaaagaaattcatgtctcccctctgctgtactgggtcttgtagagcagtgggctcactggggcaccaatttagtgaagtaataattttcaagcatgttagatttgattctaggtgatagaaacagagagctgtggatgttttgtagtcaagtttaaagggaagaaaatgtgggaagaaaaaataagcaaaacacagtacctgggtactgtgttcttaaaggttgtgtggtggagatgtagctgctgatcagggaaaaatgggtacatacatagtactttggatgtgtagtctctgtagcctgaaattgtgtgtttgtgtgtgggggagggggaggaagagggagagagagggaggtatgtgtgtatacacatacatatatatgtatgtgttcttgtagctgtgtcaatgggtgcatgcaggtgcatatgcaaatatgtgttcacgagtgtgaaagccggaagtcaacatcaggtgtcttcctcaattgctctcccctttggattttgagatagaatctctcacctaacctggagcttaccagcttggctaagcacagtggctggctggctcatgaacaccaggaacctgcttgtctcacctctctagtggcagcattacaggtgtgcacggctgtacccagctcttgtacgtggctgctggagatggatattcatgtgcccatgcttatgcatcaggcacttcagtgagccatctctccagacctcaaattacatacgctataatatttactgattctatgagtctcccatgtgctagctactgtttctaattaatgtgcagtttattgccacattgttgctctttctaaacattttaggggcatgtgcacactcttgttatccccgagaaaacaggagcaaagaaagcttttgttaacttacccaaggttagacagtcacccaagattaaccagccttgcctgtagtaccccaggaaggttggcttttggaccctaaaccattttgctcatctgccttttgggggcaggggctgcacttgatgatttcatgggtctgtaaacatcgccattctacttaattaggatcagctcactatacagttggaaggataaatatttgtcctgtttggtgacagatgtgatgggtttaaaaaaaaaaaataacaagtcctgcactttttcgtacgtatcctccatctgtatttattctgtggaaaggtcacttgcacaccagtgctcggattccgtatctctcagcagcttccctgccgctaaaacttgctctataaattgacttctaaaatatcttgcaatgatgtatattactatccagcatgaaccctctagaagagccactgaatcattggaacctctgggcagtttctccatgaatgctgcgagtcaggaagggatttagtcttactccctctcggttggtcgtggtcctgttgtctgtccacccaggcacatttgctgaaagggacacgggttccaggaggctgaggcgtttgtatcagcacttaggtctctggccatggtttgtggtagaagagggggtcagggagagacaaaagagactgaaatggtaagttactggaggttcttgagaaaaatagaattagaagcatttgtggttcagatgaaaatagcaatttcctttctgcttggaccgtggggcttggagtgctcctgggaatagaaaataaataaaaattgatccctcaccagttgaaggaagtgccctgactctgggaaccgagatgatggctcagaggtttgaaggttaaaaaaggaaagagacaaaaggaacacacagcaccagggggctttatttattattattattattattattattattattattattttaaaagtaatgttctatattagagaatgtagtctaccaagaatgatctgagaggccatctgctgagactagccaccaggcagcagaacgcagcgggcatgagatcctttctgaccattgtccttctgtgtcttctgcaggtgagaagccttacaagtgctcatgggaaggatgcgagtggcgttttgcacggagcgatgagctcacaaggcactacaggaaacacacaggtgcaaagccctttaagtgtaaccactgcgacaggtaaggtgacttagaagctacgggactaaggagggaaatagtgcagtaggttggggtctgtatgtatgatctgggtctagtagcaagcaggcctgtctcgtgcacagctctatgggcctggcaatacattttacttctctactgcttgcaagggtgaaaagatgcactctcttatgtagtaaagtttcagggtctccattgggttacatagcatttactcagtgctggctttgaaccagtgctagtaactaggtacaaacaagatgtcattcctcacacaggtagttgatgaggcagagaattaacagcgtattgacaaaagataatagaagttgcctcctctggccttttcaatatcatccataccacctttgttcatcttttatgtttaaaaaaaaaaaagtttggttaatgggagaaaggccgattttgaaggctttttccaaagcattattgaaaatgggcctatcctttggacatctggactgttccttcctcgctgaagacatgctcaagggtccaaagatggcaaaactctgcaaactcgtcctgtaattcaatttcaaaccttcagtatttgatagtcaaaaggatcccgtagcaacagatagtacccaagtaatagtatctgacagccctggcattatcagccgataaaccccaaaatggagactctgcaggccaaggtgaaggcaggattaggtttagacataatcaaataatgggcttgcatctgagcatgttatccttctaatcctatttctgtgtttaaaaggaagcttaagaaaattaaccatctttttaatgcaatactaaaggtcttggttatgatgagaaaaatgcttctaatacaataaagcccccgaaagcctcagggtcccctcggcttggacagcagctagcaggatggcgggggaggtgggcgaagggggaagggggggaagcaggatgtccaggaggaggccaggctgtcctcggaaggaaatgagctcggcctcacttcctgcctctcccaggccctgtgctccacacctgcctctcccaccagccaggccttcctcttgagagtttgctttcttggagtgtagtaggaggatgctcaaatccaggctcagccaagttggcctggtgttcttttgggatgcagataaaggacagtcttggctttccttcccccagtcttcctgaggaggctatttttcttttatcttcatcctctgagaactaaataaagaggctttggctcctggagtgcagagataacctctcccccaggctggaggaagtgtgcctctctcggctattgtcttcttctgcctgaagagcagcttctgctacccaggaacatagcccttgtcccatggtcatcccattccctagaaggcctctggaatgtgcaaaggacagcagcttttcttcctcggcgtgtcccagtcagtgtttctgtttgacaatctcttcagcttccatctcccatgtccctgggttcagtcattcccagccttggctaataaagaaacctataggttgttgactgctcacagacctgtgcagaagatgtgtccactgtatcacccgggatgaagatgagatccctgtgagttgtcacagcgtggtggttggaggtacctccataaggcacccatctctgaagggtgttgaggctcagggattgtggcattatgtgttttggagagtgaggactgactaagaaattgccatttcaacacactgaggaattcctaacgttatgcagccaatatactagcagtctcccactcatgtgggtgatgtggaaaaatattccaagcctgtttggtgtgagagaaatagcagcaatgggtcatcggttagtcatttgctttgccttcctcaccagaacacactgcggtctctggagatggcatctgctgtactggtggtacagattctgtgaagtgacaccgcgggagattctgagtccaccagagtcccatgccctgcgtcaggagtccattttcaacgtcaggaatgagggctgcaactcactagtgtcttatgacaggcagtccctctcattttactgctcagggagctaagaatagacaggtctgggaactgtcgtgaggccccaaagcagatgaaaggaaggcctggagagatggggagctgccattccttaggtgacttagacctttggaaattgaggctatctgcacctgggagcaggaacctggtccccgttggcttctcttggcgtaaatgcagggggccgggcctcagctctctctctttctcggtttactcttctttttcttaaacatacaccgtgtataatttatgcttttcacgtgtgcaagttttaaaaacacatgaactaattatatttgttttctttgttcataagattattaaatgtcccatacaagtctgtgtttgtagttctatctagaacgattgcatctgaccactgtaggcttacatttccagatggctgtcatagactggagctgaatggctgtcatgtattgtaatgattgctttttctcctatccccatcactccctattgcccattcaacatgagagcaagttgtctagtactctgctttctgtattatttcctcttatagagagtaccatttctccatacttggtgccttaccacaaatgtaaagaaacaatctggggggaggggtgttacgtgtttgttatacttggccccattgcattgcatgctttccctgactggcctctgaagacactcaggcttcaggttcaggctggagggaaacccagtgaggtgatttacagaggatcctcaccatcgtatcgctgccatggccagacagaacctactgtagcttactaagtgatgccgtgccagagggacaggtctttcacagcccagagagcatgaggctactgatggtagttcactggcctgtacttcttccccagggaacactcagaaaagccttctcctaagtaggctgttaggatccaggtggggctgttactcaggtagtcagacaaggccttggatagttgagtgggggtgttttagtacgacagtacacctttaggtgatgaaagtattagcctctgagtcccctagaggattgcagttggtttactaacacatttgacttcaaagggtcctgaccataagcgagagaacaccgactagtcctctgtaacgtagcagtcacaatcagtaaggaccgtgtcgtgtgaggtcagtaggcttttgagtctttatgagtacttcctggggtacggtaccctttaaagtgattggattctgtacttctagacgcgcagcttatctatagtctttcctgtttctatgccgagctcagtaaatataaattgataaatataaattaatcccacccaagtacctgacctggtctgttgaatttgagtggtggggaatctgttgtaggtcttaatggtggggatctgttgtaggtctgagtatcaaacatttcctggaatttgagcaaatgaagatgcccgtttggggtcggttggcacacagcgtgtatttcataccatgctaaaggacttggctgttttcctgaaaagcattacaggataagggcagatagttgggcatatatggctagatgacctgtcacagtagagcagaggaaaagctgaacacgtgtgactgggtgaataatgttacatgttcccagcacctaagaagcaaagtaaagggtttaaccctctgccagggcctctccttatcacacctgttcaaatccccagttaccctggacacgggattccaagggcctgttctcttcatttctctcggatcctaaccccacctgaccactgccatagcaaccaggcgccttgtgctaatttacattacaaaatcgttctcttgacagtctaataactttcaattcaacataagtccctctcccaaggctatgtcagtagcctgtctgttctagaggtttgagggtctggagttgatttattgcctttttccgggatctagggtagtgggtctcaaccttcctagtgctgcaaccctttaatacagtttctcacgctgtgatgacccccaagcgtaaaattattttcgtcctactttatagttttttttggtatagttatgaatcctaatgtaaaatctgtgtatactgatggctataggtgacccctgagaaagggttgcagcccacaggttgagaactgctgggccggaggctgcccacgttcactgctggagactcccggtcctccgccataccagctgctctggctctttcacccgcctctggcatttttaaggattctactttgatgatggagggttggagtttccagaaatggtgtgggcagcctctagatgctagaaaaggcaaaaaaaaaaagggggggggatggagggaagggaagagagcaagacagtgagtcccatgacagtacagaattgtgcaagttcaaagctgaatatcccgaagactgtttagctatatcactgttttataataccttgaatctgtttcagttgtttcatagggacagtccagataacaagttcactctaaattaagggcctaaaataagctgctgggactggcactgttattcgggggatcttgtagtagattgttatgctgtaagtttcctgttctgtaagttttctgttgtctttgtcttttttttttcctctcctctcctctcctctcctctcctctcctctcctctcctctcctctcctctcctctcctctcctctcctcccctctcctctctttttttcttttcttttcttttcttgttgtttgttttgtttttcgagacagggtttctctgtgtagtcctggctgtcctggaactcactctgtagaccaggctggcctcaaactcagaaatctgcctgcccctgcctcccaagtgcggggattaaaggcgtacgccaccactggcccagccttgtctttttttcttatcatctcctgggatactgttgtacacatgtacctatttaaggaatgggcataaacagagggtgtggagagtatggggtcagggaacagggtggatttgtgatttgtttgtttaagaatgagcaaacacagggaagccttgctttggacaggaaactctgcaagcctgaatgggtagcttgctaatgtcctagcaaggaatttgagtggtggagctatctcaagctacagcgatgcctaggaatgttgtcatagtccaggcaagggctagcttaaggagagagcacacagccagaccatgcatggctgttgctttacatgcatcacagcaggtccttccgccagaccctgatattgcaaactgttagagcacggaaatgcccacactgttattggtaagatgcagaaacctgccttagactgatgtcagtgtaaacggctacttattaacaagcttagattattagctcgaataactattagaaatggaattcagtttgtctttaaggttggctaaatccaagttcccagataccatccagattcttttctctgctcacttccttctccagcggcagtatgggcacactagcagctcaaagctcatctcctagcaatttagcattcccagtggaaggagcatgtctctcttccagtaatttcagtagctatagaaccacctttcctttggcctctgtgtgtcatgtgactgttgcttagcaatcactgccgccatggctttcactttagaaggaaggtcagctttatactagtgagaacataaaagggtttctacccaagagactctcatatgtctaccatcagagtaaagaggaaggaagatgaccatagcatctgccaaggaaggtgctcgattatggaacttaagccccaagtgttagtccaagagcctcagccccagtctttattccatgactctccacctatgtatcctccccttagttctttaacacatactgaatcagacagacagacagacagatgcacacacacacactgactgactcatcatggagatgtccccaggatagtgttggggctatctgtgaacaccactctgttctttgtcttggtgtgaatatattatgcctgtgtggacctggaattacaggcaatacactcctaggctttcatggtaaagcccgagacagcaaagtgggtgttgaaacatcagtgttctactaactggtgacataggccagttattcattattgtatatacagtgcatgagcatgtcatgtgtttagagagcacttccacattttgttccttcttagataagtatagttataatcataacagtccccgtgtagtgacatcttactctgtgcgatgtgatattatgatacttctcttgcctaatccttaaataaacgtaagagacagtgtccccatcagccacgctgctactggaagagctagggtctgaattaaagcagtctgacccgagctgactcctccagcacacttcctcgtctctccataactcacaagtgctgtctctctttaaaactgagaaaagtagctggacctctctgacatgcttgttgtttgtcgttctaggtgtttctccaggtctgaccatcttgcgctccatatgaagagacatatctaaacaaaacaaaacaagacaaaataaaaacaaacaaaagtaaaaaaaaaaaaaacaacaagaacaaaacaccgcaaaggccagagttgccatggcagcagccaatgtccgaaggaaatgcagtgaggcagagggctggacttcaggcggggagaactgcctcgcagaagaaagttctcgcttacaaacctctgtgtgcatacatgtacacgcacacgtacacacaccctctcacacacagacccacacacagatccactgtcatgcactcaactatatttaaagtatatacgtctatttcttatgccttgccctagccagatgatagaagacaaggaagaaggaagccaggtgaactcggcaaggcactggctgctgaccccagcgctactggatcacttcccaatgttgccaatggaaaacaaagcaaacggatgtctgtctccatggtggccgcagtccaagaggcttacataacttctcagtgcaacgtgataagagaatccaacatcttatggttgcatatgtgtagcactaatgtttctttttaaatagttgggggagattgacctagaaaaccaaattgcagtttggtagccaaacttaactcctgggttatttgtcctttgtgtgtgaaaagtcctactattccgtacgtcagacttcctcacagaactgtcggttggttttggttcttcttaggaccagtgagatcttttgaattgctaccaacggccttagcggcagcagactgtggatttacaccttacacctttctggcctgcatctctctagactttactctcgagggaggagttttcttttcttactttttttgactctcgcacatcatatgcactagggattctgaaaacttctagcatgactgcaaagtggccaagagaataaaagtccttgatgataaatcacagtataccccttgagcctcaccttcttgccagtgctagattttttctttttaaatctctctgattttttgctaatgaaaacttgaaaaaaaaaaaaaagcttatttggaagcttaaatgttttatcttttctccgtggactaaacctctccaggactctctcggcacctggatgtctagctctcgaagcagccaatcagatgggacatcagagttctctcatccctccttaaggcgtgatgacctcagctcacagtgagcggctactctactgtccttgctaccctataactacttacagcatagatctcgctagtctcaaagggcagctgcgtatttaatctaactctgggttatgacctgacaaaaaagccaaaaatctcactctttccaggagtgggggagtccgcggatgcctcccaaatctagaggcttcacaaaacatcatcccatcccttccctcactcaccctctgagatcatggtacccacttgttaaatgcatacttcaaaatgccattgtgggaatgaaggttgtccattaaggaaagggtgaatgtgtcactcttatgatgtctctacgggtgttggtgggggggcgctttctttagggggtactggttctttttggctagacccaccatggcttgtgacctagagcacccaagatcaacagaggcctcatatttaccctgaaagctgattccaagggatttatattgctcacttgcatatcacacacacacatccaatgttggtttctatcttcccgaattcttagctagctggcactggcctaaactccaaagactgcctttaggaccattaactggcctatgcaagcaagcggggtgggtattaaggcagattgtatattttgtatattctgggaccatcccttcaagacgcgtctaacaaacaaaagtggcgtttggtccgtacaaggttgctgcaccctcataccagctggctccctcctgccctcctctgactgttttatccactgactgttaaaatgccgcccatacatatttgggatgcaaaactgaagtcttttaaaagaaataataataataatataagcaacacaaacacatatgacagcaaccttcaagatccttggcacttgggttctcagctttctacggctttggttttactgaaatgttgaatctacttgtctgagggtaaagggaccgctttgtcacaaatgctatagcttccagttggacagttggggcatttcgaggtctagcctttagaaatttcatttttgttttactttttttttccaatttagaccaaaaagaaaaaaagaaaagaaaccattgtaaacacacacgtgtgtgcacgggcgcatacacacacacacacacacacacacacacacacactcacacacatactccatttgccagaagcaattatgtatatgttagttggagggtattaaagaaaaaagaaatctgatttattccaaagatt

SEQ ID NO: 132 - DNA, 3739 bp, Mus Musculus
gcgaacagcgctgcagatatagatggcagcttcgtgtcagtgagtttgcgttccccttcctgatccacgcgctggagtgattagagccctggaagggaattgttactcccgtgaagtccccttttcctggcagtcatctgcactgtacacgctggatccctctctccgatccaccccactcactcgctcctctctcacctcctctctcacctcctctctctccctcctctctcacctcctctctccctctctcctgcattgattttttttctctcctttttttagttgactgaaacaaaacaaaacaaaagggccactggatgtctgccttcttggggggtgagccagacagactgacaaacaaacagacccagctgagctcgggggagggtttctcctccggttttgcccggcagcagcagcatggacgtgttggctagttatagtatattccaggagctacaacttgtccacgacaccggctacttctcagctttgccatccctggaggagacctggcagcagacatgccttgagttggaacgctacctccagacagaaccccggcggatctcggagacctttggtgaggacttggactgcttcctccacgcttctcctcccccatgcattgaggagagcttccggcgcctagaccccttgctgctcccagtggaagccaccatctgcgagaagagctccgcagtggacattttgctctctcgggacaagttgctatctgagacctgcctcagcctccagccaaccagctcttctctagacagctacacagccgtcaaccaggcccagctcaacgcagtgacctcattaacgccgccctcatcccctgagctcagccgccatctggtcaaaacctcacagactctctcagccgtggatggcacagtgacgttgaaactggtggccaagaaggcttccctcagctcggtgaaggtgggaggggtggcggcggcggcagccgtgacaccagctggagcagttaagagtggacagagcgacagtgagcaaggagggggaggggctgacacatgccctgaaaacaagaagagggtccatcgctgtcagtttaacgggtgccggaaagtttatacaaaaagctcccacttaaaggcccaccagaggactcacacaggtgagaagccttacaagtgctcatgggaaggatgcgagtggcgttttgcacggagcgatgagctcacaaggcactacaggaaacacacaggtgcaaagccctttaagtgtaaccactgcgacaggtgtttctccaggtctgaccatcttgcgctccatatgaagagacatatctaaacaaaacaaaacaagacaaaataaaaacaaacaaaagtaaaaaaaaaaaaaacaacaagaacaaaacaccgcaaaggccagagttgccatggcagcagccaatgtccgaaggaaatgcagtgaggcagagggctggacttcaggcggggagaactgcctcgcagaagaaagttctcgcttacaaacctctgtgtgcatacatgtacacgcacacgtacacacaccctctcacacacagacccacacacagatccactgtcatgcactcaactatatttaaagtatatacgtctatttcttatgccttgccctagccagatgatagaagacaaggaagaaggaagccaggtgaactcggcaaggcactggctgctgaccccagcgctactggatcacttcccaatgttgccaatggaaaacaaagcaaacggatgtctgtctccatggtggccgcagtccaagaggcttacataacttctcagtgcaacgtgataagagaatccaacatcttatggttgcatatgtgtagcactaatgtttctttttaaatagttgggggagattgacctagaaaaccaaattgcagtttggtagccaaacttaactcctgggttatttgtcctttgtgtgtgaaaagtcctactattccgtacgtcagacttcctcacagaactgtcggttggttttggttcttcttaggaccagtgagatcttttgaattgctaccaacggccttagcggcagcagactgtggatttacaccttacacctttctggcctgcatctctctagactttactctcgagggaggagttttcttttcttactttttttgactctcgcacatcatatgcactagggattctgaaaacttctagcatgactgcaaagtggccaagagaataaaagtccttgatgataaatcacagtataccccttgagcctcaccttcttgccagtgctagattttttctttttaaatctctctgattttttgctaatgaaaacttgaaaaaaaaaaaaaagcttatttggaagcttaaatgttttatcttttctccgtggactaaacctctccaggactctctcggcacctggatgtctagctctcgaagcagccaatcagatgggacatcagagttctctcatccctccttaaggcgtgatgacctcagctcacagtgagcggctactctactgtccttgctaccctataactacttacagcatagatctcgctagtctcaaagggcagctgcgtatttaatctaactctgggttatgacctgacaaaaaagccaaaaatctcactctttccaggagtgggggagtccgcggatgcctcccaaatctagaggcttcacaaaacatcatcccatcccttccctcactcaccctctgagatcatggtacccacttgttaaatgcatacttcaaaatgccattgtgggaatgaaggttgtccattaaggaaagggtgaatgtgtcactcttatgatgtctctacgggtgttggtgggggggcgctttctttagggggtactggttctttttggctagacccaccatggcttgtgacctagagcacccaagatcaacagaggcctcatatttaccctgaaagctgattccaagggatttatattgctcacttgcatatcacacacacacatccaatgttggtttctatcttcccgaattcttagctagctggcactggcctaaactccaaagactgcctttaggaccattaactggcctatgcaagcaagcggggtgggtattaaggcagattgtatattttgtatattctgggaccatcccttcaagacgcgtctaacaaacaaaagtggcgtttggtccgtacaaggttgctgcaccctcataccagctggctccctcctgccctcctctgactgttttatccactgactgttaaaatgccgcccatacatatttgggatgcaaaactgaagtcttttaaaagaaataataataataatataagcaacacaaacacatatgacagcaaccttcaagatccttggcacttgggttctcagctttctacggctttggttttactgaaatgttgaatctacttgtctgagggtaaagggaccgctttgtcacaaatgctatagcttccagttggacagttggggcatttcgaggtctagcctttagaaatttcatttttgttttactttttttttccaatttagaccaaaaagaaaaaaagaaaagaaaccattgtaaacacacacgtgtgtgcacgggcgcatacacacacacacacacacacacacacacacacactcacacacatactccatttgccagaagcaattatgtatatgttagttggagggtattaaagaaaaaagaaatctgatttattccaaagatt

SEQ ID NO: 133 - protein, 301 aa, Mus Musculus
MDVLASYSIFQELQLVHDTGYFSALPSLEETWQQTCLELERYLQTEPRRISETFGEDLDCFLHASPPPCIEESFRRLDPLLLPVEATICEKSSAVDILLSRDKLLSETCLSLQPTSSSLDSYTAVNQAQLNAVTSLTPPSSPELSRHLVKTSQTLSAVDGTVTLKLVAKKASLSSVKVGGVAAAAAVTPAGAVKSGQSDSEQGGGGADTCPENKKRVHRCQFNGCRKVYTKSSHLKAHQRTHTGEKPYKCSWEGCEWRFARSDELTRHYRKHTGAKPFKCNHCDRCFSRSDHLALHMKRHI

SEQ ID NO: 134 - DNA, 87759 bp, Homo Sapiens
tcctcctcaggcgcttcttctctgcaccctggcagcccgtggggagttcgggaaggggccctggatgccttttctgcttgtttttgagtacgtgaggacctccccggcaccgcctcgcgcgggtccctgccccgtgcccaggcggaggcggggtggccactgtccttccttcccgctccgcgccctcggcggcttccccgcggccccctgcgccgcgccccctccaggaggcgtcctgaccccgcactccggcctttcacctcccgaccgtcagcctcagggccgccgcggcgacgcgcgaccccttccctctgaggggcgcgggctccggacgcgccgggctctgccaggcatctagtggagggtcggaggtcggcgaccagcccgagcccagccgtcccgggagctggcgcgagtgtcgccacgaccctccctgtcccttgcgctcgcgctgcccggccgccgggcggccgcctcagcccccttatatagccctctaaaaatagctcgcctcgcaccgccttgtaaggcagcagggagatccgcagcgtgccaatccgcgcccgccgccagggccaagccccgccccaggctctgctccgggctccccattggtcctcagtgacttcatgagccccctgtttaccttacatggtcacacgcggcctaatggacgccctcctcgagatcccacggctgcgcggagaaccgaacggagggagggagtttggggagggggaagagcaggaggaggagaaaagggagggggaagactacaaactagcaaggatggggtggggggtggggagggaagggaaggggggggaagagaagcgatcgcgagagaaaaaaatgcaacctcccaaaataaagagcaaagattgcattaggagcgaacagcgctgcagaaatagatggcagcttcgtgtcagtgagtttgcatcccccttcctgatccacgagctggagtgattagagccctggaagggaattgttactcccgtggagaagtccccttttcctggcagtcgtctgcactgtacacgctggatgcctctctccatccaccccactcactcgctcctctctcacctcctctctccctctcctgcattgatttttttttttcctttttagttgactgaaacaaaacaaaacaaaagggccactggatgtctgccttcttggggggtgagccagacagactgacaaacaaacagccccaactgtgttcgggggagggtttcgcctcccgttttgcccggcagcagcagcatggacgtgttggctagttatagtatattccaggagctacaacttgtccacgacaccggctacttctcagctttaccatccctggaggagacctggcagcaggtgaatgatttaaattacttgtgtaaatcgtgtggtggcggcggagacgcaggggctgcgttggtgtgggctctgggttgaaatttttgtttgtttgtttgacttttttttcttcctttttggctgtctgttgttgaaaatgttttctgaaacagtcatctgcgcttacctctccacccacccctaacctcgtagagtgccgagctgagcagccggtgcgagctgcctgcgtttcagtcgccaacacacatccctgcgcacacgttgtcgggtttgctgtcccctatcagagacctgccgaacttctggggttcggaggagccgggtgggaaggtggtttggggtgttaggagcgattgctgacagggaccacgttctcgcatgcatgagctctacccacttgatacctgaaatcaggttcatctgtttcaactggtgcttatgaccatcggatggggggcgggggagggtgggcaggagcaaagcggagtgtttttcagtaattagcgagtgtcaataaagaataggagcttgattttgagattagaaggtaggcaaaagagagaagagcccactgacaaaagatactcaaggaggacgggaagatgtagctgaggctgacaatgaattgtaggttttcccagtgtgatccctccagaaagagaacaccctctatgcgtgtccttgtttctcttttttgtttagggtccttctctagttaggcagcacaacctcggacaaaggctgatgtgtgcttccatgcctttgactttgtcttagaggactagttaagaaactcccaggatgctgaagggcaccgatgccaagttggctagccgtcccagggaggatgaagtggggctggtgacaagttcactgggctttgtgaagtggaataaagaaagtgctggtcagtggaaagtgctggctctgctgcggaaacagtggtttttttcagcagcgattaggagctgctgaggggacattctgcaggaaagatggtgggtgggggcggggggacacgggtatttaaaaattgtacagtgtgcaccatggaaagtccaagaagacagtccggatttgcacataggaagtgtgaacttgtacagtccgtcctggagaaacccgcttgcccttggggggagggctgtgagaggctcggtgtgtggctgctcgtgtaatttcttcgcttagtgacagcagcttgttaaggctaatgaacggctgaatttcctctgccgggatccaaagcaggatttgccagcttgaggctgagatgtaacagtctctgctttagcaaaagaggtttggcttttggtataaggagccgagtggcaaggcggatcctttaactgtaccattgttgctagttcacttctggtcagaggctgtgagttttcctccaggtattggcgtctggtgtctctgtgtccacacatgcattcttgtccaaggacgctagcagatgcttgactctgtctctctgtaaacacatacacagttcacatatttttagaataaagtctttcttcaatgcatccttttccttatccttaacgagagtgtgtctcatgaagggtctcactggatctttttcttccttttatttccaatgctaattaaaccaaaatcttctgaaatagccttcatttcacactgtcagcccactggtatggaatcggttgcatattaacaactgtctagacaggttagagaagggaatctgttgatttagtcagcctgcccaaggcagcccttgtttgtgactaactgttaagcagtgttagaaggaagaaagttggctttatttgttagaacgttccctactgatgaatcatgcaactttgttttggttcaagttttcagagtagtaaagccagatttggaggaaggtctcttcacaggaaacctgcttttctagatctggctagaccatccaggacaaactctagatctgcaaagaaacatcatcggtttgacaactagaggatgtattagatctattgtttcctaagaagccatctctgctcttccttctcccctcctccccctgctcctctgcctcctccccattcagggaagctctagtttagtttctacaggcaaaggatttttcacccctcggaaccccctcattttttgccttaaccctctccaactgccagccactctcaccttaaaacccttagccaacttattcagcgtcatgcttatagccaatgctgatgcatagcttgtggggaagcactaataaacaatatatcactccagtgagctttatgttctggactccgtaatcacaactgctctatataaaggcgactaggaccataggtttacactgatgacaaaacctttaacctctagcccttccttcttccccctcccaaaaccgtcttgctgcttctgagtataaggggtggtgatggtgatatgcaactgttagttccaaatcaactatcggataatgaaattttgagactcttttgctcaaaacagctcaacagggtttctgcaaagaaccccagacaggaagaagtttctttatgctctggggtaatcagattttagaggtcaaatgaggagtaattattagatgttcttcttaaagtgaacaatgtacctgggctcatggagatgagcaaaatgtggagactctgataatctgacttggtttctagagaaagagtggcttcgatgataaactcaagaacatttttacgtttgaaaattgaagataaacaatttggggattttattttaaacttaggatatgggataattgtcctgcttaatagtcagtgagcctgtgacaaagtcactgactgtggcagggctccctctcgtcacggagatcctcgttttgacattggattttctggcaatgatgccttagccacatagctccaagtctgaaaataatcgttgctggtataattctgaaatccaaatggacatcacacattaacagctctccattcctgggctctgactgcatacttaagcactcggcccaagtaacatcatctttctgcctgtcatataactgtaaattacactgtgcttatgtggtctattattttatagaattcagctgacgcgcaattcttaagactaccagccttaagcgctttgaaaacttgtaggaaaatttccaagagctgtctgagcaaaagtaggaaaaggtcaagggtaggacagaaaccagagtttcttatggggtaccacttgattatgagtaaagggaaactcattcatgactttttttgccaatagaaatcataatctttttttttagacacactgctgacttggaaaataaaaagaatttgatacaatgcttttattttcttcttgaatatacaaagacttttagaacttttatatgttttatctctagtctgctatttcatgagtgcaggtcaagcagtgatgatctaagtcttatttggacttagctttgcgtcgtgtcattgaggagcatcgcatgtttgcttgaaaagtcttatggaattatgtttgttgttaatgctgattcataattggcagatggggtcagtttcaggcctctctttgctcagagaaaattttccactgctactggaaacaaataaataaatcatagaacattcttctctcctcccccattcccctattgttttaaactaatggcatacttggctactgtaaggactaaagtgtccccataacactgcaatttcatcttggtttcaggcaccctgaaacactttttatgagggcctttggtataaggaatctctaggggaaaacgtacagaaatggttgcattccaagaacagcctcatggtaccagggatgggatttggtctgtgagccacattgcttctccttttatgtgaagatcttgcctttgcacttccttctgcaggcctgggccgccaggtgctatatcagccaggaaaacaaagcaaactgtagggtctgtccatccgtaggtttgcctcagtccccaattcgcagatagccttgtcatgaattagaatttcttggcaacagcaccacccagggaaatttgtagacacaaaggagccttgctagccacactgaaaggataaaataactgtttttttttggtatgtgatttgtgtgttcttcagttactgtaaatctgtttctttatttgaaacagcaacttggtagatgaaataaaaatataactgcccgttacccagaatttatctttatgaagatgcaatcactaaatagatgtaactctacaaatgaaagcacatgtgactgcaatcaatcacacacttagcctttaatagattcatttccatgttcctttaacagacacatctttgtgtagatttaggggcttcaaacattatcattcagtctacctgtttgcagtttggtattttaaagtgggcaaacattataatgcagttattttttactacatctgtccttagtagggggaaaaggaggtcactattctttgttctccatgaacttcccacccccactccttaccctgaggagaatgggatgttggggtcccatccatttaaaaggcagagcagaagatgcaagatgacagccttgccctgaaatgatttatgtatgggtgtgtcagagaccttaagcatccaaatgtgggctgcttctttctgccagcccattctaaacataaatgccagtgggggctaatttgcctctctacttaaatggagatagttcagagagggtcctaatggggcctttaatagccattcttttatgaatcttcacattgtactctcttcagagaattcttgcgttttaacttttggagtacaagaagacattgcaatcttctttaattgctctctgtgcctgttgaggaaagaagaatacaatttcctctggccagtcccatctggctcaagttgataggatagctggtctgattccagacggggtcggtggataccccttatcttttcattttatagtattgtgcaatgggcttttaattatctttgctggaccccacgactggcaaatgcagaaaatcgctctgtgattccagttcactcgatatatcagttagcctatgtgttagaactgcgatttgctgaaagtttaggacagctccccaacttaacttgaatggtgccagagggtgaggggcagagatttcctctgtccagtagtccctttgttctcccaaatcaactgactgcttgcttagcataaacgattgggggtaggggggcggaatgttttaaccccaaaatgccgaatcttaccaagtacagtgattagaaaactcaactactaatggtgttaaagttggtgaaacaaattatagtgtctaattattcatgttacatgtaacattgacaagttaaaaaacactcctctctgtatactcattgtagaatatacatatccttattctatctaaaattccccaaataaacaaaatgttgccattactgggacatgcttttacctaagattgtttgtgattttgctgtgccccaccttgcccagattagttcctgctaattggcagaattatttctaccaccctacatccctttagttttccttctcggggtatttggtgtgaccctaagaacttggtcccgtttaaacgactcatgtccatcccccctccattcgagcagtaccacatgcttgatatataaatgttacagctgagcgtttgcagtagccttgagatctgagtctagtatcagcccaaatgaggtgcgagtgacttctgatttcagggggataccattcttcattgagctggtagatggacctagtcacactttgtgggatttttgttgtttatattcaagtatagaaaatattccacagtaaatacttcattccttaagccctttttatgtgcataatactgtatttgggcaatgcaaaattgaattggatatagaatctgccctctaggagcttgactgtagtaaggcagagaaagcatgttcaaaattaagttaaacagaatagagcatgagtgccagaaagaaggaaagaaagaaagaaacattcagttctgtgttggaacactgacctgtgcctatctgtattacccacatagttccaaccttgtttataaaacatgcttgagatttactaagttctgttgtgaaaaagctttcagccaatgtcatgttgtgggctggatacttttagggcagatgagtatacaatgtgaatacacatatccataatggccaggaaacagtgcccatgtctgtgccattcggaaatgattagaggtaattaaaataacgtagagccatatgcgatatctatttttgaatgtgggtgtattgacatttcctgagggtcattttgaaagtcaggttctcagccttgtaccaaagcgaggaacatagaatctcagaatttcaaatcttgaaagggtcttggtttcctcaactctaaaatactgggttgaactaagtgattgttaaagccagatgaggcattgcactctccaaggtcacacagcttattaacactgatggtttcagggcccaggactctcagatgcccagaccagtttacttgctttctgtcacctgaatataccttgactcacttctgattcttttctctttcttttttgccttcaaaggaggcaagaaaattccctttttacttttaagactactggttcatggaattttgggattggctaggttctagaacaagttatcgaatattttggagaaggcttacttgtgtaatttgattctttttccacttttaatgtgtgctaaattggaaaatatacactgtaccgaaaaaatagccccagattataactcgagtcttataaaaattattgtcatttaaataataacaaatggagtgggagtatgaagggtgtgcagtggggcatatgtggtagggggttggatggaatatagaactagatggaagtagaaagcaacaaacgtgaaattgctttgtttctggcacctcaccaacaaagagagtgcccgaaactttaccagcaacccatgtaccagttgatgaaaatctttttaaatgtttttaaattcttgagagggttgtaataagcagtagtgaagaaactcaacctctgagaggtttttcaaaaagtcttttgaggtctgatggatgaagtaggcctaatttttaccattgtccctaatgaggaaaggaaaatggaaggctcacttgacttttttgccccagtttttccccagttactttttgcccttccctacctccttgaattggtagttatgatggtgaaagttctctcccagaatgtgtctcacagatctctttcacctctaacatcttagaggttaaaatctccttcccagttcagggcttcttcatctcctcacagctatactctacatctccacctccagatatttccctgggtttcaggccctcatttttttctaaccagaaataagcaacaagcaagatgggctttggggttgttctaccatcacttcagctgaatatgtcctaaacccctaactcatcaacttcttccacggactgcttcctttttcctggcttccctatttcttttaataatgtgattattcgtctcatgatctaggtttgacattctagtcattgtaactcctttctttttcttgaatctaataaaaaattaggtgaaaagatctaattagcggaagtctaaaattagttgaaaaatcccactgacttggcttctgaggtgctttagcatcagcctgtcatggatggcacccttggccattgccttgccacaatccctgtcacctccctggacttgcctttttgccaccatcaccccaggtggcctgctttcaaactgttcatggctccctcttatacatagcatgaggccaaacttccaagagtcagggtgttccaagactgggtctacacaatatttgcaagttccccccttttcacatgtagtaaatgccatccaaattaagtgactatgcttttcctgcttctgtctttatttttgttgtttcctttagccttttcctcttcctccctctccccttcctgattttctttgtccaagttccacccattccttaactttcaaatgggtgccaaactccctcccttgctaccagccaactgtaactgctatgatttccatactcttgtgcagagctttttacttccccgtgatgctttacagttttgagttataataaagcttttctttttttttttttttttttttacttttctgttgtgtcatttttcttgttaagtttatgctttaaggagttgatgccttgcgtatagttttggtagtcaacttttaatgtatcacctgcttcttagaaagctttgcacactgtgggcactcgatagttatttgaggagcatgttatgactatgacttaagatttgactatgcctttttcagtggttctcaatcgtggctgcaccccagaccaataaaatcagtatctctttgggaaggacccgggcatcagtgtttgtaaagctttcaggcaattccagtatgcagccaaggcattgagccattggtgtatagagggtttaatgatatgtcagagttggggttacctgcttcttatattgaaatatttaatgacttgtgtaatttggaatccacacggaccagaggtttatagtaaaacaggatcatgctggtggatgtgcttcatctggcacttttgttaatagcagctgcccaagtgttgtttcatccttcttgctttgctttccctcaccctaaagtgtctaaggcagtctgtttggctcacatttcctgtgacccatcaggaatttgcttaacctggtcaaattccatatttggaaactttgtggtgttgggctttaaactccagccttgctgggtttcaaacaattcattctcagtaggcccttggccatgattttccactcacctcagcctgctccatggtttgaaagggctggatgcatgcatgtacatctgttggatgatgctggagaggcattaggtagcagctctccattttcttactgaccaaccacagtgtttggaagtagactctgtttataaagaatttcagaggatccatctttctagtaagaggagcaaaaataaactgtggaagaattgctgctgaggacattccggcaaggaggctgccttcacacccatagaaggcttagctcctgtggtaatgactgtgggcgtgtggtgatcttcacaaagaagccttagaaacgcctctttttcaaactgtgatgtttgcaaaattgtatgtcctgtagctacatcctttcatctgtaaactgtctttgatgggggtatggttggcaagagagaacatcaggagaggagctcagagctcagggttgaaggatgccttttggaaagctcaacccagctgtgaaaacggcaattagccgtggagcaattgccctgcaagggagtgcccacctgctcttgacgccgttctcacattcaccttccagagccgagttagcaggaattcaatggagtggtcataacattggtgcttatttttggagaggcggcaaatttgctcagcatacaaaggagtggaaatagattctttccaccccaacaccccctgccttttgagcttttagcctttgttcatatgggcactacagaccatgttagtgaagtgcagcttctgactatggtgttgaaggatgtcttctgtgaggccctatgcagaactgattcccctgagagtgatgagatgctgcttaaggtcagacctgagtcgacttcatttcttccaagattgttcagccctaatttgtacattctcctccccttctcaaggttcttgcttttctttaatacggatcaagagatgatttcctctgtgatgggtctttttatgtttgcatatgagaatgtaacaaacatctgtgttgagcctttgttctgaagggctcagggtgttttgctcctggtcttttgtcattggcacattctttctttaactagggagcagacagatattacagaatttcccattcaggggtgagaaaatggggcacaggaagcttaagcaagttgtcttactgtggctgcaaagcaaatgagttgcaaaaaaccattggtggaataaattttctcttccctctttccacttggctaatcttcctgtcataaaaataaccatcatagtactgtctcatatgtatcagacacttcctaaagatgatctcatttgagcacctgtatccatcatttcaatgaatgctcacaacagctctatgaaatgcgtattctatttatccccattttacagatggaaaagctgagatttgaggtattgaatggcttgcttaaaatcatacaacttggaagtatttgagctgggatccaagcctcagcagggcccagcactcttaattgttacatctatactgactgctctttaggtaggggacattagggcagaagccaaaggtcgtgacctggcagtcagtggcccagtatggattccagtagttcattggtctgtcttctttctgggctttggttttcttatctgtaaaaggactggactgtgtgaggcacttttaaggtcacagtgtttcatagtagacaaattacatgaaggatttgaaatcaagcagaggtggaaccttgagaaagtcacttaacatctctgagtcttgtttgtcatttgtggagttcttaattcctgataagaatcagctctctgacctagtgtctggcacataacatccactcaacaaatgctctttccttccccattttcctctcaataataatacacagaggcacaatgctctttctctcagtggtgtctttcgtgtcttgaagatcccagtgagcctggaatgcccaagagacaataaatgatggaaggcaggggaaagcggaatgctgggcattggatatggtataccttttatccatccacaagggaaactttcattaagtaatttgtgcttggaactgggggaggactagcaataccctttgtgcccggaaactgggcctagtttgacatccttggaatttgcttggcttgttcatgcaaatgtccaatctcttcccctttctttctgtccagtctgacttatgacttacgtatcttatgtttttctagcatgcagttattttttttaagagccagaattaggcatatataacataatacagtgccggttactacacctgccatttctgccttacctgatgactgagcttactgcagcttatgagagtgaatcaggttttatgagatctataaatatctcagatcggatttttatttcattttcccccttcaaataagacataatggaagcactcacatacataaggaatattctttctgtgataaagtagggtgtttttgaattggcctctgaaaagcaataatttgatgtggttgttcctgttgagagttttatgggggaggggaagaatcatgcatatgctgctataaaactcaaaagattatatcttcatatttaaggtttagcctagcacctatggagagatttatttcagagatgccagccctgtgtgaaggctgcattctctccttctgtagattatatatttgtgttttcttagctacagagaaaccagggaaggaaagtcccattggctagcaggaggtgggctccccaaaggaacttttcagttctttgtctagtctctttccagctgccccaagggaggatgttctcatctttctctctacttcatgattttcctgcaaagattttccactacttgatatatctcactgaggtttttttttcccctggaattacacttaagaaaaaaaaaaagattcttaatagccaataccaggaatggaagttatttttctcactttgctctttgagaagcatctagaaggaaacttgaacacctaactttaaaaaatatattacaaaataaaccatgacacagccatggtaagtgtctcactttacctctctgtaaaatcagctctgtttgccatgtctgactcagggcagtaaatttaactataaatttaactattgtttttgagaaacaaaatgtctgactctgaacctttcattgttgttgttttttcttttttagtacgacctccctctatttcttcccccagttctcactagctttgtgtttaactagatgataatttaatttgttcttaaaagaataaaccatgtgaactgagtatacctgaaccaaaggtgtgcggaggactttgggttaatgtcatttttatttttgctgttgtttaacatcatctcggtgtgtaacataatcctagcactttggctttgctgtatacactcgctgctctgtggttatcatcaaatgatgtgacttctctagtcctcagtttcctcatgtgaacagtgtaggtagatttaggaacagtgagattatcagacatacaaacagtaagctcctagactgaactggcttgaagatgtgttttatttggccggcatgcatatttcaattccctttaatttgaatgcttttagacagatcgtgcactcttcaattaaccctgtccccactatttccacctcgcttaatttctgatctctggcccagtgagcatgcatttgggcttgtgactagcatctctctaaggcaccttccgctccaaaatgttctgatttggggacaagctttatttatcaatcacagtctcaaactggcttgctttctgctctcacccagaaccattttcatttccttttagatttctctgccttgttgagtgtctttgtttgggattctattttataaagcaatttccaaatcgcatctcactttttcctagtcattcaggttctgttgtagatcatcgaaatctgggatggaaaagaccatctggttcacccctccccctgcctgggcttagcagttgctctagagcatgttcattccttattggtatttgtaacattttccaatttggaaactgactgattttcctgagcatgcagcctcttggtctaagtgggagtaaaatgagacaataccaaacaatttttttttcccatcagacatccctcattaacaaaaaagcctgctattgtcacagtttcttttgccactcccagagacccagctggtcagttgtagtaaaaactccgtgtgtgtgtgtgtgtgtgtgtgtgtgtaagaaaaacatgtaaccagttcttagttttcttagtctgacatagaagcatgttgtagagaattccattaaccgctgtaactgcttatttttttgtggaagtggattttatatgacttgtttcactgaggaagtgatgctttttgtgtgaaaaagtccagggtattataataaagtactttcctgagaatcaagtaatgtgttttcttcctacccttggcactcaaatactgccagcaaggcacttggccttccttttctaatgcttttaggatgctattctacattaggggtgtttttaaaaagtgttttcttttatattggctttcttacattactaaggatatcatttaggttgaccagatggtgatttttagggtcattcttttcctgattaaaaaaagccatttaaaaaaattacttgctgctgggtgttcctccatttttccaatctccgattacttttttttctttttaaaaaattttgagtgccaaataaaggcccaagattattactattttgtgtgtgtgtgtgtgtgtgtgtgtgtaaaatttttcaaaaccaatgactatttgactgtgtgaattagctactattaaaatatttctgaaaaatatttctaaaaaggaagagagagaaaaagaaagggaaaggcagacattatgtggtcatagaatgtccttgcacagttttccctgcaaaagagaaccagaatgcaaaccagttgtcctcctacccaagatgcgcctgcctttttcctccagcttttgcacccaggagctcttttttatgccccatatttatagagactaggacttcacaaataccagaacttgaggagtattagacatctctttccgatccctcccccctgccctcctcaatttgcggataactggcctgagcttcagagatcattatttaagcccaagccagtattggaccctcaagaattgtgagcctccttgcaatattttaaacatattcacatgttaacacaaggcatggtgcaacatggctgagggaactgcttctcgaagggtgggctgagttccacagggcttcataagcgcagtgttgataacacagaattacctcgggaggcagttttattcccattgctgttttctttcagtccttttaactcaaggagacagtcagctttgaggtgccatgtctttaacgcctctctaaggcttggtaaactctcctcacccctccttttcaccctccctccctcccttcctttcttccttttttttttttttttttttttaataaagagaacaggtcttacactcagagcttttgacaggcaaacctccagttgaaagtttgtaatattgttttgattttgttgtttttaattttatgattatcttctattaatgaacatttgcaggaaaagaatttaaaacacatgcagccttaatatataatgccttagtgaggcaagtaaaaatgaaaacaataggggaatgattgtacagatggaatgctgatttggtaaaaatccgtgaaggtgaaatgaaattgaagtttgaaaaataccggtgtcgtggaaaattcaagggatttggcatcagaaaacctggaatttagtcctgactttatcagtataaaacaaagcaaattattaaattatatttcccatatgaagtgcagggcttatgatagtaggattgctctaatcaaatgctatatggatgtgagagtgctttgtaaactgttacatgctgtacggtgtaattgttttctattctgcagtgggggaggcttttgtttcaagccttaaactatcgcttcttgttggctttcttcctctttatgatttctattcagttttccgagcaggaacttagtgactttttatttgttccagtggggctgttacttgaaccttaattgtggtactttgaaaaatttcctactggttgtctaaatggggacgtaaaactttgtaatttatttcgtgtgtattcatgtgtgtttgctttaagctaaattttgcaaagtaaacttagtctgtggaatacagtattgtataactattggatagatataatatgcttctctttagtttttaaaatacattcttagcaattgtattttaccacattcatgaaacaatcatgtgcatttgtatatgtctgtatgtgtgtgtggttgtgggggagggtggtagtggtattcagggatgaaggaagtctgggttttgggtaaaactgagaattctggggactatttgcttctgaaagtagacatctgtgtggctacagtgactcattaacaatacactgtcacatgttgttagataataagaagacggggacttacctggataggaagtcctggacttacctatatgtctacgtccatggaagcctcctagtttatggcacactggggtcagaatgacagagcagtatgttgctcttggagatgcagactcttgtcctagcccaggataaagttggtagaaggttactgcagcttggaaggaaggttgaactcagacccgaggaccacattgactgtgttggccaagcccctgtgaactcttcaaatgaatatgttgagatttacatcctgcttaagacaggtgccatactgacaaggattggggagcccaggtgtcaggtacaaagctgcactctcatactgccttacctagagtactggttgaaatgaaggcatatctgcagctctgtctgtgagaggctctcccgatgtcttcctgttgccaaaactgtggcaggagtgccttatcaacagtggacagcaccaccgctgagcagagtgtgagcacaggagtcagccgggatggatcatcagagatttcttggactactaacagtgctgccagtagagcagatatgggcaagcctgggatatgggcccaggaggcccctttctctatgttagtctggcacccctgctgaacctcagcagtgataagtgctagaaaaatgtatggctagtctagaagacaaaggcagagcctcctggagagagagtgacagcgctgagtgggggtgttgcttttaacagatttttaattttttctcctcagaaaattattgaagatcatctccaaaaagaaaacacaccagtttcttattattgactatgaaatcaacatgactgggtgggactggggaaaagacagatttatcagtccctaagagctgatggaaactgcatcctttaggtggaacacagagttggctgtaaggagacattcctttgtttttgttgtcttgaacaaaaggaaggacagtagatgacacaggtaatgactgggtatatcatatattaagggcaccaagaatttagagaatggggaatcaggtgagggtggaggggtgataggagatccctgcccccaaagcagatgttggcaaaggaaaagtcagagagcaggagtcataaagatggccccggggagtcagcctggtaatgtcagtgagtgaggaaggcacagtataaggcactagagagtggtgggaactgtggtgacatagaaagtatagaccctatctgaaggggcagttgccattcatctccagccaaatactgctcaagagagttgcagaacctgtcgccagatcttttggtttttcaagagaagctagaaatctgaatttttatttgaagtcccctgattttaaaaaaatatgggcaaaatgaaagtagtatatatgtcaaaaaaccattgtgggctggatctgatcactaggctaccaggatttttgctcattactatctttttgggttgagtagctttgtctttatacatccattcaaagcaaaagcttgcatgtagaatgaccatgggaagcagtaccgcatggtggcttgggaggagcctctcttgctgtgcctgactgggtagaccctaggtcaagtcgagcgggtccctgaagctcacagcttccatttgccctggccccagacttccatgagtaagtgaaggtgaagagggacaggaatgtcagcctctcaaccaacctctgtagggatttgttgggacatacctttggctcaaacttccacatgagaaattaaattctgggatcaggaatgtgacaaaacacttgagtatgcagctggatttttgccaccaatttgatttacagggaagtgttgccataaaatgcttgagatcatgaattggacagactccccatctggagagccatacctttctctgtgaaattaaatatttatgtacttttaaggtttagttttgatttttaaaaagcgggtagaagcttaactattaaaaaaaaaatgcttcagatcaagtggtaacattccaagttcactgcagttagctttattggaaaacatggttttgtcttttaaagaaaatcaaacgcttcctaaaacatttcaagaactggctgatgttacaactttggccagcagaacccatcgaagccaccgaggcgaggggctggtgttagtatccggcatatcgtgttacacaggagcttcgccagcttctcccaatggcgccatctcatgtagctatcctaagacgtattttattttgagccactttctcagagggaattgggtgggtgtggtcgtaagaacacctagaaaataggggtgaaacctttatggggccaggggagccatggcagagggtggagtgggggatagaagccttcagactcctccgccccagccactctgcacctggggcctttcagctgttaaaatgaaaagccaattatcttctgtaaatgagggaaaaaaagaaggaataaaagtgtctattatgtatgctgatatgcataacacttcaaataaaaggatatataagcacttgacaaattgagggagaaggaggggagagtgctgggggcaaagaaagtcagatttttactttttataccttttctgttctgtttcaatgtttttgaccttcatatatgatcattgcttttaatttttttaagagcaatttaggtgatggaatggtggaccacttatgttatcctgtgtttctgttttttgaaattttatttgttaactgaaaaaacagcaggcatcttaagaggaccaataatttggaccactaaccactgtctataattacagtacaattgctgttcttttaatgggagcaacaaatttgccacacttcacccctctcttaacctatttgagaagataggtataggaaccagacagaggtcaaatatcagctttattattaatgaaactggatttatacccaattggcaagtgcagtctcaatttagcttccccatacttccctgtgcccaaccccttctagcccatgggctgacttataccatgggaaagtatatgttgcatagaatagcaggttgccaggaatgtccgtgccctacctgtcctatctgggcatcagtggggcattcatgttctggccccaagctgcttcccccatggaagagggcagagtaaagccctccaggaaagaggccggatgagagacaaatgggccatgcactgttttctctttcttccgtttttctggtttttttttcttctttttgttttttcttccaatgctaccactttctctcttgagcaggaataagtaaaaggaagaaaggaagtccagaagccttacttccaggatatcctggaagatacttacttgtgggagtggagatccccaagggaaacacaggacaacagaaagggtcccctaaggagaaggaagactgagagaagggaatattccagaggaggtaaaggggaggatcccataaagcaagggaaaggggtctggtgcagaaagcaagacgggaagcagcagtgacagctttatattggtctgactcaggggaagggggcaaatccatattgttccaggccttggtacttgaagagcataggccagaaagtgactgggagtcctcaggggaggggagtgatctaagatatgcttaattctagtgtgtcttgaattcccccaaagtaacctgcaagagaaaatggagagaatgtggggaatatacatggtagcttcaatggaaggaagggtgatatgtatgaagagatgagaacaggagaatctcaaaaacaccctggctgcatagagggctttgtgctttatgtattcacctgtccacttgcctgttggtcactttatatcagaatgttatttacttgtagtcctgcagttgactggcccttgctggagcagggtccatcacccatcagcaagggatgaagacattagaatggtcacactcgttcataataaaccattgcaactcttgagaaggaagtagagaatgctcaatttcatcgctataatttatttctctttggtgattttttggttctctttctttagttcattcacttaatttctccacccttctccttcctttcctcattccttatctctttcttcctttcctggggtccttctgtgtgccccacactgtgctaggtgctgaggatgcagtggtgaacctgacattgcccatgctcttgtggaacttaaagtctagaggtggacctggaagataaataggcacagaagtttaaattgtgattgggaaataagggaaagattagggtgccaggaaagaatactccttagtgacattcacagtcacatctgacataatgaaggaatatttctactcatcttcccaaaaatattcttctcaaaaacttttcctgaaagtttacagttaccactcaaaaggaatctaaaatggaacagacattgagaacacttacaactgacacctgtatttcatttatgattagtctctttttgggtttgataacttcccatccatgtatctacctgtaattttcatcttgctaagcaaaaaagttgtcatactttatatagtaggtatattgccagtgttgaatagatgtattattgtttaaaggttcattaaaagaaactctcaacttctttcttagtgtatttgtagtatttcttccattggaaaaaaatgagtgaagaataggaaaagttattgggtctttccatgttacatattaaatcatgtcaaataagagattttgactgagcctgccagtaaggtcttaatgatacgttactgcacagtatttcctaacaaagtctgtatacatgtaagcagcaggtagttatggtcatcagtggtggcaattcgtttttacaatatagatacgagagttccattccttaagttctgccccagaacggactggtgagttgtcactgtccctgttgacaaatgtgaataataactaaaaatacttcaggctgcatttgtctgattctggcttggtatgtggctaaaggggaaaaaaacctttctgggaagtgtgatgcttctttaacagcaaatggattgaattgatgcaagtctgatgtgcaacagggggtacttaaccttctatctagaatcaaacgccagaattggagaagctgaagccaaccacgacttcataaagataagacatttacttgatctgcatgactggaggaaggatttggggactaagatgtgtttgaaaacttagttggtttacttttaatgtcagcagatttgctgccctgaaatgacagatatggaagctgcttggggatagtggcaggatgaccgaaagaccagcacagatcttcaaagaaaggggaagactgagccaccctgtgttcattgggtatcatgggagttggtgatagaggcagttggcttgggtcatatgacctatgagagggaaacagtgacccagctgggtgggagtcctaggcaaatcagaaggaacacaaggatagggttggtggtgtcattttcatgaagtagagctattatttcgttctggtgaaaaaatgtataagtgttcatttgggtacttgtcggtaacccaagaaaacagagtgaaaaatgattgacagtggatgctttaaaatttgtgactgcagatgaaggagcatcccatttgtatgacacatttaaaacttctgccttaggttagtcccttgacatgacttttcacttgctggcattttggaagtctatgccaaatgacagctctctgccacccagcctttgctcagtctagctatgcttttttttttttttcccccccccgctgtgacgactcctagaccagggccagggtttttatgggagcctctctacattgcgttcatctgttgcgcttacacaagcagttgcctcccttgagttaagactctaatgaagcatgctttcccctggagccagcctgcccctcccctggcctctctctctccaccaaggcagagagcgaagccctctcttatgatattgcagagttaataatgctgctctattggttttgtgagcctctcagtcacagggggaatgtgtgggggatgggccccaagctaggaagtgtgcctcctctaactctctttccggccctgaagcttttgttttgaatctggaagcttcagaccagggctggatttccaaaggtcaaatgtgcctgcacattttgtccttaatgagtgagccttgccctggagccctcgctgaaggcgcctgcgttgaatctgagtagtagccacagaagcagtagctccgtagccaaatccatttgcctgacatgccacccttgagagagcctccacgagccactgagggttactggccaggagaatgtggtcataaatgcatgtctacaggaatgggtgaggtttcctttttgcttagaaagccagaaaaacatcaacagagagaggctacaaagcagaaaaacatacccagactccgaaccttcagttccctcaactgacaaaatacttgagggttttaaatagaaacagtttaacttttttttttttttggtaaatggagggatttttttttttcatgtcatttcttttgttcctcttcctcattttcttctcctcctcctccttttactttaaactttacgtgtgaagatcaactgatctctgaggaactgacgtttcttttatttgatgatgagaatttcctaactcattgttgatctttttgcttcagctaccaggcaaatcagagatgagtttaattctgtgcttaatccagtggcattgtattttagctaagattttttttgatagtatttatttccatctttttgggttttgtcctcattttgatttgttatgtttttgttgttgtgttgttttctaaattgggagtatcagtctgaaaaagaaaatgccttgaatgatttctttgacatttaggttcaggaatatcactgggcaacattaatacggctactgggtttcactaatatcttttgagctctttaatctttccctgagttatcactgaagatctagagaaacagctactgccttttagaagtgcgttggcaaagcttaacccagagcaaaccaccaatgtaattgtcagccaaaaatagaagacattttttaggcccgagggcatgcatttcttgctcctccgtaatgtgtaccccattcatcagaatcctagactgctcatccttttccagacacacagtggggctttcacctctctacacccttgctcacactgtgtgcactttttagaatgtcattgttccctttctccacttggcaaaagttcactcatttgccaaggtctgtttcaaatgtgacttcttcacaaggccttcactgacctctgcagggagagtgagtgggttccttctctgtgttgccataccacttcattcagcctagtgcttagtcgcatgtgctgtgttatcttgaattgcatgtatttctatccctctcttcctgtgataccatgagcaccttgtaggcagatattgagctctagaatcgcttgaagtctccagcacaatgtcctatataaagtggaagctcagtaaataactgttgaattaatttgaaagaagtacaagataacagaccctgccctgaaaggccatcagagttcaaacaggtgtcacctgtttatcttagcagagctttttctccccaggcattcattatcttattgggcaaaatctaccaatctcccagtcacctcagtgaagagcatgcaatgaaaaataatagtagctcctaatcaagatttttaaaaaattcattgaagaagtatttattgagcagctattgattatgcccaaaagaagtttaaagcttggtgccagacctcaaggctcattggatttgtcagagctcttgcctcttcctgcttgacatttcatggtgccttctctacagatttctcattcttgtgacaagattcttattgagagcagggattccagccgagtactgcggggcaggaggagctgagcagggccgaatgaaagtgcagctcatcattatttccttcagctgggtctctcctcaaataagggatttcttagggaaactgtgggacgtgaggcttaaggttctccagctgataactaccctaagagacagttataccataatttggatccacagggaagaaagaactgcccaaatatgcctctgtttttttcttttgcctctgctttcatttgaaacagaaggctcagactggcagctgtgggccctttgcttgtctcacgcactctaactttttaatactcattgccaacattgaaacaattggagagattccacataaaccccaaaagatttgggcttcctttaaaaacacttgccaactctggacctctgttttctacatgatatcgatgagctggtgctatgtaccaacttccccttttagatggcatgtgctatccagtttaccacagtccccacccctcattattgtcatattccttgactgtttcactaatgtatgttatgctcctagtccctgaatgtgtttgagtttgattcctaacctagatttatgggaagatgtgttaccttttagaggaaagcatcctcagaaatagcatctacctactgcagcaccctaaggacaagtatgtggtcttgtatcatgggaccttgtctaggagactgagcagaaactgcagtccagagtctgaaattgagatacctggagcatggcactgctataagcagagggatcagagtagggaattccattttcctcataccctggttccctaagcaaacaagatttggtcatgagaaatttattatattcacggaggattttcataccattgggaaggatatatatatagtccattttatatatctctatatatatactaatacttttggtttcttgataaagaaaccagagactgaagatgagatgacttgaggaaacgcatagagctaattatgtagaaggagcaggcagaagtcatcctgacttttgtctgtgttctctccatgactccacattgtcttttattttacatacttacaaaaagtctcaaagttgaaggatttggtgtccaagacggatcaggtaccctttacaatgagatacttaattgcctgcttttaacagagatggtcttctaccagcatacatttctgaatcacaatagtcttcctcacccactggcccacccttctttttagtctgttactaacaggtgattatagacacaactactttaatgtttaggctccatgtagggagcagggccaagtgtaaattgtgcccttgaggtgatctgcttcccagagtttgatgatcctcttggttagaggtgtgttactgatgggagcagctactggcatccaagatttttatacaagaatgagatgcttactgttcatctgttttccattgctcctatttttactcctcttgttgcttctatttcttacatgcttttttttcctcactgcattttctgttttgaacaaaagggatgggtgatatatgatactggtgttggaaaatgcattagtctctaaggactgggagaaaaatgttgacttatttagtccaatttgtattttcatatttattaaaattagaaaatgttttttaaaatgttggatagcaggttcaaatcccccctttaaaaattatataaatttgagtttctatgtatttggtattaatcaaataaccaaaataaggtcttcaataaattgtgtttataagttttctcaattcaaatcttaaaaaaacaggccaggcccagtggctcatgcctgtaatcccagcactttgggaggccgaggtgggcggaccacgaggtcaagagattgagaccatcttggccaacatggtgaaaccccatctctactaaaaatacaaaaattagctgggtgtgatggcgggcacctatagtcccagctattcggaaggctgaggcaggagaatcgcttgaacctgggaggcagaggttgcagtgaactgagattgcgccactgcactccagcctggcgactgtctcaaaaaagaaagactcttgtctcagaaaagaaaaaaaagatcttaaaaaatgattctaattctatctgttttcctctcaatgactacacttgatgttgacaggttgaaatgtctgaaatcccatttgcttttaacaattcaaccaagacttgcaatgaccagagagaactcggaaattgcataattaagggtgttgtcaaaaccaagactatttgccccagtctcaccaggagagattacgtagagaaatgtagttgaaaagcttatgaaatgaagtttgggatctgatggtttccaacttgagaagatccaaaatcttcatcaggaatccttgtttttccaaggtactaagagataatggtttgttggatttttagaatgttttgagatccttggtggaaagttcagggttggaccagaaaaaaaaaaacctaattgttagtggccaagaaacttttcgttctgtttctggtctttttggtagtatggttacagaacagtgaaaaactcagttttctttactaagttaggttccccataaataggatggggattttaatctttgctgcctattacagtctcacagggggactccaaggttacaagattaccagataagtatcgataagcattttcagatgcttttcccaaaagaattctctgtaaaagaaaaaagaaatgtatgtcatttcatatggaatggattggaaaaatcccagtttcacctgggagttagagctgttacagctttgctcctgtttctgtcagcctgttttctagagaagatggatggtttctacaggtctctgattcagtacctcgtgggctgaaagctcagggcgtgctttcaaaagagtgaggataaagcatcccctaccttcgcaaaaaggatcctctcattcacatagttgttagcaaatcctgatagtgtaggcgccattttcattttcttttccaaaaaagcacacgcaaggaagaactcaagttattgaagatcaagccaaataaatgaccaaatttcgtggcaatcgcagacacagacacaaacatcgaaatatctccttatttaaggcagcagctctgctggggcctacattccaggattctcagcagagaaaacatgttttctttatagaggagttttattagcagcagtgttccggtatgtggttcaggttaattaatgatgtagtcacactggtgtcttgccatgagttttattctagtaagtagggcactaggaaattgtattggcatatcttgtcatgccaaaaaagaattcttaatttggaccactaaaatacatttccatgggatctgtcaacaaggtagtttaagaattcttaatgtggatactgccttagactaagaatgaactcaccattaactataagtagcagatgcagtggtttcaatgaatatatgctgttcttaaatatttttttggctgagatgattgagacctcaaagacccagaccacccacaagctctggtggagttgaccttcattgtatgagaagatttgtatcaaggaccacctttttcccatgagagtgtttattaattttaaatcatgatggtgttttaaaacttaatttgtgttgtgcatatgtagcaaccttccttggaggttgaaacaacaaagcaactggattggaaattagattttcccccttatgctgctaatgtagttcttgctccactgggatttctcctttgcatgggctgatgatttctttgaaactatatggaaattggttcagacaggaacaaaggggagaggggatggcagtgatgattcaaattaatgtctcttcctcaatgagagtctggtgtgcctgaaagtgcatgtcattcggtatcagtcaagccacctaaggttaagtgaggtgccagagctactggaatccaaacttcagggtctcagcacttgatttttttccctgtcatgttgggttgaattgttaatttgaaatctgcaacattgcaatggggttcagaattgggcaaagcacaattttacttttctttacatgatggaacatcaactcttcccctctccctcatctttccccagccaggatgggaaagattcctattgcctgacataatgaataagagaaagaacatctttgtgactctagggacaacgaaagatttagagagagaggcatccaaaatacattaaagagaatctacacttcattaacagtggcacactatgcacatgtgaatgcacacacacactcacactcataggaaccctgtactgcttatattccatatttccatcctccactcttgcctagttcaaactccataccctcttaattggattttggctcacttccaggttcagtgttcgagggttctgtatctgtgaaataatgatcctgaaataaatagcacttctcagtagagataccttttcatgtaaaattcttaaagggagtgggagggaaggaaaagcttctgtgtttaggaatttatggcaaagataccaggatgggcccacataggaattttaaaggacctcacctgtgtaagtggtgtgtggggcttacagaaaacacgagtcctcgccaactgctaggtttgaatggacctcttcatttaaggacctttcatgtaaggactgatagaagtggggctgctaatgtcagggaatgaattcctgtgaccctcaagtgcttcagagactggtggctggagttgcctttctcagggacatcctgttaggtgacagaaatgggaataaagtgggctgagcctgtctctttgatctgttcacccaggataccagttaataagcagtcattatgcaggtgaggagaggggaggggtgggttttgttcatgttagtgaatgcatgatgcaatatggactgctgaggagaaaagccctctttgtgtctatttgaaatgggcagccacaagcacccacaactgacctctccaccttgaaaagaggctccatttggcttctgtctgatgagtacgaagcagcaagtgccttctcagtgtaaaaactcgcactgaggagaaatgatgagggagccttttgacctaataaggtgagcattttaggatagattttctgactggagacaccagctcacgtgttccctggaattccgggattgattagtggcttcattggttcactgattgattcaactagtatgttttggatgtcttttccaggtactgtgctgggtgctggggattcactggtacatacactaaatccctgttctcctgaaacttctatgttaatagggaaagataaacgataaacatgcaagcaaataatttagacctttccaggacttggtaagttctaaaaagcaaataaaatgaggtagtatgatgaagaatgaatgggctgtttggcctagtttctctaggcaggtcaaagaaggattctctgagtaggtgacaatgaagctaagacataatcgatgaaaaggaaacagatgtgcagtgacctggggagtctgcgttctgggatgcggacggagttactagggctctgagagagggatgaactgggggcatttatgcgagaagtgtcctgtctgaaggggagaagcagaggagtagaaaagagtaaggtcagatcatgtagagtctggtttgctgtggtaaggaactgagagtgacaacaggccactgaaggattatcagcaagaagtttgagccagaaagagtctttgagagtgtggttcatccatttttttcagggaaggaagtgaattctctactcagattcagtagtttgctggaaagggaaggggtggtgtgggaaaggcaggcgctgaacctgattcccaggccagagttcttttcaccaataaaaaatgacagttgaaaatagcgttttgttcactcatcctaattgcttctcttcctggtggtttctggaggccagaggagaaaagaggaagtggcagagggagagggcattctccagggcaaggagacagcttttacttccaacacaggtgcatactctcagggctaccccgtgaagctaaattggcctctctgtttagaaatccggatctgtcccagacagtaagcatttaattttttttttttccaaatgaaaaacgttagagacaagtaaataacacctatagttaaatctgaaaatactgacgtgttctaccagaaatgttggtaataaacacatgcacactgcttctgatgttcctttggtgaagaaggaagaatttctggctttcatgatactcttgaatctcttcctacccaggattgtgatcactgttgactttcactttgattgtttgggagttgattcaattactcattcattcattcattcatttgacaaatgcttgaggcaggctgcaagtcaggcacaggtctggtatctttgaagagtcacattcttgtgaagtttacgttttagatgttgtgaggcttgtatccatggtgaagcaggaaattaaaccttcatagcatcctgtaaacatggattattgagtgtcttagggcttttaataaaggccttgaggtccctgtcagaggagggttcaaagaccactttcttccaggttctccaaaccctttttttttttaaccactcaatgacagcagagctatctatcagttcctctgaacttgttctgaatgagcttttcttactgttcagtcttcactctcctattactgttttgcttcctcatagaattccagattagtgggcccctggaagttcagctggtagatgagaaaactgagcccattgaagttaaagtcacccagctagtcagggttgatcttcccaactcagagtcccctgcttacttaaacttttatatccaacaggtttacttcccctggaaacttatttggtattttttattttccatctccatgccctcgataggtttctttatgtctgtttggaagtgtaatgaaaaataacactagttattgaatagctacaacatacagagtgtgcatgcccagcccttccaagtacttggcatgtcaattgattgaactctcacaatgcttctgcgttgtaggtactactattaccccattttacaggtgaggaaactgaggcacagaggggttaacttctcccagggggattgagctagtgagtagtgtaacctgatattggacccaggcagtctggctccagggccaatgcttgggtccctgttcttctgcctctcagtatgcgaatggccagtctgtttctttaattggagtgagtggcacttggcacacccacacagccaccttaaacattgtgggaaatcaagtccaagtatctcaagtaacagtacaacaatccatatcaggaaaaacagcttagggcttgacttcattatggttttggctgccattttatgcattctgagtagaagaaacattcctcctagcgcccccaccttgtctttaacattccgcagtggaagttcctcaaagctctccgttttgaaagcatcctctatgattaccagccactaaattgcatctgccaccgagggcccaatgggctttgaacctgttattcttgggaaattcaagctgcgagggagagagagaacgttgtacacgtgtgcagctgtgctttggagtacaagaagtaatcgtatgtgtctgtgtgttttttatgggggtaggggaagggtatattaattaacccaactgagaaggagatgactgtgttccaggaaggagccaatgaaatgagtttgctttaaaaaaaaaaaaaaaaaaaaatcccagtagcccgagtcagcctgtgcaagtgatttgggagaggaaggggagatgatgtaactggttcggcatgttcccgtcttggccagtgagtgtaaaggggcccagggagtttgaggagggtgtgtgagtgtgtgtgcaaagttaacaggagcgggtgggggtgcataagagcgggctgtaaaacaggattaataatgccttgtcagacctttccctgttactgtgtttttcagtaattttggtttgaatgagggctctctagccaattaatgtttatttgtttcctttggcaagatccactggggggaggaatgagattggtgagtttaaaatttttgttttgttgttgcattttggaagaagaggcgagtaatgtgagtttgggttttcaatgatggctccccccctccccctcttaagaggcaggaggcaagacatggccagctggtgccttgaactgacacaggtgcagaggctgtagggggtggggagccaagaataattacaggtttctgaagcatcaggccctgcctgacacaagcgctcgtcaagaaaactgctctttatggaaaattaatgggaagctgaaaaagcgacagggccattgttgttcttaggaagccatcactcctctgaaaagaggcctcctcccacgtccttgggctcttgacgaactgcttagagtcctctccttttggagcagggaccgactggttgccattgtcatgggatgtgatgggtttttcccattggagtgtctctcctgcattttctcattcttaaatctcactttcagtgcagatccagccctttgcacttcccagtagtatgggtaggattatttttattgactctttaagatgtgaatttcattttgtccgtggaagtgtaatgaccaaagcagggccatctaatggaacttgctttcaatctgtatgtaacaagtgggatttccaccagtgagtgccaacctgaataggggcctggttgggagatgagggcataggagatgaggggatagcatacaggagcatcttctaggccccagctctgcataagcagtgttgtctcttgactattcagaagctgtaatttagttatagtccagtggccaagtaatagtgagcaattcttcttaagggctctctgcaactgtgggtagaggccaggccaacagactcccagtcagtatgtcctgcagagtaacatctggaaaaacaactctaaaccaagttagagaagcctctctgtgcatgggccatcatgtccctaatggtcgcattgaattttgaggatcacagacataatgaatgaggaaaatgcatttccaagttgttggaagtgtaggggaacccagtgccttccttcaagcggtgtgaggcctgggccatagctaccagctctgcccaggttatgtgactttaaagctcactttgatggttaatttagatttgagttgttttgggaatttcttttatgcactgcaactaaggaatccttggaagatgaaaggggtatttgaggctgctttgcatcatgtgcctggggaaagtaatttcaaagacatcaccctctccccaggcctttaatcttgtctcctttctccccctccaacatcctcaccacccacctccccaaggaaacatatgcaaacaaatattttctttgtttgttgaaaataggagaagagaaacatggaagaggttttgatagaaatttttcagctttcatgtttgtttagatttaaattagttttcacagcattgtctctcaaaatttacaaattaccagagggaaatatataacttggtttcagctctagcaaccagtagatgtgagaaacagtggaaagcaatgcagtcttaacatttgttgtagtcccctggttatttcatggagttcagcaatcctgacagtaatgtgtaatgctattgtacctctggggtgtgctattgttgtgggttttcttttaacctaatagctaaaaaaaaatgcagtaagattttcactcatactgtctacttgattatccacattttctagatgaaattctttctctcctaatatttcctggtcatgaaaggcaagaaaaagtgaacatatgcttaatatcttgttaggaatcactctctaggtctcccaaggtggatgcttgcactggttcatgcatcctttctgccacgaggtagattcagtgttaccgtcttcttcctcaagcctatttataatgttgaaacccaggaaggcaggcaacaaggttcagatgcttggcatctgagattgtctcatggacttcctgagtttattaagcatagtacatctttttcctcctcctccaactcctgtcaaaaatgtaccagatctccctggccatgcttcccacatcttttcctgtctttcaattctgacttaattttgaaagcctaggaatgtgtcagaatcattacatcatattattctttgaagagaaagagagtcacaaagttcccatcagtatcagtctttgcaatccagattttcaagttggtttctggagtcagagaatctgccttttttgctaaaaagtgatatgtaaacacgtctagtaagttagaaaagaatgagtattttagagggtggcttgaagaaagaaggccacacatttccctcctaacagtagcttgttttgtgtcactctgaatttccattctgggatgtttgaagatttcaaagcacaaaaaagctaattaaactttgggaccctcccaggagaaaggcaaggggtttgtttctctctttctttacttgaaactctttggggactgtgacaccatggttaatagcatgtgacaaaaaccacacaataaatgtcagaaagggctcccatgggcagccaagtgcagtttacctgcttgtgcaattacttaggtgaacattctttctgggaaccaaagtctgtcccttcctcgccagaagcatcatccttctcaccaccatcatcatcatccttcagatccagatctgatctcagaggaagcatgactttgcaagtttccacatggtggaaagctgcactttcccatgcttttatatctacattctgtccccaatttgtttaatctctttgtacttttaactcttggcccttttaggcgagataggtggaatgactgagattaagggcagctggctaaaggaccacaaatgactgaaaattgattagaaacattgagtgtagttggtggccttttatttcgttgactctgtaccagaaaaagtcattagaaaattgcaatttctttatttctttaaatttgtttttttacttactaacttgagtatacatggatccagagactcccaataattacccaaagtggcatagttattgggtagtagcaaaaatattgcaccaatggttttgtcttatgttcaaattaaaagacacagaaataaaaactgaaccttttatgttccaggtgatttgtttgaaaagtgatggtattgaagaggctggactacagtctgccccaactaaacatggttgtagttatagtggttgcaatggatgggagttgtgagacgattctagctcattttttcagaaagttctagctcttccaactctccatcacttcaaacacttagacatatctgccatatgagaaaacagaggtacaggtttagctctaatcacttaactttactgtttaggaacgtatggtataagaaatatcattgcttttaaaatcatgatcttaataaaccagacatcccaccaatctgtggactctaagattcattttggaaataccgtttaattgtccagggttgaagaggagtgtctttcaacacttgacagtcagcgtattttcttgactccatctttttctaggttgggctccctgaaggggatagactttatgttgaactttgaatgaaagaatgatgagtgggagggaaggcgaaaggaagattgtttcgagcatatgggcatgggaaagtaaggacaagaaaaataggtgaaggaaagaaaccctttaggtaagggtcgtaggggaaatagtcaatgtgacaggagatgtgtgcaatcctgactggcaagttccacgtaattggtgatgagataaagacaggttaaacagaagccatttggtaaccttggcaccatgcccatatataaccaaatgtcttatattgttctcaaggctgtgaaagtaactacctcttgtcagcagcagagagcttttgataaacttaatatgtgccacaaaacttgaattatcctgttttctttcaacttctgtctctggaaaattctgcctctgagcaacaaaaaatgaataatgataatagtggattacaatccataggataaaataaaaatgaattcatactgatacaaacaaatgattgaataaataaacatggagaggaaaagtcaggtcctccttgtaggaaaattatcatagatgtagtaggcagtaataggtttaaagtctattattttttaactaggtcttggattattacttttaataagtgtgttgcaacaagtgagaatgctatgaaaagcatgaagagagtattaaaaaaggtttcaagatgagcagttcaatatgaatttcaggtgatatttattaggaagctaggagaagccatgcatttcaaagttgagatatcaagagaatcttcacaaagctcatctgtgactcatcaatatagaggaaaatcactttgcactcgggaatattttcttcccattgctgactgtaatgaattttttaggggttgggggttgatccagtggctcaagccttaagttgtatggttaggtcaggctgagggaagccttgtacctccgaggtgagtgccagacaggcataatttgtgtcattaaactgacattcgctgactccgatttggagtttgctggcaagagtatcatttgaacagagaaaatctctggttctagtggaaaaacatttgaactctctatccaaatttacagtttagggacacttttagcctgctgatggtcttcgtctctccctgttttttgaagttagtttagacttacagaaatgttgcaaaaaccatacatagagttaccaaatattgtttgtccagcttcccctaatgttacgcaaccatagttcaattataagaaccaggaaattatcattgatataataccattaactaatctaaacacttcctttgaattacattatttttttccaccagtccttttactggttcaggacccaggccaggatccattgcatttagttgccatatctccttattcttctccagtctgtgacaacttctcagtctttctttgttctttgtgacccagcacttaaagaataactggctatttgctttgtagaatagtcctcaatttaaatttgtctgttttctcatgattagattgaggttaaccattttgacagaaatatcatagaataatattgtatccttgtcagcttatcatatcaggggtacatgtgatcaatattacttgttccttgtgctgctaattttgatcatatggctaaggtggtttcttccaggtttctccactgtagagttattatattttatcttcataattaacaaataaatattttgttcggtggatactttgaaactaggcagataccttgtttctcatcatagatctttctactagttttagcatccattggtaattcttaacttgtaatcattattactttgctgtttgcctatggtgattttctatttccatcattccttctgtgtttttgaatcataattttactgtaatgaggagctgaccctttccttccatcttttaatttattcagtcatttatttatatcagtatggattcagggatatttattttatgaattataacctattattattcatttggccattgacagctcctttaagttggcttctgagtctttctgacatgacttcatcactttatgagcacttccttatcttttggtaccacaatgatattctaggctcaacttttattttcattgttccagcccttccaacaactatttctctagggagtcctggttccctttattggataatgatatttagaaaccaagatccctgggctaagtgtgctcattgctcctggggttatctttgcctgtagcttctttcagtggatggagttaggaaatatatgtatgtatactcacacatggatatacacatttatttctctatgtatgtatgtgtgtgtatattaaaatccatgaggaaatactaatacctcagttcccatcaaacatcatagggatttttttttttgacacagaatcttgctctgtcacccaggctggagtgcagtggtgcaatcttggctcactgcaacctccacctcctgggttcaagtgattcttctgcctcagcctcccgagtagctgggattacaggtgcgcaccaccacacctggctaattttttgtatttttagtagagatggggtttcatcatattggccaggctggtttcaaactcctgacctcaattgatccatctgccccaacctcccaaagtgttaggattacaggcatgagccactgcacccggcctgtcatggacatttcttatgagagttctcataatcatttacaaacaatgttggaagtaaatgttctcattggcttggaaataatctaatattagaatcctcctcatccttaacattttaatctccatactcctgatgagaaaagtctttaaccccctcactggggtttcgaattgacaaaatcttctcctctaccttaacttcatctccagcagatataagaagtgtatttcctaagacagcaatcatttcataatgatttgacaggactgtcccagcacatcccgatgggtacttatgcttcttcaattttcaggaggagtaaaaatgccctgtattaggattgcaaattatagccactctgaaatggtccagatttttccacattttagtgatcagatgtctctcatctttagatcataaatatgactcatgtgctcctgcagttcacaccagggcatactgcataagttacttaatcctcccagaagagtgtgtaaatgtatttagaatatctcagccctgcattcagatctcttctgaatatgaagagatctgagccttctaataatcacaatatcttagtgacttttcagtctttgggctggatagtatgtaaataaatggcatacaaaaactctattcacaggcagtgatgattgagtatgtgaaagtcattgtagaggaggcagagaactacctcaaggacatctgataccccatgagtcagctgatttttttttttttttttggtagaaacagggtctcgctgtcttgcccagagggctggagtgcagtggtacgaccatagctcactgcaaccttgaactcccgggcttaagtgattctcccgcctcagccatcagagtagctgggataacaggcacaagccactgcgcccggcaaattttcttttagtttttgtggagacagggtcttgtgttgcccaggcatactgatttttacctaaaacatatctgtgtctcaaagatctggtactgctctttgggcaaagctcaagaagcattgcaattgtattcccagagatatgtattagtggtcatttccaaaattgccccctcagcatggtacagggtagggtttcaaagatggctattgaagagtagaagaggtagaatgatcaaagtaatagtataaagtgggctttgtctttgacagacattatgtacctgttaggtgccaggcactgtgcttggtaggtgatgattcagaaagggaagaagaaatttaagggaggtttcaggagtagaatcttataattcagaaatcaattgaatggagccaagactgagggcttcaatattggagagatgtaagtgataatttctagcaatgagatggaataaggaaggggaaatttttgagaagtggagttcagaaaagaagcaagtgaggataattcatatttctagacctgagaaggtcatcatactggtttctaatgtagagtagtgggaagctactgagtcagagctattatttaatcaataagtaaaacagaatcaaaacttactttttcactaagctttccttgattaatactacattaatagagtatagaattaggtgtccactcagcccctaagaacttatcaacacattttatactattttttggtatcacatttctatgtgaatttatgtaatttttagcttgtggttgtttattctatacctgcatcatgtggacctactgctatatcttctccatctaccacatacaaagccttgtaccttgctgtgagcacagtagttgcatgaacacttgtgacatgagtgttgaatgaagactggaaccattcattagttcttaccattgaaaatcaacagtgagacccaaagctgattcatagttaaaaatctgattttcttattcagtaatgcagagttttaccagaagtgtgattaaaaaccagtcttttgaaatgtcaccaaaataaaatccttgacagatacaacactactaggtatatcattaaaatatattcttaacagaataaatgcctagaatcagaacatcagttgaaaacataggagctttacgggggcagtaaatttggaactagtcacattttaaatttgccatcagtgggtctttgttgaatccagaagatagagcaaattgagctgatagtgcaagttagcaacatagttttatacaagattctggaattgtaggatttttgagtgaggagggctttagaacaaacttcttaaatatcgacttttgccataaaagcactcccccatcttacaaaaacttatgagtgccatggatgaagatttgttgaaactaaacttttttgttcttctcccctgtttctttatcgggtgaaaattttatgttgaaatatattgggtcctatctttaagtggtctaaatagctatgtttgaatttatttttatcatgtagtcagagatgctaaaccattgaaatgggatttatgccccttgccacaaagtaatatagcattgtattttaaatgacttgctataaacaacaagggttttgtcttgtgcctcaaaagttttatggtagacattctttagaacagtattctttcctgctggttatggaatccatccccaaggcagggcttgctgttgtttgattgttactgaggtcacctcttagtttgagtgaacatggcttgttcttcagagcaagtgggaaaactgacttacttgtgtgatgtgctcaagtctgttttgaataatgaagttggactctgggaagtcttgtcttagtatgaaaaccttatctgtttctatttgcttcttgcttgcatgataatttctagaggggaaattggagcatcttacctgctgaattggattgaggggcaagagatcatcatttgatgttctctggaatctcgaaggtatgagatagtccttctggggctcttgttctccttcagctagagtaattgaaatcatctgatgtgacccttatgaacctttcagaggtattcagagaataaataacaaggtcagaccttctactaaggcatttctgatacaagccatgaaaccattctctctgcaccttccccctctgcctgtcaacgtgtggcctcatggtgttctgtgcctctgatggctgtttctctccctccttcttcctcttgcagacatgccttgaattggaacgctacctacagacggagccccggaggatctcagagacctttggtgaggacttggactgtttcctccacgcttcccctcccccgtgcattgaggaaagcttccgtcgcttagaccccctgctgctccccgtggaagcggccatctgtgagaagagctcggcagtggacatcttgctctctcgggacaagttgctatctgagacctgcctcagcctccagccggccagctcttctctagacagctacacagccgtcaaccaggcccagctcaacgcagtgacctcattaacgcccccatcgtcccctgagctcagccgccatctggtcaaaacctcacaaactctctctgccgtggatggcacggtgacgttgaaactggtggccaagaaggctgctctcagctccgtaaaggtgggaggggtcgcaacagctgcagcagccgtgacggctgcgggggccgttaagagtggacagagcgacagtgaccaaggagggctaggggctgaagcatgtcccgaaaacaagaagagggttcaccgctgtcagtttaacgggtgccggaaagtttatacaaaaagctcccacttaaaggcccaccagaggactcacacaggtagtggtacaagttggccgcacgtggtttcttctttcccctcctgtagcctcgtcatgtgggagggctcctctttgttctgaggagtggcacccctgctgatgaggaggtgatagacaggcgggaggccccaggtagggacaaagaatgactcacttgttaccttaagatctcaagatgtcccaagcacagacgggtttgtccctacagtgccaaccacagcatagaatcatacaattctgaggatggctgaagggggccctggcagtgactcatagctgtttgtgacacagacacttgtcgctttcctgacactttgcattgttttatgagtgtagctccacagttttgatcaacactgggagctgaggatgcatttgaaagcattcacagttaaacaaggtagctagggtgtccctattcactcttttcccagcatcctgatttttcatcaaagtcaccaacagcaggagggtttcagagttcattagatgtgatcattctataattaattggcatctcctcttttgcattgttctctggcgcgtgctttatggagagatggcagaattgctttttaatgagcttgttactgagaagttgctaaagtgattacattgctatgtgtgtggcaagagcgggtgggggagggatggggattgtgtattttactcagggcatcctagtagcccaggaagagacaccatccctaagttccagtcatactgatcttttgagcaatgggataatttggaaaagtggggtttacacagaaaagcgtgaaactcttatttttcttggaactggtctttgttctctgctttgagattggagcttaggggtggtgtctcttcctgggctactaggatgctagtagcaattactgtgattggtggtttttaagtgagtctccaacagtgtgctacctgtatggtttttgcatactgtttgcacactgcgagctgaatagggaaaatccccaaaggtgtaagtggaagtataaaagcattcttggagagaaatcagtgatagcatatgagctaggaaaagtgtttggtgctctggggggccttctgggctgtgcctccaaagaagtgtgcaggggagagattgctggctggaaaatcagaacaacctgggctttagttctaactctgccactatccagctctgtgaccttgagcctgttcctttacctcaccaggcctcattttccacatctgttgaacaatctggctcttagggcccctttcaattctagtgttctggaggtccatgaactgtttttgtgtagtagagaagaactttcctgaagttcgaatatataatatatgacagaggaaatcactgttatgaaccttagagttattcccatgggaggatgaagactgacattgcttccttgcacaccaggacttgggcctgtactgctctaattctgaacttaatttcctgtgtggctcttgcttggttcatgggacggtctcctaacataatgtttatatcccgtggctcaggcatagagacccactcatggtttcccatcagaatttgggttccagttcaccactccacatacacacaccaaggctaatgattcatgctattgtcagtttttgcttctttgatattgttctgaaggtagtttttattgatacttctttctttctaaagtcaatgagtaaagttatggcaagacattggaaagacattgcagtgctcccaggctggagtgcatgactcatctcctggcccctccaggaaaccggagaaggcagaaaaggacaagaatgttgtgttgtctttgggctgtggagttcatgattatggacactttctgaattattggcactaagggcacatcctgcttagcatggaggctggacagctctgggaaagcagagattctttttagggagtccagagcatttttttcttctttcttatcccctctttccaatagagatgtcagaagggtgactgttagggttgatacattatgtggtgctctgtttttttgagcattgtctactcagagtgattaccaaggtggagctcattatgttacctggcacctgcaactacttgcctcatgttggactaaagtggaaagactcctattgggaattcactcagggaggcaccaggcattgttagaaaagcagtatcgcagagcacttaagagctgagccttgtgatcgggtggacttgggtttatgtcctcgcactgtcgcttcctagatttatgacctcagtttcctcatttctaaagtagagacaattgtgtctacctcctagattgttttgaatattaaatgagcagatacttgtaaaatacttgtaaaaaagataaaacaaatacctgatagatagtaagaactcattaccgatagtagtggggttgattgtagctattactgttgttgttgatattagtgatgactgagtgataaaacagctttgtaaaccagaaacaagccagttagccaaagttaactaccacaaaacagcaagaagctttttccctctcgctcccagtggttgatcaatgggatgtggggtgatgacacctgtggatacaagttgtggaggataaaccagacatgcaagcattagcccatagaagttggcaataaggcagaaagatcatggctttcctcccacaacatagaaagcagttaccttgcatccacagaagcattttgcctgtaaaaccttcctcagagacatgcacggaaagtaggtgctacaagaaagagaaacagataaaaggggaggtagagacagggatggagggtggggagaatatgaattaatttggattaaatggatgagaatcagaagtatttatttggaattggtgtgaattggagcacatggggaactgaaaacaaaggtgataatttatgtggtgtagatgaactaagaataatgaaaacagcatgaaggatggaatcaaattaagtgcaaacatataaaggaaatggactggtaaaagctcgagggcaaaggtgtatggagatgggaattcagtttggaaagaggctgctgatacaaggactggagttgggagagctgctgaccaaatgtggaaatgaagattttttaaaaatgggcgctggttggattcaggcaagctattttaacccaggactcactttaattcagtcaaaatatttcttatcttccagttggggaggtgttttgggacaggaaaaaaagggagataagaataccatcccagagaaagaagagaagtatttgcattttgttctctagagttgcagatatatgctgtatctcttctatatggtaatacattgcaaaggagatacagtgaagaaatgaagtaaaataaaatgtgtgtgtcttcctctcatatgcataaaggaagacaatacatgttggtaacatggatttgcttgcattgaagaatttttaaggtgttattcatttaatctttatatagacagaatttactgagctgaaaaagatatgcatttttttccttctgtggctgttttttgaggatgctgaatccttcaaaatttttgccctggaggatattaggcaatgaggtgattttttatttattattttttaaggtagcagatgttcacattggtagctagggcacaaacgcaggttgcccaaggaagtaaagttagagatgggggtactgagctggaggtgcaggataacgaggcgaggaatgggacaaagggaatattatgaagtagcaggatttagtgaaaggaagcatataaaaatggacataagggccaggtgcggtggctcacgcccctaatcctagcactttgggaggcctaggcaggtggatcacctgaggtcaggagttcgagaccagcctgaccaacacccgtctctactaaaagtacaaaaattagctgggcgtgtggcgcgtgcctgtagtcccagctactcaggaggctgaggcaggagaatcgcttgaccccaggaggcggaggttgcagtgcgccgagattgcgtcactgcactccagcctgggtgacagagtgagacaccgtctcaaaaacaataaaaattaaaaaaaatggacatatggtttattcattgggaagagcacctagtgttggcatgagtgtaaaaatgttcttagcagccaagtcattgcagacctttctctcctactctgtgttctggtcttcatatatttttctttctcacaaattctaccattatgatcatagttgtattcatcttcttgagtcagctaaataatccttatattttgatgaaaagtaaccttcacttccaatattaaaaaaaaaactatgctcattctcagcaaaaatcaatttttaaaaaatcttaatagtttctatgtaaaaaaagaaggattttctacatttcttcttaattacttctgagaagagataaaaaacctttcattgaaatggtgctttgtgctaagtaaacagacttttcaaatttgaaaatccatataaaggtacgtccacatttatgttattatgagtgagtcatattggtgaagtcaggacaatggcctgtcattagatctttgattcttgtttgcagtgaagggagatgtgaagaagccatgttctctgaacgtgctgcttggaggactctctctatagactgaagttgctgtcacctaaaccatgggtggtgataagcattctctagattttgtcccgaacaatataacaggatacgtttcaggtggaaaagtaatacaagtgtgcaatttgcttagcattttacattttctttggggcccatcttattgaatcagaaagtggcacaatctgtaagtttaatcagaatttagggaaatagtttattttcaaatgaaaaggtggctaaaaatactacaaacaaaaagaccagtgtagcattcaaaaggcaaacagaagtgttatgtcacacatgtaatgaaaggcctttaaagtttgaaatacagtttattttacttattcaacaaatacatataaagcacttgctatgtcccagacattgttctaaatgttttacaaatattaacccttttaatccttatactaacccaatgacataggtaccatcttattttatagatgaggaaaatgagacccagagaagtcaagtaatttgcctggcgtcacacagctcatcatagatggttgggcaaggatttgcaccaaacagtattgctccagtgggagctctcttaacttccaagcttactaataaaggggaaacaagtcaaatgaattttttaaaagtaacccgttattaagaggaaattaaagacgtatagtttaaatgcaaatggacaatgaaaactaaatatcctctctaaataggtgagaattaggagggtccttaaacatattgcctcatcaggtgactgagaagcagtacaaggaaattacaaagaaatggtcttccatttccaggcctattatcgttactgataaagctactattttatggttgttactattttcactttttttaatgttagtgttaaagagagacatgccagtctcagttcacgcattaaaatgacaaatgttaatattctgtccctatcaaataagaaaggtcagtattatcacaacatgggagaaactgaggaaccacaacaacaaaaaagtaacttggttcaggctatgcaagtccctgttgttagaaattaaattggacccatgtctcctgacctataggcttacatcctactcagtagattgttttgcttcttatttactgtatgtgttcttcagtctttctgcgaacaggtattaagtgcccatagatgtcaggcactgtaccatggagtgaccagcaaaggagaacagggtggtccatttgggaaggagtgctgaagggtggtgatggggcagtaaatgaaagcaggggcttgcagcagcagtcagaggcagcatggaagatttggagataacaagtcgcttctctccttctggacagagtgtttattgatgctgttcatctttttaaatgatgtcaatgtgatagtatagtaatttatataaatagaagccctaattcaaggtcaggcatatcagcaggataaaatttaatacctcagtgtggaactgtagggggttcatcaaccactttcaacctgctagtgccatagataagaattctttgaatttatacaatagcaactgaaatggggcgattttaagacattaaagggcctttaatatgccgagacacatggctgctaatgaagtttatccatgtgttgaggcagaaactcattaaaccccgattatgggatggaaacaagaataagggttaaatgttcagttcacaaggtggagagagctgaataggagggtttgataatttggatttagcatattcaagagcttaagagaagtttgaaaagaaagggtatgaaatgaggtggtgaaaaacaatcgctgggagaattttctgattcagtaaaatcttaaaactttaccacatggtaatttagcaatatgataactcctaacatttatgaagataaattaatgtaaacatatattgggaagcatggcctaaactcagcatatacacagcaagcacatttattttatcattatactatgataataaatataggctttgtgggacgcctattccagatgtccttttaatggataattgatagtcacaaagcaaataagtatgttaaaataagaatcgaggagaaagaaaagcatgaaattaatgagtatttcatcataaacaatattttcgaacacccactgtacatacactagtccctctttattgccgaggacctcgctttttgacacaaaagcctgaaatatggtttcataaaatcattatatttggaacttgatctcagaatatagtttggatgggggatgtgggggaactgggaggaaggagaagagaaaagaggaatctcatttcagaaaaggcagtgaaagtaatagaattttataaattcaaaggtttcaagggtgggcgagttctgtttgatagagaagaaaagaagagggtcatgagaagtctgtgtaaatgaaaaaatgacattgagaaggccaagtgtaaacttttagaaaaactgttccttttaataaattgataatgtacagaggctgtttctattataatatgagtgttaattaccgtcatgatcatggttatcctgtacatataatataggaaggttcaaggaaagctatgtggagctttgtaaagagtgaagactaagatgacgttataagaattgatggtaggcagggattttctatgtttcctgaagttgaaataataatgtagtgattgtgtttgaattagaaagaaatggagtttaagaaactcacgtgttaatttttttaaacaaattggttttgaatggtcctctttttaaaaaaattaaaatataaggacagatgaaaaataattgtaaggtgacctgtctttctttgaaaaatattcagcttgaatgtagtagaaattacagttgaaaccttgataacggatcctcaggaaacaaacttcatataaggaaattagttctgatgagtaaatgcagctgtttgggaatctggtccaccaggggcagaatgtgtcagatgacactaagctctgctgcacgactccggtaccgaatggagaacgcctaaccctttccaggcaggcagtttctatttgtcttcaccctgatggaggcaaactggatagccctggccaaacttgttttctaaaatatggggtttttttcttctgcattccctacctaagtacctaatatctgatcccttcctgtactctgtcactttctgccctgcagctttcctctatccttcacagcagaaaggatctggtagcaatacactgtagactgttgtggttggtacactgtagactgttgtggtcagtggattatacgtccatccaccagtgtataacactttaatcttctattattagttttttaaccttcaattaggggaaacttaatagaatttcagtagtctgtaaacaggtagggagacatgatgggggagtgttgggaactgggatggcattcccccactttactccagcaccatcccatctacccctcctctgctactggattttctacattttctaaaagtggcttcctttcaacaatttgttaatgtattgacatgacattattaagctaaatgttggtcgaggcaagatcacttaaaataattaaaagttggtgactttttaatgtgctggttattcagccaaccactgatggagttacttctcactcctgcagtgtccccatgttcagtcaccaatgggtggtgaaataatggaggtgaaagcacttcaattatttaaggatgtctgcaatgagaataagcttagcatgctttgttccatatttctgttcaccctaccttctccttcaacatgtatgtttatggagctaggtgagctggggactgacccgggattggaccccataatcttgtaggggaggaaagatcagaatgccccattgctggttccttatggagcctcagtccagctttgtcctaaaccaaacttccttggcataccccccctttttttttttgcaactgacatctttttttttcttcccttcaaaagttatctgcattcatgtaagaccccttttattttgtttgcaaaataaaatacatttacagattaaaactccttttatattctaaactactcatctggtattataaaacatatacttaggcttattttgttgtttctgcctttaaaatgtatccgtttccattactataacatgtatggaattcagtaaagtggtacatattgttttcaggcaaataatgtaaaaagatgttttaatcccaactttgttgggtctgcatagttttatctgtttcactagatgagctaaaaatgataaaagctatcaatcattttgttgcaggcaggaaaccagaagccatccttagctgagaaagaacttgacctccatggtagagtattgcctagttaggtgtcttagggtatctaatatctttctctggagaccttgctattttcctagcagggatgttttgtaataaggactatagtttgctctaatattgaagccaatgttaaatgagagtggttctaggagtctagcagttgccctaaaaaatgcaggattctatctgtgtcttaatgaatagaaccaagaaaaagcttgactctggtacatatttgagtgtagaagagcaccaagatatggtaggaaatattttagaataactgtgcagtagtcctgtttaaaaggtttctgtcttcatttcgtgtgtttatgtagtttaatgtcatctcatggaattcgttgcttggttatgaacttatcacatggtgtttggaatccccttactatgggatatgcaacatccttcacctgtactgaacttctgttgcagaagggaaataatgatccctcatattgaattctcaattggtcatgagcctgttgaaactagtattggtattttaaaaagagcaacaaaagatacatcttccttccttgatataggtaataagacattttatgttcctagtgttcgggagagaatgtcagaaaatcaatatgaataaattcaagtacacagaggattcaccctatttgaaaatgtaatgtgtggcaaaatgacggtatgtattaaatttttttgtttcacttgcacgtaaatattagcgtttagaaaaggtatcataggctacttaaaaatttaggcagagggcaatttgctggctttttgtttttttcattctttgttgttgtttagtgtctcaaggcttacaactaaactgaatttgaaactaaatactgtcattacagaagatttttcctgagttcctccaatttctctggggataaaataatggtcgctggaagcagtggagaaacagtaattagggcaaatagtaatactgtgcatgattgaggaaaatgtgagaaggggagggggaaaatgcaacagacagacttgtacatcttgttactaggaaaccacatcagcattaaatacagtgtgctaattggctatcctgtttcttcctgggtaccagcctgggcctgctacacagctgtttctgctctttctggttgctaggtaactgcatcatttcccccccccccccaccccccattccactttgtattctggagggtaattggctacttctgctcctggtgttgctgctgggtaccagtctgggcctgctgctctgctgttttccagagggatttagtcagtggggaggggaggaaaagggagaggaagatatgctggcaattaatggagcataagtgcaaattctacacaatgtctggcacctgcggcccctcatcctgccttctcaactaaatcctttagctatggaaacacattaaagtcttcaaatctttctttctcggcatactttataaatatagtttaaaggaaacaagacatttgaagacataactcaaatgacagctttggtcttcaggaaaaaaaaactggcaaaatattacatacctatattttgatatgagtagtaatagaatttgtgcagatattaaaaatactttataacaagacagcatctttaacatcttaaggatagtgccaccttatttcttaaatggaccaaattattgtgtagccattcttcttgatatcagagtataaagtaggaaatagaatggactaaacgcattatgggattttcccgattgttttattatgaaggagtaaagggaggcttgtagacccttgactttcctattatgggttttattcctttgatgtgcacagcacatgccctggtgcttttcactgggacatagcatttacgtggcaataacacattttgcaccatagctgctttcctcatggcaaatgaacaaatgtgatgcaaaatctaaaatcaattttgtgatttaaaaaacaggtaaaaaggtaattactttatatattgttgtcctctcttgttgaagtagaagtttccatttcatcattattgaaattctcactggaagtgcgacaaggaagattctttagaagtgaagtgatgctccaaggagatttcactttaaatggttgagaaagtgtatgtaaattggggccccttgaagaggcagctttattcccctgggaaggagctgttttattgagaaaactcagagcatgttgtgtgactgtgcacagaaatagttagcaaaggcaactcttatttgacactaatggctgttactggtttcccatactaatgagatccaccataccctatcacaattgaagcaggaggaggcctaggctgagctacaagcccttccaccataagataaattcaggctttatggaatcatttctacttaaagtacccttagcataggcagaaggcctccagccaggctaggtgatcgcgagaagatcgcagtgttaacacctgtctaaaggaaaccagctagccgttagtagtgctcaaattgcaaaagaaaatcttgttatcaaagaaaaacttacagagagggtataatattatttctgctatctctgttaaaaggaccagttgttaatcactcaaaagcatttgcccattaaatgaattagccatttacttatgaagaaccatcagaagtcagaatatccctttgtcacttgacaagttttatattctgactttgagagggaggtggttttgtttgagtatttcatctttgttgacagcagactgtcagaataacaactttgcaagtatattatgcatagtccctatttgacttaagcaggatacagattgaaaagttcaaagaagtctggggagtttgtcttacccagccctcttcaccggttgattggatgtggttatacggcctcactgtggtctggcaagaccctggaaacccagggcaggggtctttgaagactgaaggtggtcatggttattaacccagtgataaatgaacatcagtgcatacttccgaggcttcctctcatcgtactcttcttggagagcagatcttttttcttttgatgtctccatgtttaaaacaatagtgagagtgcaggcatacaagcaagcatgctttggggaatgaagaaaggaggtattccatggagttgcttcaacccctggttctcctcagtcctgaaaacctgctttgctaattctcatggccacacaaaactgctagctttgacatcaagcaaaccggttgacagaattggaaaggacgaatctgatggctgctagtcccccagcagggctgctgctaagccacaatatgcttttgtgtgaattagaaaaagtaccctttgcgtggggcagcttccctgtgcttgaggagcagagccagattcagcccctctcagcctgtagctggacaccctgtgctcaaaaccttatgtggcctgtgcgcactgggagagcattccacacagatgggccttccctgaacttttaagaacttctgaggctaagaagggcatagcaggaatgggagagtcacacaatggttcaaggagggtatcgggacatcctgtcaatgtctgaagaggccattatgtgtgacagcaaatcttttggtccagccactctcccaaaatgtgagatcattagttgcctaatgtggtggttctcaaccaggggagattttgtccctcagggaacatttagcaatgtctggagacatttttcatggtcatatgtggggttgggggtatgctactggcatctgggaagtagagggcagggatactgctaagtatcctacaatgcccaggacaacttccacagcaaaggatcatgtgggcccaagggtcaacagtgccaaggttgagaaaccctggcctaatgcaaccttagctgtcttcttctctgtaggttgctctgaaccacttgcaaaacgtttcctaatccttttaagatgacctacccaccaggtcttgccttcttcccttttatgatctttaacaatattgactaaatggaaatattgcattatttattatttctgtcaggatttagatgatgtgccgcttttccccttatggtaagaaagaaatctccctacctccactaaatgcttaaccttctagattgaagattcgtgattgtgactcttcctgagcctcatgccctccccttttgcagaaggctcctgacctgtaataatttgagattttgctgaggcagaggtctgatcacatcagctgccaggctggtacgtgggagggaggtgctttgccaggaaatgggcctagctgaccacgcactgaagagccacaccatcatatggtattgtcattctccccctgggtacagtggccttgctgaaatgtaacagttgcttcctcgttaccaaaaagaagattaactgttagtgaagaaataagagtgacgtgctttccgtgggaaaataaaacttttattggtaaaactgtatattgcgctggcatttgctgcctcagtacatttcctactattcactgttctggttcgcaccagcaccatgaggagcatactggaagctttctgagttcttagggagaaaggtgctatttcaggtaaaaggatttaaattgccttatctaatggacacatactttatgtctgcattttgtcaggagctgtgaattatgcattggccctttcagctacattcacgtgcatagaaaataacattgtcagacgtgtcatccccagatacaatggacaatatgctattataatcgtatggcattgtccttgctgtttggagataatactgctgactttattcctctcatacatgtgaatgtggctgtagggagcacgtgacatctgtggcttttacatgtattagcttatcccttgccacttgaagagattgccattagtgagctggccttgtggggtcatgctaagtgccatgttttggatcacagttgttatcggaccttagttttagatccagtagggaattagtaatattatcttgatggcctgaagatgcagtgggttacttagtcagcttcccagagcagatgtgctaaagaaagggtaagctgaggcgttcctactcagatcagctttgggagtaagaaggcaattgggtaccaagcctgggaatggctgcttctatgttagtgcattacccaagtaagcaataataatatcacttgtattgatctttacagttgccaagtgtttcacatacatccttccatttaaccttcacttaccgatgaggtaagtcttctcattatacccattgtacaaataagggaactgaggctgaaagaatcatttttcaaagatttcactgctgaaccatcacagagcctgccctactctgtttttcctttagagatcagttatttcttttgggggcctaagttgaaacaatataaatgaattcagttttgtttatggttcagaaaaataaatggctatttgttgttattttacttgttcagtataactactaattcagaatagctaagaaaactgagtgattatcttgtatattcctacattctgtctattttggttgaacttaagaatccttgatcttagttggttttcccctattttaagaaagaaagctggttttgaagatgcaaacaaacgcaaggtattgattcttgaagtggtatctcagtactactgcatttgcatattttagataattcttgatgagaaatagcaaatagaaacttttctctgaaccccttgaaagaatgcatcttagcaatcctctttattactaagctggaaaacccaaatggagatgccttaaagaattcaaaggaatctatggatgggtggatcttggtgtatgagttgtatgctcctctcagttacaccagagctttgctaggtgaggttgaagaaatgatttctgtgcctttatttttgtttgtatgataagtgtggaattcaggataattttattttatctttgtttttgcccagttgaggatatttataatgggttagaagtcgtaagaataaaaacccttggtaaatacaggaattgtaaatctattcattggcaaagatcccaaactcaggttatgattttgcttgttatgtgcagcagtctctcctctgaattcagaaaagcacacagtgaagaagaatagctgctttctagcattctgccaaaaggatctacaggaacctcagagtgatgggcatttatattatatccagagatctgaggaaagaaaaggtattaacaccaaaagacaaattcctggaaggctgaaggaataacacacattacccctgagggctccactcttttgaggattgtttgtctgtagatatttttgtgtgtgatcctgtgttcctgtacatctttgtattttcaaacttcccctttttatttcattctacctgccatggaaataatcttaataagtcgttagaattggcggggcccccaacccaatttgataatagccttttccttgctgataattggctactaagcatttagaatgctttcaaatccacctgtgtatctttctcccccctctcatggttagatgttaaagtttttgtttttgtttttatttttgtttttgtggttttcctggtgtgcaccttatccaaaaagaatagttaatgagcaaagccagaaagaatcctttgcagccagggaaaacttttcatacatccttcccactcctgtcattgtatgagctacaaggaccataggtacaaagcttgtgggatcaattaccacaagctcaccgttaagcatttttttaaaaatctgttgcgagaagagtaaagcaataattaaaattaactgaacagcttttgctctattgaggcgttaaatctttgtgtaaacacaatcacgttgtgcaaacataggtctttttagttgggtgatttagacagcgaacccactgaagttttgaggtctctgggtcaagggtccgttttgacacggtttgagaggtcacctgctcatttgtgtctgtgttctgctgcagagagaactgtgagctggtatggttccttgcccaccgcagcacaaagaagagccggctggcatttggcagatagcggtctgtgacgagggggaaggaaattgcacacaaagcaagacggctgcacacaggagccggtggggagtgcttaggaacctctggggcccaggcaatgatgcggcttgaaggtggagaaaacagcagttataaaatataaatgtgtttattattacactgggcctatgctatataattttacacacactcatatttgtgatttacggccgcagctccatatggaggagaagcttgctaatttacccaaattgatagggatgccgctgaagatcatcagattggtaggagcagtagctgagaaaaagtggctcctaaaacaaaaaagattggggtgggggaactgctgtgtcagaggcgtcctttgttcatttattttgataagcagagcttggctttaattattcatgataatgcttgccctggaaggagcaggcctccgatgccacagcagctgtggggtgctgtttggttctctgtgcagttaacaccaaaacaacccacctagtctttcttgagatttgtcatgctttcacctgtgagaggtgagatgccctgaagttttgtttacacccgatatcccttcctacggggcaggtattgacgtggctggagtggaagagaaagcctgaatgataacagccatttcgtgaaatccttacaaggtaggtggtgattttcccatcttaggcatgagaacgtggaagcctagaagatcccaagagtagacatgcccagcttataagtgaccaagctggcttttgagtctgggtctgactccaaagcctgtcccctgcagcattatgctggcatttcctagagaaaaggccaagaaagggacagtggagcagaccccacccttcttccaccccactccatcccactctctgtgctttcagcctatttccgggtcttagcatccattaccatcatttccgacagctttccaaagtgtttcttgacttggcaaaatcttgaggcacttcttctgggagctcttcagaaggaaagcactttggaacagcatgcacgagttccaaagtccccagagcatgtatgattcacgcttcttgcaggggaacttcatggagaaaggctgttgtgaccctaggatacttgattgaccattttttttcgtagatgcataaataccagacgatgaatgctgaatggcccatccactcagctcatagcaaaaccctgggaggcatctgtgatagatgtcctttcaatcaattttttttcatctcatgggcactgctttctaaatatgttttacatttgtttgcttttctccatctctgctgcaataagcagagtcatttgtgtttcaggcactatcttctttctcctcggcagttgtagaacctcgtagaagttgtagaactctccccacattggctcattgcctttggcagcccattctccattttgtagctagagtaatgttttaaagttcaattctgatcatgttatgcccccgtttaaaagctcacaatggctgccattgttcttaaagtacaaattcttgaacatgatctcttaagaccactttccaatagaaatgtaatgtgagccacatatataattttatattttctagcatgcacatttaaaaagtaattaatcatactaattagttctaatactgtattttatttagctcaaaatatccaaaacattctcatttcaacatgtaaataattgataaacaattattaatgagctgttttacatttccttatctctttcttctattggaaagccttcaaaatctggtgcgtattttacacttagagcacattcagttcagagtgctcacattttgggtactcagtagccacctgtgctagggtctaggagactggatcgtgcaggtctgtttaagtcctttcacagtctggccactgcctgttctctcagtccctgcagagcacacaaactgatactcctctttgatcagcttcttggtgaggtgtgggagagaatgtagcagagggatgagaggacctcacccctgctaatgaattggaggaaacagcccaacatggagccatccacattctacccttcttcagggctttctggcacagcaaataggatggactgtgatggaagaagggtggggtcttttgcttctgtgtccctttcttggcttctagaaaaccccagcatgatgctgcaggagaacaggctttggagtcagacccagacttaaaaagtcatctcagccacttattagctgggtgtctatccctgggcttccatgttcccctccctaagatggaaacatcaccacctaccttgcaagccttctgtgaaatagcacaggtaaagcaccatcgggctgcctgatacataaagaacatgccaggaacagtgatgttatcacctggtgtttctccttcactccagcccagtcagtacctacccttcagaaaggggcggcaggtagaaatgaagcttcagctcatctcacactgaggtgcgggttaagaatgaaatccttgctttgctgttggccttcggggtttccatttttggtttatgtagaacttgttaagtgacaccgatttttttgagaaggtgacggaatgaaatgaaaatgctggtaaagttgttaatatgaggtattctctgaaaaaaaatttttctacccacactaagttctagtagtcagtagtaccattctgtgagctgaaaatgagaccatgggttctaggggagggtagatgagttgtagttcgcactcctggcttcctgtctcagtagattcgattcctttgcttattcctttttaaagagttagaacagctattatataggtgcatctaaatagttctgacattctttccagttgaaacatttgttttatcagaaaatatttccaaagggaatatgagcattgattccactttaattgttgctgcttatatgaaaggcagagtgaggtagtggttaagcatgtgaattctgaaggtaagatggcctgagtttcaatcttgactgtaccacatataagttgggtgaacttggggaacagctttatttctccaaccctctatttcctcatctagaaaatggggagggataatagcattagggctattgagagaattagaggacagaatatacataaagcccttaggttctgtagtgcccagcatatagtgagggcccagtaaatactagccaacagctaattttacttggatttaaaaaaccctatcacccattgaaggtgggtggaattggaccacaagtcttggctgatgttgatgatttgaggtgttttctccacagagatgcatgtattgtctagtttgtttacgtataacattttgtacctttcccctacacttagttttctgctatatgtgtatctacacgaggaaggaaaatatagacatttcatcagagattgattctgccactcgtatattcatacatctaatagaaaaagccacatatatcacagcagatgagatatgagatgtagtaagatatgcaccatattttagtagtatatgggctctgggcagtttctctccatgtggtattgggtttgtactgtttgggtaaaaccctttgactttctaatcaatgccacatttaagttgaggagttggggcttgacgtctttgatggttgaatgaaacaccagcctctggaggtggtctgctcctaacatctcaaactgatctctaaccatcttagctagaatcaggtgattgcaggctctttattcaccagaaaggtatattcaggtactgggtgttaataagacccacgttgcataaagaaggattttgggataaaatgttttaataattacgctgcctgtgtggtgctttgcagcatatgaagcatctgcacagaaagcatctctcttcacatttcacgataatcctgcgagggctgtgctgaagaagggattagctctattttgcagaggaggaaagtgagacttaaagagtaggtaactttcctgagggcacatcataagtggtaacagctaggactagagcacaggtctcctgatggtgagttgtgtgtgtgtgtctgttttcccgtaaactgtacttgtacacatggggcaacatctccagaactctgacaacctttctggagaaaagaagcgagatttcctttgttcatgtatgttaagctttgaattaattagatcctaaatgaagcttttgtgacaaagacccaagctaacaggagcttaaagatgtaagatttcttttttctctttaatataaagtctgcactgagaactgtcagaagcccaaactccttttgttctgttggtcacctatccctaggatttccattcctgaggtattgctcaggtccctgcaattcaagatggctgccaccaggcctgctttccaggaatctagttttcatgcagatatttcgaaagtgaaaaggggaggggatgtccctacctttaaaagtacagcttgattggccgtgatggctcacacctgtaatcccagcagtttgggaggccaagacaggtggatcacctgaggtcaggagtttgagaccagcctggtcaacatagtgaaaccctgtctctactaaaaatacaaaaattagctgggtgtggtggcgggcacctgtaatcccagctactcaggaggctgaggcaggagaatcacttgaaccagggaggggaggttgcggtgagctaagatcacgccactgcactccaacctgggtgacagagcgagactctgtctcaaaaataaataaataaaagtacagcttgacattgcacttgccactgccacttacgtctcatcagccagaacttggtcatatgtcaacaagcaattgcaaaggagattggaaatacagtctttgttctgggtggccataagctcaacaaaaaccaagggatactcttacctagggataaggggagaatgaatatagaggacaactggcggttgctgctatgcttttagtcttaataattctttttaaaaagcctttaatgcagacattttaacagaaaacttgagttctgaaattctaaatgtatgaaatggtaagggtaacatcctagtacattgtagtttgtggcatattgcaagatcaaaataattgcatgaaaactaggtttctgtggaatggcttaagttctgaatggaaacataatttacattttgcatttcatgagaacattacattactggagtaatatgaagtgactgggaaattaataacttaagcacaaaagcatatggagtcaaattaactgcatcttaatatttcttgcacctctttttcccccttccaaagtataaagtcacattacattgacattttcctcccagaatgccttcattcttcagtagaagaatgaagagaaattattttgtagctgtgagttcagtacagacaaaaattaaggctgtttgaggttagaggtatataggatgacagattgtgtgggggtgtttctacatatgtgggtgtcaatatgtttgtgctgagttgtttgcagattgggggggagggcagggtgtgtgtgtgtgtgtgtgtgtgtgtgtgtgtgtgaatgtgaatgtagctttcacgggtggtttcagtcattgtgttttcttcccaatgattcctattagggagcagcagaaagaagatgtaggaagatctaggtaactgcttaaaggaaggtatggagatggaccaatagtatatgggtatgttcattcagccaggttaattgagggtctttgacatgtgtccagcattctaagtcttgggaatactaaggtgaataagcctggcctctgcccttaaagggaccatttggttttgtggagctacatagaatgtaaacaatttactcaaacaatatgatagtctcttctagaggaagttaggcgagcagaagaaaggagtgcccaactctatcagagtccatctagagccacttcccacaggacatgctttggaagtactaggaccacacattgtgccaggccctgaggacacaactatgcacagatgtggggtctggcctcaagggagtcagtctcttgaggggatagtttgtcatcaaggttcctcagggtttggcattaccacctcttcagtccattcttaagggtcctcctcacatacttacccttgacctcaggatgataaaccactgtctcttatctctgggcctttgtgcatgctgttccttctccaggaaatacttcttgcccttgtccttagtgtccttcaagtttcaggggggctgatcatctctgggacacctgctctaatagtcttaccaagtcttagggattttctgtttcacatgtccacattacacacatctatcaaacatattgagtctcatgttctttgtatgtatgcatggtgctttcctaactgggagctgagctctaacgtgaagagcctttccatttagctttaatctctagcagtgtcattggttggcatatatttgaaccaacaattaatgctggttgaatctaacttgtcacactgaagagactatttctttcattgccggtgagttagaccagaagtctaagcatttgacttttcctgtttacccatggacagagatgaagtgtttcggagataatgcatgttagggtttatgaatctggaaggtaaggtggtaacaaaacttttcgtgctgttggattttgatggtctgatgtctcagttagcaaacattgtattcagtgcatgttacagtgtgtctgagcctgtgctagactttgtgcgtgattacaaagaggccaatgagaaagcatctagcccagtgcctggacatacactagatatttaatcagcatttattccactgggggtataaggtgtccttgttttaaaagcacttttcatttaatgtgtgtggggagaagcagggcaagggatcaaggcataaaaagataaatatctacaggaaatagtaaataactggccaaagagtgaaaacttagataagggtatagttttctgaggaggagaaatccttgcggatggggtgacatgtggagaataggcacattctgagcaggggacatcccagcgagtgagaaaggcttgggcgggagttggggagcgggggctgtctagggatgttggagactagagggttatgtaagaagtgatgggtgataaggtagaaaaataagtgacatggctttgtgtacatcttttcctgagtacataggcagtggtatgtgaagagcatctatcctagattattatgtgtcaaaacaacaaacaaatgaaaattttcttttggggttactcttagactttatatttgagtaaggtacatatttgggttgctttagctaatggggaaatttagtctctaaaaaaatgtttaatcatcttggaagagaattatgtagacatattgatgttttaaatcttcactgatttgaaatttgcctctaaaaagctctaaaaaacggattaatatctattcaacatgaatggtagctggcccagggagggcccttctctccatgatctggatataaattatctaatttgggctctttcttcttttttttgagacatggtctcgctctgtcacccaggctagagtgcagtggtgcaaccacagcttactgcttactgcagcctcagcctcccctgctcaagtgatcctctcacctcagtctcccaagtagctgggactacaggcgtgcaccaccatgcccagctaattttttaattttttgtagagacagggacctaccacattgcctgggctggtctcaaactcctgggctcaggtgatctgcctgctatggcctcccaaagtgctgggattacaggtgtgagccaccacatctgatctcatttgggcttcttgaagattgataacattgcctttatttttttaagtttagagaaaattaccatatgaactagtgatatgcttaagctacttctctaccatctgtatttatatcatcaaggaatatcaatttttgttatcattagcttaattaaaacaaatttaggatgctgaagccacttactttatagcttccagaagcagatcttaggtggtttttggattatcctttcttatggttttttttttaataccattgatctatctcttttcatatatatatatatatatatatatatatatcgcatatgtagcagaaagttaacttttatccaaataataaatggtttaggtgtatattttctaaatttttggttagcaaaaaagcaaaatttagtgtatccaggaaagtaaattagacattgtcaactaatgtgatacgtaccaatgggtgaccaccatgggtccctgatctgataaggcctagtttagtctcccctccccacctgtcctggccctccatgtctctgcattttctgtggttcacagacacacagtcctctcacctgccctcaggctttccaaaagcctccccagtagggtgtcatgcagacctaccctccctcaaagctgtgtgctctctgattatctttttcttagtaccaccctccttgcaagaaaaatgaattccttggctatactcactaggagttgtacaccttttgccaacctctggaattgactgcatttttaggggaagtttccttttctctgttggtttacttctacagggtatacttctgatttagtggtatcactttcagagtgatgccttgatattacccatgcttggaacgtgttgtttggagtaaaagtgattttttttctcttcattctgaaaatcttttaaggtgattcaaaaattaatagtttgggaatagacacagtggctcatatctgtaatcttagtgctttgggaggctgaggtcgggggatcacttcaggccaggagttcaagaccggcctgtgcagcattgggaggcatcgtctctacaaaaaaaaaaaaaaaaaaaaaaattagccaagtgtggtggcaccagagcctgtagtcccagctactttgggaggctgaactcaggagttcaaagttgcagtgagttgtgattgcacccctgcactccagtctgggcaacagagtgagactctgtctctaaggaaaataataataataataataataatagcttggtcattgtagtaagagtctgttcctgtatacgttctctgccgtatggtgatctttacatttgaaaacaaaaagcaaaggttgaccaaaggtgagtttaaaattgacgttttttaataatcaaatttctatttaatacatcaaattgaattgtgagaacttgacttacagagtgataacattgctgctaaatggaaagaaaatgttctacaaatgagtttcaaacagattcacttggtgtagttgtcatcttgaaagggaaagattaatgttttaataacatttttcttcaaatttagtatatacctagcttttaactttattgtaactggtaatcaccaaaatatatttaaatttccaagatgacattaagttttatttggatttaactccaaaaaagctgataaaaataatttttgaagttaaccttgaaaaacaaaaagaacaaaaacaaagtaaaatggacaaaaaaggcaagcaaattaaacttgttgcttaaaaaaaataataaatatagtttccccaaatgatcatgcttacctgtttcaaaacttgagaacatacagcttcaggtataagtgttgttgaggtctaaattcttaagtgagtttacagtcttttgaaaattatagtaatacctaaacagttatgagtttttgttttgccttgtgtcggggtggtggggagcagtggtgtttgttggctaaacctcactcagcccactagaaactactagaagactgcatacatttttaattaaataaaaaataattttatggcattccttgggttatgagaaacatggtacagtatttgaaaacacatgtattggaataacaaattacacattacaaaaattctttaattttcaacagctaaatttatttcagcatctgggttggtaagtaattttcatgaccaacacagtcttcctccaacatttcaaacaaattcaccaagaatctaacactttgtctcaaaagaaacattttagaaaaagttaacagttgttaaaaatggcacatgaccccaaaggatttctttagtcccgtgtatttccatggctgtgctccacggggcaggctgggctccagtttgagtcttatagagaagccctgtgcctttgccctggacatacaggtgacaaagttctctgtttccacatctctctctggcttcctgtgtgtctgtaaactccctgttgatatcaccactatgaatagcaactttaataacaaacaccgttaataacactttttattcatttgggactttgtaactgaccagtcactttcaggtactaggttccatcgaatcttcatgagtatagggaagtgggacagttttttttttttaattccttccccacacagttaagagccataagtccccaaagaagttattaaatacctttacaaggccacattgctattatgtggcagagccagaactagaataatctattttttgatgctgagttcattttatttccccactacagcaatggttcttgaggtatggtctctggagcagcagcatcagcatcagctgggaatttgttagaaatgcagattcttgggccctccccttgtgaatcagacctactgaatcagaacttctcagggtggggttcactaacctgtgttttaaacaagccctttagggaattctaataagtttgagaaccactgttgctagaggactgcttatggaaagagagatggatataggggatgagaacaatttaaagagaaatattattttgtgtttcttaatggcacttttatgggtcctatatgtaaataagtgtattatctgagcatctactgtgtataacgtttgtgctagccactgtggataaagtggcgaacaagtcaaatgtggcccctgccctcacaaaattcacatcctggccagtgagagaggctccaaacgttctattaagtttgggggtggggtggggatcagagaagaaggcttctttgagccttttggttttatgactgtttctgaaaagcaccaagctgcttctgctcccagggccttggtatgtgctgctttttaaatctgcagagctttcttcccactgcacctggttaactcctccttcgtatctcagcttaaatgtcatttcttcagattcctgaacccataaacagagatgctaaaaacagattctgatacgcaaggtctgagatgggaactcggaatctgcatttttaataagtgcctcaggtgatcctgatgcgatgcagcaacagggaggagatccctcgaaacagagaagggctgctgttggttgcatttggtgaagcattcagggtcttgtacacgacaaggttgatagtaatgagaataaaagccaggggtggggaggagagattccacaaaggtggagtacttggacttgtttactgagtccttcctcccctagctttctcacagttaaaaataactctaagattttgagcctgggagagtgcttctaccacgggttggaatgtaaaaatgggaacactgggattctaggctatgggctggacatggagaaaaatacgggaaggatgagcttttaagcttgagtcgatggggtttctacgtagaaaatatattttaagccagtgctgtccaaaatagaaatatatgcaaaccacatatgtaactttaaattttctagtaatctcatttttaaaaaagttaaataaaaggtaaaattaattttaatatgttttacctaaattaatatatctaaaatataatcatttcaacataaaatcaatatttaaacagttattagtgagaaatattttacattcttttttaatactaattccttgagatccagtgtgtattgtatgtttccagggtatctcatgctaaattttcaatggtgaaagttaaatgcagttctaccaaaataagagtgtgaaatatttttacactgcttcaattttttaatctgaattttaatcaaggttaaattaaaagttcagttttttagttacctcagcaacatttcaagcgctcgttgctatgtgtggctactggctactatattgaacacaaacacaattgttgtcagcagttgcagtattcagtcaaaatcttttctcacctctctccgtattctgaagtaggagctgtacctcattgaggatatggtttaaattttggattacagatttttgaacaaacattttaaggtggtgaggagtaaacctaacccaggaccagttattgttttttagttgttttaagaataaaaacaggccgggcgtggtggctcacgcctgtaatcccagcactttgggaggccgaggcgggcggatcacgaggtcaggagatcaagaccatcctggctaccacggtgaaaccctgtctccactaaaattacaaaaaaattagctggacgtggtggctggagcctgtagtcccagctactcggtacttgggaggctgaggcaggagaatggcgtgaacccaggaggcggagcttgcagtgagccgagatcgcgccactgcactccagcctgggcaacagagcgagactccgtctcagaaaaaaaaaaaaaaaaaaaaaaaaaagaataaaaacaaatagggcaaatgtttgcatgctctgtaaagtgactggtgcactgtgtaaactcaggtacttggacctcgtttgagtaagcaagtaatggatgaatgaaaaagccacatggatcatcaatgagtacattttaatttatgtagtagttattataaatgttttgggaattctataaaagaatttttattttccatcaatcagatacgcaaaaaaccttgaaaaaaaatatttaagacccagctggaatctaagaggggctctgagacaattttccaaagcagatacagtgacttagcataggtattttttagttgcatcacctacaggttgagaagacattgacaagctatggagtgaaattcaccggttactctgtttccattgctgagaaagcttagtgacactttctctacaatgtctttattctccagcttgcttaaattctctagtgcgactgagtgtgatgtgaaagcaattgatgggtctttgctgatttcttcgagatgtattaggcagcagtattaactcattgcaaagtattcctcttttccagttttcttttccatttcctgatctgcagagtttccaaattcttaatccaagtcctcaagagactaggaccttgacatacctaaatgtctagaaccacattaaaaaaataaataaataaaaggaaacaggtaaaattagtcttaacagaaatctaggcaggtcaaaatcctaatctctttagaacttgcattaagaatttgaaattttgcagatcaggaaatgaatgcagaacatttgtattagtgagtttattttcaacagattttaaaccttgagtgcaagattctgccacgtgttcatattttatgctacactctctatcttaaaggcaaatttatagcacagtacatttgacatatcacttatgctgtctcaaatacatcttcagagataaacattacaaatgagtttcataaaatgacgcactttgcttcccagaggggatattgctcaggaggataggttcctatgtgtgagattaagttacaggaagttttcaggatcctcgtcttttaggctgtggaagatagggaagaagtagaagtgatatttaatggtaaaggaaaacttaccacattttagtccttgtcaaagaaggatatcagatttaagcaaccaagcaaacatttcccctcgtaaaccagtttaatacctagaaagtgagggactggaaatcacacaggctgttctgcccctctaggtgtattcaggtttttgttgcaaatcaggatgctttgttaaattcacctaatgtatcggacgggattgagccaagcactgctttagtgctgttggtatcacagtgaacaaaatggatgtctgcatgaagcttatgctctggtgagggaaacagactataatacactcaaacaatgtgcaactgcatttcaaagtaattaagtgctatggagaaagtgacagaatctgctgttttacagaggatagtgaaggaagttctctaagaggaggagacattcaggcagagaccggaatgaagtgagggagcaagagtgttccaggcagagcgaggagccagtgcaaaggcctcgaggtgggagcctgcaggcagggcagcaatgtggtgaatcggggaggggagcgtaggagatgatattggagaggtagccaggagccagatcatgcaggctgtactgtagagccttgcctggcttttgactttttttctgagaacgatagaaaaccattggaacttttacactttaatttcatcttaacctttttttgggtgaatgtctttggcagtctggcaaaacctgtggaaccctttgcagaataatgtttttaaatgcataaaatccagtggatgtcaaagagaccatttatatggaaatatatagactaaggccccctgtaagagtcacttatgctctgatttacattttcaaaggattgctttgactgttataagtagaatagactgtaggagccatgaatggaaggcctaagaccagtgagatggtggggctgagagcaaagctatttttatttatcctacagggcagtggccagaagtagggttgtgcaacacagtctttttgaaggcaagaagaaatatgtatgacttctatttatatttaatttattctcatttttaattggtctattgaatatatattttataatatcctaatagaacattagtacatctgtatggttcatgaataagcctacatatatcatagatgcatgctcaaaaagtatttatggcagtgttttttgatcagtcaattctgatgatcacgatatagggagagtgaccctgtaagaaactaacaaaatgccacactggtttagaccacatttcatttcagatgaattttgtgggagaacgcgagttcttgacgtgatttaacctctctaaatgtcagtcctgtttctcaagcacccttacctctccttacgagccctcatctggctataagtctgttttcacctgatgagacttactctcacttctgaggtggcatatactactcccccagggaaacaagtatcctagggttgttgccagacagagaaagtggttcttgatattcaccctgacatttaggaggtcctgagggtgtcctctgcctccagcattgtgagctgtgggggcacagcctcactgcctcacccaccctctgggtggtgtccttgccttcactcacatgcccttcctggactggagtcctgggtttttaagtctctcttccatctacctgtctcacatagaccactcttgagcatttttgttcactctagaggtgcagtgagctgaacagtgtgcatcattccaagtgcgatacagcatagtgttgtgcaaggccatgacagtttctgttttatacccaggagaagtatctggagtggaggaaggagagaagggaaagtgaaagaagggagagtgaaagagaagagctgattttgcatgaaacctgctctggtaccactgacgtgcagttttcctctctctcataaagaaagcctttctttttttcttttataaagaaagaaattcagcctttgatgaaatgagcagaaatcttcaggtaggcttttaaggatgaaaacaaatgtatcatggctacagatatgtccaccctccaagatcaagctgtggctgttggtgtttagggagatgcagtcttggccatgctgaaaatactgacagaagaatttccctgacctgcctttccagtaggaattggtttatagaggtgggtatagaacctggaaacaaggccagtctaactccacaattcctgtgccctaaatataaagtcatattcccaattctttatatatattttttctgcttctctgatttctgagttctgccttcaggcactgctccttcattgggcattcttgattattttaaattttttattagtatttgcaggaatggcaacttgtcagtaaactagccagatggtggaaaaatagcttgataaatcactataatagtaacatggctaaaatatcagggcacaaaggagcctgtcctcagtattattctgagtagtgtttgccgcaagcaggaaacaatgtcaggtgataagattcagagctaagtcaagctatctgcagtttctcaatagtggacacagccacgaggacactgaaatagctcctgggttggagagttggtttgtactgggaagtaactaagagtcttatcattttctggaaaagaactatatccttgatattatttgtcaaaatgaaactagttaaaggaattcagcaaggggaaaagcaaacagtttgaaatgggaaaaaatatccaaagacgtccacttcagtcttcttcattttatctgcccttcctgtgtccttcagaatgtggttgcctgtgatagacaagtcagttcgattttgggattgattctgggaactagatgtctctgcttgttgctgtagaatttcatggaatttcctaggtgcctcattgcattggaagtgtgtttggtccccaaggttccaggaacctccagttttaactacattcgaaggccttcatgggtggagggcgttttgaatttccaaagtcttaggtgcctcattctcctttttttgtttgtgccagatttccccttgagataacagagcctagtgggtgatcagcagcattaaatacatgatgctaacatgtctctcctgcagggtgctgggatctcttacttccctttgtgtgtcctactcattcagagcagtcctaaagaacactccctgttttggattcattctccatcaatatgctgagaaaatacttaaaagactctctgtttctaatatttcagatacccagcatgtctgtagacttggctttctggagccatgagctctgaaggattttattgacagcgatttcagggcctgtcttcctagtaacctctgtgaacacaggcagaggaaagggagttgagacaggaactgaatactgactgcatgcaaggctgaacaaacgtttcttacgcacaactgattgaaacctcactataaacatggatttattaataagctcaccctcgtttaacagacaaatacactgagttctagagtctggaatgaacgcagcaagatcccaagtaggctgactccaaaggttatgtggcacctccacttggctaccttttcttcagccagcacatcttttctaaacttttggcttaaaggagccagaaggtgaacttttaacactgctcagtgattcatcctctttttttcctggtttccaaaactgaatgggtttcctcctgtgcctccagccctccttcatgtcctcttggttccctttaaaagaaatgcccgtgtttctcgttccccttctctgtgggtcttacagagcagtggctcactagggcaccaatttaatgaaataaaattttcaagcatgtttggtttgattctaggtgatacaaataaagaattgtgaatgctttgtagtcaggtttaaagggaaggggaaaggtggaaagaagaaagtaggtcaagtatagtacctgggtaatgtctccttcagggctgcctagtaaagatttagcttttcaaactggggaaataatgggatgccatagtactttggcacctaggtatcctgaaactttgagtttggcggtttttaatgtttattagttatgtgactcttacatatgccaggcattgttctaattaatatataatatgcatgtgtattgatttatcttctctaaaccctttgaggtacctattattattatctctaagaaaacagagacacacagaggtttgttaacctgcccaaggtcagacaattaaggacagaactagaagctgatcccaagaagtttggcttcaaagctcttaaccacatactaacctgcctctcagtgacggggctcagtaactcagcttcatgatttcacaggtttccaaagattatttttctttttaattagaaccagtccaccatacagttggaagggtaaatatttgtcatgtttggtgacagacatgatgagttaaaaaaaaggtctaaggcaaagtcatgtacttgctcttacatatccttccatctgtatttactgtgtgaaaaggtcacttgagcacaagtgtttgaatttcatgcttataagcagcttccctgtggctaaaaccttgctctccaaattgattttgaaaatattttacaataatgtatattattctctaataagaacactctgcagttgttaagctatgagcttcctaactcagacttttgtgatagtattttccataaatgccagggattgtcaagtgatttttgttttactctgaaattgtagacctttctcctcattgtccatccatcacatttactggaaggaacggtggctctgggagacctaagctgtttgctttgtcagtcagctacctggctgcagcttgtggtaggagggaaggggagggagaagactaaaaagcctgaaatggcaaatgagtgtaggttctggagaaaaatagaattagaagcatttgtggttcagatgaaaatagcacatttcctttctgcctggactgtgggggtgaaagtgctccggggaatcgaaaataaataaaaattgatccttcaccagtcagaggaaatgctctgactctgggaactaaaatgacagctccagatttgaggatctggtgaaaccacttttgaaggttaacaaaaaagaaaacaaaaaacaaaacaccaggagatttggaaaaaaaacccaaaagacagtggtatactatgttaggaaatctagtctttcaggaatgagttaaacagccctttcccaagcctgaccagcaggcagcacaggctggttgggtgtaatcccttttgttcctgctgctgaccacggtccttccatctcttcttgcaggtgagaagccttataagtgctcatgggagggatgtgagtggcgttttgcacgaagcgatgagctcacgaggcactacaggaaacacacaggtgcaaagcccttcaaatgcaaccactgcgacaggtaaagagaagtagaagttgatgggctagggaggagagatggggaagtgggttggagggtgagcagcacccgtgtgcttggacttatcacaggtctgactcacagacacttggacctgggaatgccttttctccatggagaggaccagtgagaagagggggtgccctcttgcatgaaatcaagaggtggtgtgaattcttggttcagttacacaagcatttacagaacactagctttgagccagaaatggtgttaatcactcggtatcaacaagatgtgacagataactttagtataatatgaaaagtagtgagacagagaatggtcatctgtagggacttctgatctttgtatcaatgtcagtaccactttccctcatctatagtaataagaaagagtagaaagcttgcttaatggaaggaaggttagggttcctatcactataaggcttttctctgaacccattattggaaatgaattgtactgaacagagttcccattctttgggggcccagatcattctttcttccttgaaaataggtacaagggtgcaaaaaatgacaaggttttgagaactcctcctgtaattcaattttaagccttctgcattcaatagtagaagaaagagcacgtagcaacagatactacccaagtaatagtatctgacagccctggcattatcaaccaataaaccccaaaatggagactctgcaggccaaggtgaaggcaggattaggtttagacataatcaaataatgggcttgcatctgagcgtgttatccttctaatcctatttctgtgtttaaaaggaagcttaagaaaattaaccatctttttaatgcaatactaaaggtctcggttatgatgagaaaaatgcttctaatacgataaaagcccctgaaagcctcagggttccccagcttgcaggatggcagcaggggcctggcttttcttgggaggaaatgggatcgcttttgcatcctgtctcccccagtccctgtgtcccacacctccccctcaccagggcttcctctgtagtagtgtttggtgaatagggaaggggtgtccagactggtcacgttggcttagtgctcccttaggatgcttataaaggagcagttatgtttttcttcctttttttttccttcttcctgggaagctattttcctcttatcttcattctctaagtactaaataaagaccccatgcgtcctggagcccagagataacctcccactccagggctgaggaagtgtactttatgcagttattgtctcccattcccttggaactctgttctgctacccaagaatacaagttattattacatttccatccattacctagaagtcctcctgtatttacatgaatcagcagctgtcttctacagagtatgctccaggagagtttctccttattccccatcttccttctatttccatctcaagtttctctgctttgtgcctctctcactctggctaataaagaagccctgcagatggtgactctctgtccatagtcttttgaaggagagtgttctgttacatcaactgggaccaaggtgaattctttgtgagtggtcagagtgtgatggtagcgtgtacacacaagttgcccagctctgaagggtgtggaggctgttacttggagattgtgagcattatgggtagccgtaattattggatgtggacaaagagttcttatggggaaattgccaaagttagtattccactcttcaaatcaactgacttattgatttacaaccttccagcagttgatgtatttggatttaatctggtcttttgtatgatttacgtggagaaatgttccaaaccgattggttatttcactgaaagagatgtcagagatgggtgatttggttagtcttttgctttgttttcttctttaaaatacactacagtttctggagctagaaatttgctgagcagatggtacaaattctgcaacatggtatttgtgggagattgagtagatcagcgtcccgcgacacaggccaatagtgcattttcgacagcatcataaatgagagtttgtattcccattagtgtctcatgacaggcagcaccttggcgtttcaattacggtgactgtgctaagaatagccaggcctgggaggcaacatggggaactggagtggtcccaaagcagatgaaaggaaagcctggagtgaccgggagttggcattccttagaagatgtttaccttcagaaacagagggcatctgtagcccttggcaggacatggcatcctgttggtaccgcagtatatatgagtgcaccacctcttgtctcttaaaatttgaacaattacactgccctatttagaagttaagtagggtttagacttcctttccttaagcatgtaccaagtctaacgtatgcttttattttgcctatagggtagttttaaaaaattcatgacgtttttggtttggtttttttttttttttttggccaacatttaaaatcgttaaatgtcacacaaaaaaggttgtatttctggctttgtctggaaaaatcagatctggccacagtgggctcacattcccatgtggctgtaattggatgtagctgaagagcaatcattacccatttgccatagccatgtgatgactatgtttccactgttcccatcactccctgtggctccacaactcaaaggcaagccattggttgccaagtattgtcccgctttctgttgtttcttcttacaagaagagctatacttctttgtatccatgccttatcggaagtggaaacagatagcccaagagtgctgtgtttcttacacttgacccacggcacatactttatctgcctggccttgcagacactgggttttgtgacttctggcttcatgtttgggttaggaaagaaagcacagtagtagtgccatttcttcaccatctgactggacagtgcagcccccctgagtgaccagtggctagagggataagtggtttttcaacccacagagttggaggctgctgatggtggtagatagggctcagtttccatcagtggtaacatgcaggccctcattctaccgactgactcagtgcagttataatccagggagacagctactagcatagtacattccagttcttgggcagtttagagggtgcattttgatctttatgtcagcccacttataagtggtaagaaataccagcccgtatcttagcctcttggtcacctaggagattgctgttgacttaatccctatgtgacgttagtgtgcctttttttttttttttttttttttttttttcatttgagacagtctggctttgttgcccaggctggagtgcagtggtgcgatctcggctcactgcaacctctgcctccggggttcaggcgattctcctgcctcagcctcctaagaagctgggattacaggtacctgccaccatgcctggctaattttgtatttttagtaaagacagagttttgccatgttggtcaggctggtcttgaactcctgacctcaagtgatccacccacctcagcctcccaaagtgctgggattacaggcgcgagccacgacgcctggcctagtgtgcctttttcataaacgagagaaatgactgtggggttgactagttctccattatgtacaaatttcagtaattaaggaccttcttatttaaggtcacctggctgctgtaaagttataaataccctctaggggtatattactcttaaaattatttgattctgcacttctagatgccaagtttatctattaccttttactattcctatgtggaattcagtaagtataaattaataagtataagttaatcatgactaagtaccttgctggggtattgaatttaaataaaaacctcaatagtaagggacctggtctaatcctgagcatcatacattttttttttggaatttgaacaaataatgatgctcatttgattcagtaggggtgcagttacatttcctaccatgttaaaggtttggtttacttttttccacttttttttccctgaatttgaaggataaagggagatgcttatacatatattgctaaatacccagtaattggtaaaggcagatataaagccgaacacatatattactgaatggttctttcaaataaagttctgtatcaagaatactcatttcccgagagttcccaggatatagaaaggaaaggaaaggggtttcccactgccaggccctctcttcactccttaccatctcaaatcccagcattcctcttggacaggcaggcttctgggtgtctgcgttgttgcttctcacaggtacatcctcctcaggcctgaccagcctaacctcaggattaattttctagttgctgccttgaccacttgccacaaatttagtatcatgtttatatacttttcaagtttatgatcttacagttctgtaggttagaaacttctaggttagaagtccaacacaagtctcactgggctaaactcaaggttttggcagagctgcatttttgttctggaggctctaggggaatatccatttcctttccttttccagcttctagaagctgcccacattccttggctcatgatgctattcctccatcattaaagctgttgagtccttctcgtgctgacatctctctggttctatcaattccttctcccacttttaagaaccgttgtgatggcattgagcccaaccagacaatccagaataatctccctgtttaatgtcagctgattcataagttaattccatccacaactttaattctttatcatgtaaccaaacatagtcctagtgtctgggcatgaagtgtagacattttggagggagcattattctgcctaccagaagctccttaaattgacagcccagttctctcttctcctcaatgtggttaagcagatgtgactaagagtgtgggctctggcgtcagactgcctgtgttcaaatcctctttctgatgaatgtttcatctggtagtgggaataagaatggtaccttctttatagggatcttataaggatgttacatttaaaaaagaaatacctacaaacagaatgtcccaacttggatcttctttctccaggttgttgggataaaagaaggagggaaagagagaaaaagaaggaagaaagaaggcagggagaaagagagggagagagggaaagagaacaggcagtgggcaatactgagttgtaccctcaggacatgaattatgccagttagacgctaaattccctgcgggctgtattgatttttctgtgtaccagtgacatggagtactagtttttaaagaaaacttagtgacactgttttattgcaaaccaaaccccctttagaggcatcgctaagggattatctaaatatcttcctcatacaaagtcagggctggaagtaagtgggtataattggaattgttattatgcagcatgttattggattagattgttttcagttgtacttttcgcatttttatgtggttttcgttttactcttgtcccatttcacttcattcccttggagttctatcctacacatgtgcctatttaaggaatggacacaaacagggggtgtggagaatgttgcggtcaagggaaagggtggatattttttgtttgttttaagaatgaacaaacatagggaaatcctgccctgaacaggaaaccctgctaacctgaacagtgtagcttgctaacattctgacaggagttttggactgtaggggtgtctcaggcttcagggagcctgggaactttctcataggttagaaagcagctagtttcaggcgaatgatccagggggagagcatacactcagagctcagaatgactgctgtcatgtaggctgacttcactgggatttcattcagaacctgagattgaagcctgcagggatttggaaacacccatactgtcaggtttctgtatgttatagactgcagttagcctccaagggtatttatgcgctcaggtaactaagaagaacagaattagatttgtctttaggcttcgttggatccagcttctctgatattatcatctggactctttctatcccccagaacccctttttctctgttgacttcattctcaagccaactctttaccacaagggcagtatagacaccagtcactccaggatcccagtggaaagagagcttctctcttccaataatttcagcagatgtcccagggctggttctcattggcctttacaggtcacatggctgttgtttagcagagtactgtggccacaacttcagcctcacacaaatgagaatgcagaagggttgctacccaagagaatatcaaatagctggtgttagaggaaagaggaaagaagatgaccactggatccactctgacatgaagaaggcactcagttatgggccttaggttccaagaaacaccttagcctcagtttccttcacccccctcctttctgcccccaacacacacacacacaaagcgtgagaatacttaccatggagggttggtgaggatggcgtgatattgggaaaacccttagcatagtgcctacatatcgtaacatactcaataactgtgagcacccttcttcatccttttttttttttttttttgacttgaatatagagtgtctgataagcctgtaagtagtatcacaagcagtatttctaggctttcattgtaaagtttagggttgaaatctgggtgttgaaatttcaaagttccaccctttgatgatatagactaattattctttattatatttacagtatgcaggcatgacacaggtttcaaaagcactttcccattcttctttaataatcacaattatgatcataacagttaacatgcactgagatcctacgatgtgccagtccgtattctaagtaccttgcatagatcatctcatttaatcctcacaacccacctatgaggtaaatgctataattatccccactctactgaggaggaattaaagtacagacaggttaatgtgctccgagtcacacagctattggaagagatgggatttaaacccaaacattttgccccttaaacttaccttcccaacacatggccctgtttctcaatgcatgtgcactgtctctgtttaaagtaagggaaatcatttcctaaggagtgatgcaagtcaagctgtttgctgggagttctctaatatccttgttgtttatatctcctaggtgtttttccaggtctgaccatcttgccctccacatgaagagacatatctaaaaaaccgaaaggccagagttgccatggcatcggctagtgtctaaaggaaacgccatgaggcagggggctggacttcaggcggggacccattgcctcgcagaagaaagttctcacttataaacctctgtacacacacacacacacacacacatatacacacactcacagacccacacacatacacactgtcatgcactcaactatatttaaaatatatacgtctattctttatgccttgccctagccagatggaagaagatgaagaaggaaaccaggtgaactcagcaaggcagactggctgcttacttcagcactattggaattatttcccgctgttgccaatggaaatcaaagaaaatggatgtgacgtctgtgcaggtggacggcagtccgaggggcttatttcacttgcttctcagtgcaacttgataggagaatccagcatcttaaagttgcatatgtgtagcactaatgtttctttttaaatagttgggggaaaatgacctagaaaaccaaattgcagtttggtagccaaaattaactcttggtttatttgtcctttgtgtgtgaaaagtcctactattccgtgcgtcagacttcctcacagaactgttgactggttttggttcttagtactattgagatctttcgcgtcgatcccaacggccttagcggcggcagactggaataacaccttacacctttctggcctgcatttctgtagacttcactctcaagggaggagttttcttttcttacgttttgacttttgcacaccatatgcactagggattctggaaacttctagcatgactgcaaagtggccaagagaataaagtccttgatgataaatcacagtatatcccttgagcctcaccttattgccagtgctagattttttctttttaatctctccgtttttgctaacgaaaacttgaaaagcttatttggaagcttaaatgttttatcttttctccatggactaaacctctccaggactctctcggcacctggatgtccagctctcgaagcagccagtcagatgggacatcacagttctctcatcctccttgaggcatgatgacctcagctcatagtgatcaaccgttgtgctgtgtgtcattgctaccccataaccagttacagcatagatgtcgctagtctcagagggcagctgcgtatttaatttaactctggtttatgacctgacaaaaagccaaaaatatcactctttccaggagtggggaaaactgaggatgcctcccaagtctagtggcttcacaaaagatcatcctgtcttctctgtcatgcccactgagctcctattcccctacgtgttacaatacacaatttaaaacgccattgtgggagtgaagggttgacatttaaggaaaaggttgaggtgtttctctcatgggctgtctaaaaggagagacacgtttctttctttccttttttttttggctaggcccaccatgacttgtgacctagaacccccaggattaacagaggcctcacatttactctgcaagctgactccaaaggagtctacagtccttacttgtcatgccacactcacacatccagtagtggtctctatctacccgcattcctagctagctggcactggcctcaactccaaagactgcctttaggaccatcaaatggcctatgcaagcaagcggggtggttattaggacagattgtatattttgtatattctgggaccatcccttcaagacacgtctataaaacaaaaatggcgcttggtccacacacggttgctgctccctcctaccagctggctcccctcctgtcctcctttgactgtttgactcattgactgttaaaatgccaccccatacatatttgggatgcaaaactgaagtcaaaaggaaataatataagaaacacaaacacatatatgacagcaaccttcaagatctgggttttcagctttctgcaacctttgttttcactgaaatgttgaaactactcgtctgagggcaaaggaacctcctcacaaatgctatagctgccaattggacacttggggcatttcgaggtctggccctaagaatttactttctccttttccttttttctatttagacc

SEQ ID NO: 135 - DNA, 3249 bp, Homo Sapiens
tcctcctcaggcgcttcttctctgcaccctggcagcccgtggggagttcgggaaggggccctggatgccttttctgcttgtttttgattgactgaaacaaaacaaaacaaaagggccactggatgtctgccttcttggggggtgagccagacagactgacaaacaaacagccccaactgtgttcgggggagggtttcgcctcccgttttgcccggcagcagcagcatggacgtgttggctagttatagtatattccaggagctacaacttgtccacgacaccggctacttctcagctttaccatccctggaggagacctggcagcagacatgccttgaattggaacgctacctacagacggagccccggaggatctcagagacctttggtgaggacttggactgtttcctccacgcttcccctcccccgtgcattgaggaaagcttccgtcgcttagaccccctgctgctccccgtggaagcggccatctgtgagaagagctcggcagtggacatcttgctctctcgggacaagttgctatctgagacctgcctcagcctccagccggccagctcttctctagacagctacacagccgtcaaccaggcccagctcaacgcagtgacctcattaacgcccccatcgtcccctgagctcagccgccatctggtcaaaacctcacaaactctctctgccgtggatggcacggtgacgttgaaactggtggccaagaaggctgctctcagctccgtaaaggtgggaggggtcgcaacagctgcagcagccgtgacggctgcgggggccgttaagagtggacagagcgacagtgaccaaggagggctaggggctgaagcatgtcccgaaaacaagaagagggttcaccgctgtcagtttaacgggtgccggaaagtttatacaaaaagctcccacttaaaggcccaccagaggactcacacaggtgagaagccttataagtgctcatgggagggatgtgagtggcgttttgcacgaagcgatgagctcacgaggcactacaggaaacacacaggtgcaaagcccttcaaatgcaaccactgcgacaggtgtttttccaggtctgaccatcttgccctccacatgaagagacatatctaaaaaaccgaaaggccagagttgccatggcatcggctagtgtctaaaggaaacgccatgaggcagggggctggacttcaggcggggacccattgcctcgcagaagaaagttctcacttataaacctctgtacacacacacacacacacacacatatacacacactcacagacccacacacatacacactgtcatgcactcaactatatttaaaatatatacgtctattctttatgccttgccctagccagatggaagaagatgaagaaggaaaccaggtgaactcagcaaggcagactggctgcttacttcagcactattggaattatttcccgctgttgccaatggaaatcaaagaaaatggatgtgacgtctgtgcaggtggacggcagtccgaggggcttatttcacttgcttctcagtgcaacttgataggagaatccagcatcttaaagttgcatatgtgtagcactaatgtttctttttaaatagttgggggaaaatgacctagaaaaccaaattgcagtttggtagccaaaattaactcttggtttatttgtcctttgtgtgtgaaaagtcctactattccgtgcgtcagacttcctcacagaactgttgactggttttggttcttagtactattgagatctttcgcgtcgatcccaacggccttagcggcggcagactggaataacaccttacacctttctggcctgcatttctgtagacttcactctcaagggaggagttttcttttcttacgttttgacttttgcacaccatatgcactagggattctggaaacttctagcatgactgcaaagtggccaagagaataaagtccttgatgataaatcacagtatatcccttgagcctcaccttattgccagtgctagattttttctttttaatctctccgtttttgctaacgaaaacttgaaaagcttatttggaagcttaaatgttttatcttttctccatggactaaacctctccaggactctctcggcacctggatgtccagctctcgaagcagccagtcagatgggacatcacagttctctcatcctccttgaggcatgatgacctcagctcatagtgatcaaccgttgtgctgtgtgtcattgctaccccataaccagttacagcatagatgtcgctagtctcagagggcagctgcgtatttaatttaactctggtttatgacctgacaaaaagccaaaaatatcactctttccaggagtggggaaaactgaggatgcctcccaagtctagtggcttcacaaaagatcatcctgtcttctctgtcatgcccactgagctcctattcccctacgtgttacaatacacaatttaaaacgccattgtgggagtgaagggttgacatttaaggaaaaggttgaggtgtttctctcatgggctgtctaaaaggagagacacgtttctttctttccttttttttttggctaggcccaccatgacttgtgacctagaacccccaggattaacagaggcctcacatttactctgcaagctgactccaaaggagtctacagtccttacttgtcatgccacactcacacatccagtagtggtctctatctacccgcattcctagctagctggcactggcctcaactccaaagactgcctttaggaccatcaaatggcctatgcaagcaagcggggtggttattaggacagattgtatattttgtatattctgggaccatcccttcaagacacgtctataaaacaaaaatggcgcttggtccacacacggttgctgctccctcctaccagctggctcccctcctgtcctcctttgactgtttgactcattgactgttaaaatgccaccccatacatatttgggatgcaaaactgaagtcaaaaggaaataatataagaaacacaaacacatatatgacagcaaccttcaagatctgggttttcagctttctgcaacctttgttttcactgaaatgttgaaactactcgtctgagggcaaaggaacctcctcacaaatgctatagctgccaattggacacttggggcatttcgaggtctggccctaagaatttactttctccttttccttttttctatttagacc

SEQ ID NO: 136 - protein, 302 aa, Homo Sapiens
MDVLASYSIFQELQLVHDTGYFSALPSLEETWQQTCLELERYLQTEPRRISETFGEDLDCFLHASPPPCIEESFRRLDPLLLPVEAAICEKSSAVDILLSRDKLLSETCLSLQPASSSLDSYTAVNQAQLNAVTSLTPPSSPELSRHLVKTSQTLSAVDGTVTLKLVAKKAALSSVKVGGVATAAAAVTAAGAVKSGQSDSDQGGLGAEACPENKKRVHRCQFNGCRKVYTKSSHLKAHQRTHTGEKPYKCSWEGCEWRFARSDELTRHYRKHTGAKPFKCNHCDRCFSRSDHLALHMKRHI

SEQ ID NO: 137 - DNA, 3047 bp, Homo Sapiens
tcctcctcaggcgcttcttctctgcaccctggcagcccgtggggagttcgggaaggggccctggatgccttttctgcttgtttttgattgactgaaacaaaacaaaacaaaagggccactggatgtctgccttcttggggggtgagccagacagactgacaaacaaacagccccaactgtgttcgggggagggtttcgcctcccgttttgcccggcagcagcagcatggacgtgttggctagttatagtatattccaggagctacaacttgtccacgacaccggctacttctcagctttaccatccctggaggagacctggcagcagacatgccttgaattggaacgctacctacagacggagccccggaggatctcagagacctttggtgaggacttggactgtttcctccacgcttcccctcccccgtgcattgaggaaagcttccgtcgcttagaccccctgctgctccccgtggaagcggccatctgtgagaagagctcggcagtggacatcttgctctctcgggacaagttgctatctgagacctgcctcagcctccagccggccagctcttctctagacagctacacagccgtcaaccaggcccagctcaacgcagtgacctcattaacgcccccatcgtcccctgagctcagccgccatctggtcaaaacctcacaaactctctctgccgtggatggcacggtgacgttgaaactggtggccaagaaggctgctctcagctccgtaaaggtgagaagccttataagtgctcatgggagggatgtgagtggcgttttgcacgaagcgatgagctcacgaggcactacaggaaacacacaggtgcaaagcccttcaaatgcaaccactgcgacaggtgtttttccaggtctgaccatcttgccctccacatgaagagacatatctaaaaaaccgaaaggccagagttgccatggcatcggctagtgtctaaaggaaacgccatgaggcagggggctggacttcaggcggggacccattgcctcgcagaagaaagttctcacttataaacctctgtacacacacacacacacacacacatatacacacactcacagacccacacacatacacactgtcatgcactcaactatatttaaaatatatacgtctattctttatgccttgccctagccagatggaagaagatgaagaaggaaaccaggtgaactcagcaaggcagactggctgcttacttcagcactattggaattatttcccgctgttgccaatggaaatcaaagaaaatggatgtgacgtctgtgcaggtggacggcagtccgaggggcttatttcacttgcttctcagtgcaacttgataggagaatccagcatcttaaagttgcatatgtgtagcactaatgtttctttttaaatagttgggggaaaatgacctagaaaaccaaattgcagtttggtagccaaaattaactcttggtttatttgtcctttgtgtgtgaaaagtcctactattccgtgcgtcagacttcctcacagaactgttgactggttttggttcttagtactattgagatctttcgcgtcgatcccaacggccttagcggcggcagactggaataacaccttacacctttctggcctgcatttctgtagacttcactctcaagggaggagttttcttttcttacgttttgacttttgcacaccatatgcactagggattctggaaacttctagcatgactgcaaagtggccaagagaataaagtccttgatgataaatcacagtatatcccttgagcctcaccttattgccagtgctagattttttctttttaatctctccgtttttgctaacgaaaacttgaaaagcttatttggaagcttaaatgttttatcttttctccatggactaaacctctccaggactctctcggcacctggatgtccagctctcgaagcagccagtcagatgggacatcacagttctctcatcctccttgaggcatgatgacctcagctcatagtgatcaaccgttgtgctgtgtgtcattgctaccccataaccagttacagcatagatgtcgctagtctcagagggcagctgcgtatttaatttaactctggtttatgacctgacaaaaagccaaaaatatcactctttccaggagtggggaaaactgaggatgcctcccaagtctagtggcttcacaaaagatcatcctgtcttctctgtcatgcccactgagctcctattcccctacgtgttacaatacacaatttaaaacgccattgtgggagtgaagggttgacatttaaggaaaaggttgaggtgtttctctcatgggctgtctaaaaggagagacacgtttctttctttccttttttttttggctaggcccaccatgacttgtgacctagaacccccaggattaacagaggcctcacatttactctgcaagctgactccaaaggagtctacagtccttacttgtcatgccacactcacacatccagtagtggtctctatctacccgcattcctagctagctggcactggcctcaactccaaagactgcctttaggaccatcaaatggcctatgcaagcaagcggggtggttattaggacagattgtatattttgtatattctgggaccatcccttcaagacacgtctataaaacaaaaatggcgcttggtccacacacggttgctgctccctcctaccagctggctcccctcctgtcctcctttgactgtttgactcattgactgttaaaatgccaccccatacatatttgggatgcaaaactgaagtcaaaaggaaataatataagaaacacaaacacatatatgacagcaaccttcaagatctgggttttcagctttctgcaacctttgttttcactgaaatgttgaaactactcgtctgagggcaaaggaacctcctcacaaatgctatagctgccaattggacacttggggcatttcgaggtctggccctaagaatttactttctccttttccttttttctatttagacc

SEQ ID NO: 138 - protein, 230 aa, Homo Sapiens
MDVLASYSIFQELQLVHDTGYFSALPSLEETWQQTCLELERYLQTEPRRISETFGEDLDCFLHASPPPCIEESFRRLDPLLLPVEAAICEKSSAVDILLSRDKLLSETCLSLQPASSSLDSYTAVNQAQLNAVTSLTPPSSPELSRHLVKTSQTLSAVDGTVTLKLVAKKAALSSVKVRSLISAHGRDVSGVLHEAMSSRGTTGNTQVQSPSNATTATGVFPGLTILPST

SEQ ID NO: 139 - DNA, 3478 bp, Homo Sapiens
gggggaagagaagcgatcgcgagagaaaaaaatgcaacctcccaaaataaagagcaaagattgcattaggagcgaacagcgctgcagaaatagatggcagcttcgtgtcagtgagtttgcatcccccttcctgatccacgagctggagtgattagagccctggaagggaattgttactcccgtggagaagtccccttttcctggcagtcgtctgcactgtacacgctggatgcctctctccatccaccccactcactcgctcctctctcacctcctctctccctctcctgcattgatttttttttttcctttttagttgactgaaacaaaacaaaacaaaagggccactggatgtctgccttcttggggggtgagccagacagactgacaaacaaacagccccaactgtgttcgggggagggtttcgcctcccgttttgcccggcagcagcagcatggacgtgttggctagttatagtatattccaggagctacaacttgtccacgacaccggctacttctcagctttaccatccctggaggagacctggcagcagacatgccttgaattggaacgctacctacagacggagccccggaggatctcagagacctttggtgaggacttggactgtttcctccacgcttcccctcccccgtgcattgaggaaagcttccgtcgcttagaccccctgctgctccccgtggaagcggccatctgtgagaagagctcggcagtggacatcttgctctctcgggacaagttgctatctgagacctgcctcagcctccagccggccagctcttctctagacagctacacagccgtcaaccaggcccagctcaacgcagtgacctcattaacgcccccatcgtcccctgagctcagccgccatctggtcaaaacctcacaaactctctctgccgtggatggcacggtgacgttgaaactggtggccaagaaggctgctctcagctccgtaaaggtgggaggggtcgcaacagctgcagcagccgtgacggctgcgggggccgttaagagtggacagagcgacagtgaccaaggagggctaggggctgaagcatgtcccgaaaacaagaagagggttcaccgctgtcagtttaacgggtgccggaaagtttatacaaaaagctcccacttaaaggcccaccagaggactcacacaggtgagaagccttataagtgctcatgggagggatgtgagtggcgttttgcacgaagcgatgagctcacgaggcactacaggaaacacacaggtgcaaagcccttcaaatgcaaccactgcgacaggtgtttttccaggtctgaccatcttgccctccacatgaagagacatatctaaaaaaccgaaaggccagagttgccatggcatcggctagtgtctaaaggaaacgccatgaggcagggggctggacttcaggcggggacccattgcctcgcagaagaaagttctcacttataaacctctgtacacacacacacacacacacacatatacacacactcacagacccacacacatacacactgtcatgcactcaactatatttaaaatatatacgtctattctttatgccttgccctagccagatggaagaagatgaagaaggaaaccaggtgaactcagcaaggcagactggctgcttacttcagcactattggaattatttcccgctgttgccaatggaaatcaaagaaaatggatgtgacgtctgtgcaggtggacggcagtccgaggggcttatttcacttgcttctcagtgcaacttgataggagaatccagcatcttaaagttgcatatgtgtagcactaatgtttctttttaaatagttgggggaaaatgacctagaaaaccaaattgcagtttggtagccaaaattaactcttggtttatttgtcctttgtgtgtgaaaagtcctactattccgtgcgtcagacttcctcacagaactgttgactggttttggttcttagtactattgagatctttcgcgtcgatcccaacggccttagcggcggcagactggaataacaccttacacctttctggcctgcatttctgtagacttcactctcaagggaggagttttcttttcttacgttttgacttttgcacaccatatgcactagggattctggaaacttctagcatgactgcaaagtggccaagagaataaagtccttgatgataaatcacagtatatcccttgagcctcaccttattgccagtgctagattttttctttttaatctctccgtttttgctaacgaaaacttgaaaagcttatttggaagcttaaatgttttatcttttctccatggactaaacctctccaggactctctcggcacctggatgtccagctctcgaagcagccagtcagatgggacatcacagttctctcatcctccttgaggcatgatgacctcagctcatagtgatcaaccgttgtgctgtgtgtcattgctaccccataaccagttacagcatagatgtcgctagtctcagagggcagctgcgtatttaatttaactctggtttatgacctgacaaaaagccaaaaatatcactctttccaggagtggggaaaactgaggatgcctcccaagtctagtggcttcacaaaagatcatcctgtcttctctgtcatgcccactgagctcctattcccctacgtgttacaatacacaatttaaaacgccattgtgggagtgaagggttgacatttaaggaaaaggttgaggtgtttctctcatgggctgtctaaaaggagagacacgtttctttctttccttttttttttggctaggcccaccatgacttgtgacctagaacccccaggattaacagaggcctcacatttactctgcaagctgactccaaaggagtctacagtccttacttgtcatgccacactcacacatccagtagtggtctctatctacccgcattcctagctagctggcactggcctcaactccaaagactgcctttaggaccatcaaatggcctatgcaagcaagcggggtggttattaggacagattgtatattttgtatattctgggaccatcccttcaagacacgtctataaaacaaaaatggcgcttggtccacacacggttgctgctccctcctaccagctggctcccctcctgtcctcctttgactgtttgactcattgactgttaaaatgccaccccatacatatttgggatgcaaaactgaagtcaaaaggaaataatataagaaacacaaacacatatatgacagcaaccttcaagatctgggttttcagctttctgcaacctttgttttcactgaaatgttgaaactactcgtctgagggcaaaggaacctcctcacaaatgctatagctgccaattggacacttggggcatttcgaggtctggccctaagaatttactttctccttttccttttttctatttagacc

SEQ ID NO: 140 - protein, 302 aa, Homo Sapiens; identical to SEQ ID NO: 136

SEQ ID NO: 141 - DNA, 31156 bp, Mus Musculus
  misc_feature (1)...(31156): n = A,T,C or G
gccgcggagcccgccagtcccgtccgccgccgtccatcccgccatggctgcgcgcctgctcctccgctccctgcgcgtcctgagcgcccgctcggcgccacgcccgctgccctccgcccggtgagtgcgggtacagcctggggtaccggcagccggggcggcggagctctggggatggggtgtgacgcgctacggtcaagccggggcgacgcggccggaggaagggaccgggccttctctccggaacccggggctgcccgctgtggcgtggagaactcggggtgtccccaccacggtccgccgcgccccaaaaggcaaggcaacccctaatgctcgctccaggcctgggccccgccccacgtcctacagtgtcccgtgaactgactttgaaagtgttgtcccagctttagcgggagcgatcaccccctgggcgcgctgccaccgagtagtgcaacctttagcccagttggaacggagactggggactgccacctgacagtgaacttgggacttggtgtgcggaggcggggaccggaagaccagagcaacttcaatcatcccgactcaggcgtccaggcgagggccccatctgataaattagttgtacacttattactaaatccttaaactaattaaatgtagagggattgatgggcagctcccaagagctttagagacttttgggggtgtttatactgagatcaagttttacctgtctaaaaatccattccttggataaagcagactggaagtgtaaagctttgttaattatggtggcaggacatttaaatgagctaattagcacattgttgcgaagtacaatacagtgctgtggtaaagcttatccatccggaggagacttgggaaagttccgaggactttaagataggaatgcttttctattctccggaggaagtgatgttctgacgctcttaaaattagagaaccctgaagatgaacagagacacctgcatcggtggcaaaggacaggccagctgactcattgctggatgctgcgaaagggtgtgttcctattgttctagcttttcttatttctttttatgttaataatatttctgtatttttttttaaattagagaaccccccaaatgatcttattttgattcaagtgtgggaagaagctctgccttacagaggattattggagaatggtcagtgagccaggagctatagttttatcgtcacgggtttcttaaagggttatgagcataatggccaacgatccagttgaaaggcagtctgagtcagcatttatggagcgaggcctaggctgagcccaagaacgtttacatccagctgccagggcctgagtgtgccaatgggtcatttcatttagtctgacttttttatgtaaatgaggctttaaagcggtggcccaggcctgtaattccccctccacaaacactggaggcagaggccaggggatcatgatgaatttgaagcctccttggagctgcttagtgagaccctgtcttaaaagacagagaaaacaacggacactagcctgaaggctattgatttgttcagtacaggtgtctcaaaactgaaaattgatgtttcaccaaacttaactgccaagtaaatgatagcaggaaagtgtttatttatgcatttcttttttctgtagttagaaatattacatttttttcttagcatattatagggtgtaccattttaagacccagacagatttacacacaagttctctactttatagtgataaacaattccacctgaatctcagaagcctggtattctaatctcagcgttgcttttacacggaggacgaatatgtactttaaaatgcttacctcatagcaataaattgaaagcagtcatctcagttattagggataaaataaactttgttgtgatctgagaaaccacctgcaggtcttgtgcctgattttctctgacctttaaagcttggatagcagtttggtgtctctggtgaccggtgtgacctcactgtaggaagtaatcactaggatttggcctgtttatcttcccagttgctttctcttcctagtgtttcttgcctgagccctctgtttattgtcatgccttctggccgcaatggtagtagacctttatccctctgtaagtgtaagcccaagcaaaccctttcttccatggctatggaatattatcacaccaacagaaaagaacccaatatagtaccatattttcatcctccattcatctgtctttccctcagtatatacttttgccatctttatcagagattagggagttagagatgccagcatctatatttgtgtcccttgttccattggtttgtgcgcgcgcgtgcacgtgtgtgtgtgtgtgtgtgtgtgtgtgtgtgtgtgtgtttgcgttctgttgcccttactatgctgtttctattacaatggcttcgtaatgtagctcacacgcagggtggtgatacctccagcagtattcttttgttcagggttgctttagccatccttggtgttttgtgcctccatataaattttaaaatctttttttttcaacttctttgaaaaatagcccaagaatttttgttgggcctgcgttgaatttgtagattgcttttgacaggatggccattgccctaatactaattcttctgagctgagaccaggaggtctttccatcttctggtgttgtcctttgtttcattctttggtgtcttagtttacattgtagaagtcttttatttccttggttaagtttattcctaggagagagggagagggggagggggagggggagacagaccgaactggactgtgttcatgctgtctttttcagtatatttgctattggcatatagaaaacctatgaattttatgttaactttgtatcctgctactttgctgaaagtgtttattagctctgagaatgtttttggtggagtctttagagactcttaggtaaattcatatcatctgcaaacagatgtgtggacttctttcccccatttgcatcgtatttattttgttttcttgtcttattgctctagctaagttttcaagcactgcattaaataggagtagtgtcattctatcttgttcccatcttaatgggaatggcttgagttttcctagcatgatgctggctgtaggttgtcgtatatagcctttgtcatcctgagataagctccttccacccctagcttctctataacttttaccatgactttgtatgattaagaaatagatgttttctagaaaaaaaaagactaaagaaaaaacagggcctgaccaagccagcagacgtgagaattaaaaagaaaaaaagacaattagacaacattgtagcatgaccccagctagttctgaggctgaggcaggtttattttttccccaaactgcttttataccattttaattacttgcaattaataaggtcacttctaggttaaggaacaagcaagacaataaacacagatagccaaggacaagcaaggcaattaaaaagtcccatgatcattgtttctaaggcttatcagggtggctaagatatctgagtctacttccctgtcctagcccagaatcagattctacttctctattctagtttaaaattaggttcctacctgatcttacttccctgttctagcctaaaattagattactacctgagtgtacttccttgtcatggccccatgtcagattactgcctgaagcccatttccttgtcctggcccaatgtgagactcctgccaggcagccccaaaaagctccccacaagggtccaggaaaggaagagagaaacccatgttagaacttaacagaaagcagaaataagttttctccacattttaatgtgttacgacatttttagagactcagccttggagcagaaaaaaacaggactgccttattagagctgcagtagcactggagttggggggagccagtgagcacctatgtctgttgtgtcccattacagagatctcaccgtggccttaaaagagaagagctttgtgtctaccagagtatgtagatgtattggtacttgtgcccatgtgatagccacagacttccagaacatctcttcctttggtgactagacaggcatcatcctggccaggtttgctaagttgcccatcacctgtatgctgtgaaggatcaaaccttcgaccctcatcagcatggtggccaacctcggtgaaaatggcttgcccactactaaacagagttacagattgctaactcagactagaagatctttaagcccttcgtttgctctctagagctcattggctgcctacccagtgctgatgggttttatattcactggcaactgctttgaacacataacagtcagggtgtgttccaacaatgtccagaatacttgctgataccagttcccacttttttgaaaaacaaaatctcaattgttcaattttaccaatgaagactcaggaacaagatgctggggtgaaagcctggagctcagagaggcagagaaagtgcccagttgacatttctcctcagctgactccccaaaaggaaaggcaagctttccttgtccaaaaaacccttaaaactgatcccgtctactttgtatctgtccatcctcctgacttcctcttactctctctgttttttttttttcttcttcttatgtccactccccattaactggttgcttgcactgcctcttgacctgtggttaactttatttaatcctgtttatagtaaacagaaagctcttggattaaaggtgtgtgctagggctgagccacaccataactagaaacaggtttttccagtaattaccacaatgccaggtttttccagtaattaccacaatgtggtcgaatagcctgcaatacccaagtcatgctgaatgcctggaccagcacgcagtgtcaggcacgggactcatcatgcacatcagagtgaaggacaagactaccagggagaatggattaaccctgctcttgaaaacccacatttttgctttcaaataaaataatttttctttaaaaaagtttttattcaggtatgaatttgaagatgtatgaagtaatgtccttcttaggggatcctctggagaaacaaaacacaaccctgaatacagctgaactaagggaactgataaaaagtcatttcatgttccctgagggcgtgaggacagagaaggacggagagcaaaaggaaatgtcagctgaagattctaaggaattctatacaaatccacacagagtcttgttgggcattttgatcgacacaccagtagctccattgacatttgattgacatttgattgacactgcaatgttcagtgacattatacagctcgtgtcttgtgttactgagatttgcagttaggattctgaatgtgctactttgggagagtttgcattgttttaaaaattgtacttgacatgaaatttatcactattattctattatactacttgattttatgcagtttagtgccagagtctattcagagacaatgtacttcacctcaactcacccctgtgtttagatctagatattatccaccttaccgatttccaaaaggagacagttgaactatgacaaaatgctgtggtgggagggctggggagggttctggaatagggtctgggaggtcaggagatcttatggaaagcatatctcagggttcactggcattaatttggatatgaagagtaatggctgacctaattttcttcatgtgtgtctctttaagatgttctcattctggagcagaagcgcgtctagaaactccttctgctaaaaaattaactgacgttggaatcaggagaatcttttcctcggagcatgacattttccgggagagtgtaaggaagtttttccaagaagaagtgattcctcaccacacagagtaagtgccctcctccctgctgtaacgtatgtaacatacatgatagaaaaggtactgccttagcccactcactgttcttcactgtaatactgttgagatcataatgagtatttctaagttttgcaagtattttattattactattaaaattactaattttttaaagatttatttattattatatctaaatacactgtagctgtcttcagatgcaccagaagagggcatcagatctcattacggatggttgtgagccaccatttggttgctgggatttgaactcaggatcttcggaagagctgttggtgctcttaaccactgagccatctctccagcccaatattactaattttattttattgagacatcagtatcattgtgttctccagactggtcttgaattctttttttttttttttaatttattttttttttcattttttattaggtatttagctcatttacatttccaatgctataccaaaagtcccccatacccacccacccccactcccatacccacccactccccctttttggccctggcattcccctgtactggggcatataaagtttgcatgtccaatgggcctctcttgccagtgatggccgactaggcttccaaacgctgacatcattgcatacactagcaagattttgctgaatggtcttgaattcttaagtgcaagcattttctcctcagttgcccacgtatctggggctacaagcttgtgccaccacattcagccttttaaaatgtgtcattcaagagtgtgaaaatgtgtggatttacaaaggaacctaagaaaaacaagacaacaacaacaaaaatgccaaggaccagctgaagctgagagagggtgctgaggaaggggtgtttgggagcggcagaaagaagtcagtgatgggtgcaagctgacagctctgtggtctgctcaaggtaactctctagagtcctctagtagctcatggctttttctaccaaggtcagaaaacctagaaaagtgctaaaagagctgcaatagctatccagatagcttttcctcagccaacctgcttgacaaaatttgaaaagagctgtcagctctctggaatagctcagctcttgcagaccaaagcccagtcttatttgcttatcaatttaatcacttatcccaggttcccttttgattatcccatgaatcagcattttatggcatagccccttgattcttagaaaaaggcagcaagtacattttttttagcataagttaaagtcctatgcagttcactgggcactgtcagagatctgcctgcctttgtaaacacaaacaatatgcttaactgggtgggatcctgccctgagatcaccactaactcacttctctgtgctcctttattgcttgagccataaactttgttcatttccctttacccactcatgagtactgctgcctctgttctttcaggcccattcatattgcatccttatattttgcatagttgaggaatcctgtttatatattcttgaactcatgttttcagagttcttttccacagccttaaaggctgtcttgaaggtcacagcatgaccattttgttttgaggaacaataactagacacattctcaactactagactcatgctgtttctaattatcgtggagtcattagtgttggcagggagaacatactggggaacatgaaaaatacctacattacaatgcaagcgggccttaggcctactgcagctgtccgtacttgtggagactggcatcccattggttctgctccaggggctagaacctgccacaccacccttccacagccatacagaacctggcacctatggttaagtggtaaattcttagtccatttcagtctttgtttttctatgttaaaaattaattaaagtatgttaaaaaggtcatcatagagaaacttggtagatcattggccacttctgaatatttatatcattgagatcatttttaaaaagtcttacagatttatttatttcatgtgtatgaatgtttgctcaaaagtatgtctgtgtgccctgtgcattctggaactgtagttaaggatggttacaaaccactgtgtgggtgctaggaattgagcccaggtcctttgcataaaaaacaagtgctcttaactaccgagccatctctttagtcccccaactggcctctcttgattaatccttttctttttttaaaaaaattttttattaggtattttcctcatttacctttccaatgctatcccaaaagtcccccatacccaccccccacttccctacccacccaatctttttcttattgaacaaaaaatttgatttgtcttaaaatagaattttgttgtgtttcaaaattcactacattacattgcagaagggttttatgtattatttaagaacaacttttatgaattttatattcttttgagacaaagtgtatgtattactggctgacctgggactttctgtgtagaccaggctagcctcaaattcacaaagatctctctgcctctgcctcccagtgtggggatcaagtgtgtgagtcaccataccctgtttaaatacagcattttaaggaactatgggagaaatctttggaagtcctattaaggaagttttcatgactatgtggcataactaaacttgtaccctagagtatcacctatccatgatagcagtggatataaattataggaatagtccacagagcaggaggggggcaaaagatggcaaagataaggaagaagaaagaataacacaagatacacatggaaaggccggtggccagtgtcatcagttaccttaaattaaggacacgttcctgcacaagtctctagttcctagtgaggcggtttatataacttttaaggaagtttgtctgactttaagtttgttatctgcagatgggagaaagctggagaagtgagtagagaggtctgggaaaaagctggcaagcagggcttgcttggcatcaacatcgcagagaaacatggcggcattggtggggacttgctctcaacagcagttacttgggaagagcagtaagtatggagacatttagagtggagtcttgttttgtgagttgtcctttctgaagtgataatgaaaacacttgctaagttcttggaggactgaaaattcggtgtaaaatgtggggatgacagcatgtgtgtactaagtttgggatgtaggaagatgatccgtgttcttcaaatctttttatattgtagaaataggtgctgttgatgggccaggtgcatcctagcatgcaggagtcagaagcaggaggattgccaagagctcaaggctagcttaggtttacatagtcagttctaggccagccagagtgatatagcaagaagctgctttcaaaacaaacacacagacaaaaaagagttaaaaagataactacatttccagtgagtttctcccctccctccttttaaagagcatagcagattggggggaaaaatccattgaaatatgccaaaatttgcattataagaatatataaatatctccgctaaaattgcagaagattatgtagcaacagttcatcaaaagggaaataaatgcacttagattttatttaatgaaaatgctcttcctcactaccagaggatcataaattatgttgacctggaattatcattttgcatatgtgtaaaatttgtgaagatgacaaatcctggtccccaataaggacaagatggttgtgaaagtaacacattcattcacatttgttgcattaagaaaaatgaatgtttctgggatttcaatgtatatgaaaggtaaatgaaggggaatttactgtaagaagatagcttattaggaaagaggacaatcatggttggccttaatcccctacattgtgatgcaatttaaatgtactacaataggaggaggaatgtgtaagttatgcaacataaatgatttggaatattttacatctacttgagaacataagttttaaaaaatcgtggtacttaatcataacgattaccaggagaacaatggagtgaaaagttggcagagtgactgcgggtacattagagtgtcaccaaggtgccctccataataggacaattgcagtgtcagggtaagacaattgcaggtggtcagtattttagctcttagttcatcaaatgagtactgtggaaggactgctaaagccctgttactgtgttagagcccacaatgaaaaaaggtcagttaaaacagagatggcactgggaaggctctgggcttaagagaaagcaggctattaccacccagtgcagtgagaccttcagaaattcttcactgtgttagtaaaattgaaaattaaacttaacccaatagctatttcatggttccgtttccctcctcttttgttctaagagcgtactccaattgcacaggccctggcttcagcctccactcagatattgtcatgccctatattgcgaattacggcacaaaagaacagatcgagaagttcatcccccagatgacggcgggcaagtgtatcggtgccatagccatgacagagcctggggctggaaggtatgtcctcagttagctgcttctggattcttagaagcagagtcctaccagcaaacatttgctaggtgtactgcacagctctccgtaaatatgggttctgcattcgtggatttacacggtctttgattgaaaatatttggaaaaataattgcatctgtactgaaagtatacacatgtttcttgttgttatttcctaggaaacatagtatagtgaagattttaaatagcctttccattggcctggattttgtcaataatctggaaattaaaatgtagagtatgtgggaagattatgtagggtgtatgcaatggtgtgtaggttttggtatctgggactagaagtctggaactaatccccccagtttctgtgggttctaggtgacaggtaagattctgagctgtatgcaaggcaaaagggagcactgcctaattcacaatgtgaaactccagttgtaaagcaaggtgcttttgtacacaaataatggcaaagcagttgtaatgcatgctgggttcaagatacccacctagtgtactggaaacacagtggtaggcatgagtgagtctttagcatgatgtataaatacatagtctatatcaatagtcttttaagtgggatgtgtggagtgaggtgttaaacatgcttatctggaagcctggacacaggccatggaggctgcacattttaaaaggaagagttcataaaaacagagacattttgaacggagaagaatgtcaaaatgttgagaaacctggacgcacgtatgagaggaaaagaacagagtagatgggacacggtatcagagatgggttgcccgctacactcctaacttagatttggcctccacagagaggttgccagggccgggccagtgaggtgactcagccggtcaggggccttgctcctattgcaggcctggcagcctgagtgcagtgtgcatgaagatggaaggaggaaatgggctcaacatggtgtgctcgctgggtgtggtgtgtgcacacgatgtgtgtgtgtgtgtgtgtacatagagtagagtaataaaagggatgagaactttactaaaaggcttgcagttgctggaaacctttctgtcccaccagcccttccctttctatgttcattggcaacgtctttgtgcttatgtgtgtatatttacatgatgctgtgggctttgtaagttctcacattgatctctcacgttaattcttgtttggtgatataaaagttcaaataaggtagagaattatatgccccatgttagaagaagagaaggaaatgagaaaagaagtctttgaaaagaagaacatacagcacattgttgactacattgtatttgaggagttatgatactcttgtgtgtgtgtgcgcgcgcgtgcgcgcatgtatgttgtgaaaaatctctagtctcaatgtcaggatcagggaaactgaggcaatactcagggatattatgagcatatatgttcttgtcattactagattgtatatggttaaaccattttcagtgtttcatgtgtaccatgaaaagttttaaggacaaaccattaacttatgtaatcacctttattacctggttatgtccctgcatggaacaaccaggttttgttgttatttggtttatgtctgtctgtctgtctctttgtctcagtctctgtgtgtgtgtgtgttacccatggaagccagaagaggattttggattccctgggactggagttgctattgtgaactgcctgctgtgggtgctgggaactaaatctagaccgagtgctcttaacctctgagccatttctccagtctccagatcagctcttttaacaacgcatgttcagatctcaggaactgatgccagcaatgataatataatcacagtccagcactaatccgtctttaaatgagtttctgtctcgtttctgagggctggaaatccacaattggtatctttggacccagtccgagtatcagctgggtcacacaccctcctgagggtaaagggacaagctcatgcctacctagcctccctgtcctggtggctcctagctttgctggcttattacctagggtcgcattgcggtctccttctctctctgtcgcgctcctaagaatatctgtaacatttagagttcatgcagaccatctatgataatctttctgtctcacagccctgacttcagtcagtcacttctgccaggtccccttttcatgtcatgtcatgtcatgtaatgcaatgtatcagggattagggcctggtatctctgggttggtggggaataatgtttagtctaatatagaaagtatttctttagggaaagtatatacttaagagtattaaaagacaagtatcacctacagtgatgtaatgtgaactaattatacactgtgctatttgctgtagagtattaatgaacattttaaactagtgcttgccctgctgagatggctcagtgggtaaagatgcctgccaccaagcctggaaacctaagtctgatctccaaggagacacgtggtagaagaaaaccccacgtaattcccatacattggcccctgacctccacacacatgttgtggcatgcttttgtacctgtgcacgcacacacaaacatacactacactaaataattaagaaaaagcccttatataaatacaaattatcttacagagatgggtatgatgtatactttaaaccagtggcaggtggatctctgagttcaaggccagcttggtttataagcaagttccaggatagccagaactacataatagacagacccagtttcaaaacccaaaccaaaacccaaagcaaaaaaaaaaattatcttatagaaaaatactagataagatcagagtcatatatggtcctaattttataaaaaatacatatattaatatgtatgtttatatccactgaaaaacataggtagagtatattttaagaatgcttattccggagataaattgttaaattgttttgaagaccaggcctcattgaacagatttgaaatcccagtgcttgtgagaccgaggcaggaggatccttgttagaggtcagactgggatatgcagtgagttctaggacagcccaagctacaaatcagctcttgtctcaaaagaccgtatggtcttaagtagatgaatagttttctcctttgaatattgttttttaaaaatgtatcttatttatttttactatttttaataggttacatgtatgtgtgggtgggtatttatgtatgaatttaggttcccaccaaagttagcggaggagaatgtgtcccctggaagctggaatcacagacggtttccagacagctgatattaactctgacaaccacacttgtgtcctttggaagaacaataagtgttcttcagcactgagctgtcttttcagccccttttcatattttaaatagaaatatctagaaacatacactccttttagagttgctttgttaggaagatgacaattgaaaaatgtttaactttttagatttctgggcatgactattttgcctacacatatgaatgtgtaccacggaggtgcccatggaggtgaggagagggcactgggactgggcttatggatggctgtgagccaccatatgtgttctggggagttgaaccttcatcctctgcaagaccaacaagggttcatcactaatgagccgtcccttcagcccctgtttttaaaatacccacatttctgatgaagagagagtgttgaaccagcctgagtaaaggcatttaagtacatggtgtttcataattgtaggaaggtagcaaaccttgaaatatcatcatcgtctagtttggagttcttaaatacagttgggcttccatgaaatttaaaatatattagatgtatttttcgtgtaactttgtgaatatttctaatattaggatttttaatacatgtgaccttacataatagcttttgcataatttgatttttttttaatccattgattgacctttgtttcccactatagtgacttacaaggagtaagaacgaacgccaaaagatctgggagtgattggattctcaatggaagcaaggtgtgtaaaaaagcaggcgtgggtaccagtgtctcagactacctcaacgactacatgtcccagatatgatcaatccgggaactaacacaggaggtctcaggagagtaagacatttatagattttatatggcagaatctgtagctacccccctatgtttcatgttgcttggccttctgcaaatactgcaaaggtgcttttagcttccaaatgactcctgacagacaaaaagaaagaaaaggttttgttgctccaaagtgagtcaaacaatggttaactttaagctgatgtggaattgggggaggtgtctctgagcactcacagtgtaagcgggaggcctggaacttggattatttcgcccatagagaaaggtgcacaccttggcccccagcactgaaggacgcagagacaagaggagcagtggggctactagcctaggtgaaaattgcaagcctcaggtttaaggagagatcctgccttaaagagcaaggtgaagagtgatagaggagggtaccttacacagatgtatataaacaaggaagtacattttgtaaaaagagattaagagggagctggagagatggcgcaacagttaagaatattggctgcttttctagaggacctaggttccgttgccagcacctacatggtggctcataactgcctgttaagtccatgcccgggaaatcggatgcactcttgtggcctctgtgggtgctgcatgcatatgcacagacatacatagaggcaaaatgaccatgtgcatacactaagatgaagaaacaagatgggaagaaaaagtttaaaacaaatatgagaaactttcaagaggtcttaagcgctagaagtgtggacgatgggattcaagaaccttccaggtctcctgagaatcagctaactgagagctcctcagatgggtgcagatggctcaagagtaaacatacccctgagaggaaatgctgcgggtgactagatagatgttaaggagagatgttcttttttaatacaaggactatttgtggatgagtgttcctgtttggttgttattattttgcctgtttctttgtttgaagcagggccttgctgtagaggccaggatagctttgaactcataaatctcctgggttctctgcctaagtgctggcagtacaaggatatacaactatgtcgtgttaagcttgttcaaattttaagaatattccaccttctttaagctaatgcttttatctttataaaatcaaataatattgagatactgtcaggttcctgaaaacctgattttcaaacttactttgtcagtgtctagtaacagtttcttctctgacatcagtaattcctatggagaacttctcattctttgatatgccagtgggcattatgaatctcttaagaattagagatagtatatcttgtatcctagaaattttccttttatagattgtcttgaatcactgacatcattcaaatcaactttaggaagcagttacctaagtgctgtgatatgcagactcagtggtaccatctgtacctggtctgtgcaggccctggtttcgatgttgaataaacaaagcagcttgtctgagcctggaattgacggtacattaggagtgcttagctcagtgtggaagactggcaagaattctagatgatgtgatacctgagcttagtccaaggtgcgtaggatttgcattgttagagttagaaggggcctccataggggcggaaacgtgattttcaaatacagatgggtctggaaggcactggaatgtgtgagacaagggcttcagtagagctgacccaagggcaggaaacagaggcaaaataggatgagagaagaggcaggaggggtgagctaccatctgtttgtgaggagtttttatgcctgctcaaagggttttgagtgtatcttgaagctagctgttgaaagatgttggggtgtgaccttggaaggatcacactgccgtatagagcagcccctctgggcagctgatggattatggatgcagttgttgtgagagctgtcttagatccttgtacgagccctgaggagagccgggaggggagttagtggcaatagtagaaggaagcagactggatcagtaaacgtgggccagaaagaacagcaccacgttgactgggaagcggatggcagcatagtttattaaagcacttgttgaagtagaggatatgttgacattcgtttttgggcaggagtatggggtgggacggacatgttctgcgagtgagtcactttgtggaatccagtaggtccagattgtatcaggcaatgtgggtgatctgggcatggaggcacacccttgtactctggaggctgaagcagagggattttaaactctaggccagcctgggctacagaagaggttcaggctatctgcttagtgagatcttgtctcataaaagaggagaagagacagcattggagtctcagggggtgactggaggatgactaagcctgacagttgcagtcgcctcaggcaaagtgcagagtgaagtgtcagttatgaactgctttggattatcagcccatttttcctgtttagcttgtcattctgccccatcccccaccaccctccaccacaacacttaaccatagcgctgtccttacttgggggattttgaaagaagtagtaggcaatctgtataaaatgaaaaacaaaaacagcctttttttttttcaaaatccaatcagtctaagagtttagtgccatttaaagcaaattcccttttcctgtctatagctccccactagaatccaacttaccaagtgaatgggcaatttggctttattttaaagacacagtctattagtttcttattactgctcatctcacgagtagtgggaaaactgtagacacttcagtactgaagcactggagattcctgctcttcattaatctcgcctatgcagcagctcccctgtgtgggcggagagatggggacgcttctggtgcctactctagtcttatgtgtgctccctgagtgtaagcgtgcacatagacccgaggattgcagagtatcacagtgcatctggatattcctgcaggtgttcatcactaatggctggttaagtgatctcgtgatcgtcgtggccgtcaccaaccgtgaagctcgatcgcctgcccatggcattagcctctttttggtggaaaatggaatgaaaggatttatcaagggccggaagctgcataagatgggaatgaaagctcaggtaagccatggtttgaatcagactcttatccagaaagtagatacgcagagttgttcatggcgtcttcctgagcagagtgcaggtatgttctcagaaacagcaagggagacttcctttcagtcacgctgctgtctctgtcatactcaggaatgggaaggaaccagggtgtctgaatatctgctttagaaatgggaaagttagctgtattgtaataagtcacctgtttgtgaaatttagaagattgtgaggtaatagcagtatttgttagatattatcagagagcatgtgaggtaatagcagtatttgttagatattatcagagagcgtgtgaggtaatagcagtatttgttagatattatcagcgaacatgtgaggtaatagcagtatttgttagatgttatcagagagcgtgtgaggtaatagcagtatttgttagatattatcagagagcgtgtgaggtaatagcagtatttgttagatattatcagcgaacatgtgaggtaatagcagtatttgttagatgttatcagagagcgtgtgaggtaatagcagtatttgttagatattatcagcgaacatgtgaggtaatagcagtatttgttagatgttatcagagagtgtgtgaggtaatagcagtatttgttagatgttatcagagagcatgttttgcttagtgtgttagaaattctaacctcccagtacctagagaaccggagagtgtcaaaacctgaatgactgtgcattgcaccaggaaagccaccattgtggaatgagatagatttagataaaacttcctggcttattacttatgacttaatgttcaggctccaagtccactccagtttatctcttggttcttcattggaagttaaaaaacgctacggggctactgggaaagggatgcgctcattctctgcttgattcccatttctcaggacacagcagaactattctttgaagatgtccgattgccagctaatgccttacttggagaagagaataaaggcttctactacctcatgcaagagctcccacaggtattaaatgcctaggataccgtttctgtctgggttacatgcgtccggttagatactgagcagaagtagactatagagctgtataaaaagatacacacatgtcaagcttgtgctacaatgatcatctgagtatagtataaagttgcatataaagaaatatcactgttaggcagatgctcacagccattgaactggtcacggggtctccaatggaggagttagagaaagaattgaaggagctgaagggatttgcaaccccacagaaggaacaacaatatcaaccaaccagaccctccagagctcccagggactaaaccaccaaccaaagagtgcacatggagggacccatggctccagctgcatatgttgcagagtttggccttgtagagcatataaatgagaggagaggcccttggtcctgtgaaggcttgatgccccagtgtgggggaatacaagggtggggaggtgggagggggtgnnnnnnnnnnnnnnnnnnnnnnnnnnnnnnnnnnnnnnnnnnnnnnnnnnnnnnnnnnnnnnnnnnnnnnnnggggctgggaagtggggactgggaaagggacatagcatttgaaatgtatttgaaataaagaaaacatccaattaaaaaaaacaaaagaagaagaagtatcccctattaacaggccagataagaaagtagctgaactccgaaggacccaaccaagcagaaggacaataggtttccagggctcctcagaatgacctcggctttaatggagaacttttaactctttgtaaagagcatccctgggaacgtttggcaggttgtaaataactgcaaagggaagaaggtgttaaccagaaagcttcttcacaccacagtcatccagtcagtcctctggggccagcattgcctaatcatgcaggcatacagactgctgctatacgtatgtgcttgccttttgcctggcagcagctatggctcagtggttaggtagaattcagaaatcgccagcgtggtgaaatccggtgactaccaccgctagtttacaccagtcggtaaaatttgaactgtgtgctggaggatgtagcatctgtgaggttgacagtgtggttacaaaccaagccccttaggtagcacggttcttagatatgttccgataaccacagatgtctgtgggagccttttcttagcactaagaggtaagttaaaagttagtctttggaagtttattataaaaaatatttataggacgtcttgaagtggcataaaagaggttcatgtaataatgcttaccacttaatttggggggttctaggaaaggctcttaattgctgagttggcgatttctgcctgtgagttcatgtttgaagaaaccaggaactacgtgaagcaaagaaaagcttttgggaaaacagttgcacacatacaggtacatttgtctttgcatctggctgtttatcaagttagtcatctcagttgaggcagggtgaaatgataattaacggtaatttgatgccaggggtgttagaaacttaaaagtgggtaagattgggaaagggagagcagagtggaaatgctaagatgaagagggccaggccagagtcctgaagacactggaaggcctgaggcgacatagagaaggtctacaagaaggcagatccagagaggctcatcacagaagccaacagggaagacttcagtaggtgggtgtggcatccaatttggactcttagtctccatgcagttaccacgttaagggaaaggtagagtgtggaacatcgagggcgtgctgcggcatcgtagccaagtgcagcttctgtcctaacatagctcctgaaacctgcatagtctaggcatactctgtcttctggcagaaagagttcctgtttgtaaatcgcaaaactgctaagtcttaatgtttgaaattctattttggaaagagataggaaaaggaaaataaaatgtctttttcttcaatgtcttcaaactgtgtagttcctagggttgagtacgacactaactaacagtaagattagatagagtagatatatagagggtgggtttttttttatagctaaatcataatatatgctgatgacaattcacggttttgctaaccgttccaaggtgtcttcaagtcctgaagttccaagatacgtgtcaatccttgcttaattgttctttttattagatatttccctttatttacatttcaaatgttatcccctttcctggcttcccctacaaaaatcccctatcccctcccccatccccctgctcaccatcccacccattcccattcctggccctggcattcccctatactggggcacttaattgtttttaaaattacatcttaattccttaattctcttcctcccttccctctcccacttcttctccctccctccttctcccccctcccccccccccccgtggatgtgtaggggtatgcacacccatggcaagtgtgtggatgccagagaacaacttgtggaagttgattctccttccacatgtgggtcttaggggttgaacttcaagtcatcaggcttgtcagatagtgtccttacctgctgggcatctacccattcaggaggattttagtaaattcacgcagtcacttacgttctctctctgtctctgtctctgtctctctctctctctgcgtgtgtgtctaagttcacttagttatttacaaatatttctctctgtgtgtgtttgtgtgtgtgtataagaaacagacagactctctgcatgtgtgtgtatgtataagagagagagacagagacagagagagagagagagagacagagacaaagacagagacagagacagagacagagacagagacagacagatacagacacaggctcatagagtatagactgaccttggactcctgactctttacctctgcctctcaagtgctggaatttcagttcgtgccactgtgggtggctttctccctaaattcgaactgcagtttttactgttcgcacagatatcagtaaccattaaagatacttctgtgagcatgtcgatcattcatgaaaagcatgctaccagtatcaggtggtgctttcagaaagcctgatgctgtctgtggtgaggcacaaaggctaattctgttccctagcccctggttcggtgccaagaatatgtaaatatttaatctttttatcttcagacagtaaattatgtactcttgacggcatttgttattcttagccctctgggcctactggatgtgtaagaattttaagtgagcccatgctggtctgcattttaacttttaacttcagctttagaagcaccaactatttatatagaatagctttcctatgagagagatcttgatccttacatattctaatagtatataaatcctcacatgtaatatcacataaggcaacaattcttgagaattgtctgatactctcaccttacccccagatttacccctcatattaaatgctatgtaatgtcctggaataaagacttagaagtcaggctccagggttttctatgtctatagaaagttagttaaaccagtctcctttatagttttctctttgtaaacttgagtaaggtggaagtgaggaactttatgctgatgaaaaggtagagatttggccaaaggaaatatagatctagtagaaaaggacatagaaaaaaaaatggacatgccagcatgctccaaatcagaggcctggatgctcaggcaaggttgggtgtgaccagcctctccactgcttggtgtcagaatcattagatggcagttacactttttagaagagagaaaggcaaaaccacaagacactgcctccactcccgagagagggtttttttttttttttttttttttggggtagccttgattgtcctggaactggctctgtagacaaggctggcctagagctcacagaggtctgcctgcctttgcctcctgagtgctgggattcaaagtgtgcatcacccagcttgaggacgggacaggcgggagatcaatcaggagcagccagaatggtctaaatagagtgctgtccaagctcaccgttggctatctactgcagcaggagaggacatagttattacgtaataataatacatagttattaacacttacaaagaagaccactccgagcgagttggaggctgcatgagagggatgggagacactgtaggttactggatggagtagggtctctgcctagtctgtttccattgttaaaactgtgataattagataataaatatnnnnnnnnnnnnnnnnnnnnnnnnnnnnnnnnnnnnnnnnnnnnnnnnnnnnnnnnnnnnnnnnnnnnnnnnnnnnnnnnnnnnnnnnnnnnnnnnnnnnnnnnnnnnnnnnnnnnnnnnnnnnnnnnnnnnnnnnnnnnnnnnnnnnnnnnnnngaaataaatatccttaatgtcatgaatgcagaggaaatcctgtttaacctccagaggaaaactgggtgttctggcagctcctgccacgagagtggcgctcacacattaaatcatgatgtttaagcagtttccttaaactgtgacaggtattttttacctagtgtatatcattttgctaagattcagggttgtttgtttttgtttttgttttcatttcagttcatgtatgcccttttatcggaacccaccacacacacacacacacacacagtttcactttcgttttgctttagaatttttttattatgtaagcattagaggtgctgagtggaaacctgaacttttaccgtgctccccacccctccctttgtctcaagacggtgcagcataaactagcagaattaaagacacacatatgtgtcaccagagcttttgtggacagctgcctgcagttgcatgaaaccaaacgtctggactccggttccgcttccatggcaaaatactggtacgtgcattcctatagttaaagtgcagtgtttggtccagattaccgtggggtcctgccagcctttaaaggcaaccttgaaggcattaaaaggaagaagtccgaacgtgaaaatagcagtaaaaaattaaaaaaaaaattttttttgaaagttccattgggtctgtttataatatccttaacattactccagttggtatgtaacttttaacttgttattaagagtaaaatattgagagcctgaagcaggatcagtgagtactgtacttcattcaagtaatgagtttaattttagattatctaaagaatggcagaaaagcaaggcagaaagaatagaaggataaaacttgggagtctcataggcgagtcccagtccattcagtaggtcagactaaatttaattctctagtgacaactttggatagaatgtgaggtgttttccagatctaagagaaacaccaacgtatggactgtcaggcaaaagtcccattgggtttagaaaaatttacatttgaattaaaggtcactaacaatgggttaatggcgagcttgagagtgcaggacccctgttaagttttttttatgtgttttaagacgcaaatatggttcaaatcatatgtggaatggaattgttttttcttaaagaagaaaaaaacactcatctcactaactcagaagcagactagaaaaatcccctttgttatttattaactcaggttcagtctagtcattgctatacaagggaaatatgcagaatggtgttttgtgtaatgattttataattagatgatgagattaaaaaggaatgtgaaattagcacgacccttcaccttggggcatggaggggggtgtgtcttacatttatgaaaagttcttcggcttacaggaaaaggtattttaggaagagcattttgcatagttaatgcccttgctctcatccaggcttatgggtgtaatggtgctgaatgttaaaaggtcgtttaaattgttgagtggtgagaaagcttttttgaggcaaggtttcatttgtcaaggctggcctgctattcactgtgtagcaaaggctagccttgaacttctcatccttctgccactatctaagtgttgtgttatatgcatgcattggcacctcaggtttgcgcgacaggggtttgttcaactaaggcttttaagtactgtaccaactgaactgcctttctttctctgcttattattttgatcatttagggcatctgaattacaaaacagtgtagcttatgaatgtgttcaactccacggaggctgggggtacatgtgggagtacccgattgcaaagtaagtatggcgggcgcttctacagcactttcctttcctttccttctttctgtttttctttcttcttctggtttttttttttgtttgtttgtttttttgtttttttttttttgtctgtttgtttgttttgggttttttttgagataggatttttttttccatttattttccatcccagttatagcgccctctccttccttttctcccagtctcaccctgagaaatccctccccccattaacaccttactctctgaggagaaggggagggcccctacacacccctaggtaccacttcaccctgggacatcaggttgcagcaggactaaccacattttctcccatcgaggcccaaccaggtagttcagctaggggaaggggatccagtggcaggcaacagggtcagagactacccctagccccacttcagtgtcaggggacccacatgatgaccaagctgcacatctgctacaaatgtataggcctaggtccagcccgtgctgtttggttggtggttcaggctctgtgagcacctatgggcccaggttacttgattcttcttgtggtgttctaaacccctccagctcgctcactcctatccccagctcttacacatgactccttgagctctgcctgatgtttagttgtgggcctctgcatctgtttctgtcagctgctgggtgaagcctctcaggagacagttatgccaggctcctgtctttctgggtctgtgttaccatactcggtaaccatctagttccatctatttgcctgcagatttcatgatgactttatttcagtggttgaggagtactccattgtgtagatgaaccacattctctgtatccattcttctgttgagagtcatctgggttgtttccagcttccggctattatgaataaagctgctatgaacatagttgagcaagtgtctttgtggtatggtgggacatcttttggcatatgcccaggagtggtatagctgggtcttcaggtagaactattcctaaatttctgagaaaatgcccaattgatttgcaaagtggttagactagtttgcactgccaccagcaatggaggagtgttccctcacctccacatcttcgccagcatatgctgtcacttgagtttgtgatcttactttgtaatcctgtctgaccaggctggcctgagagtcacagagatctacctgtctctgcctcaggacagggattaatggtgtgtatgtaccgccatattcagcgtatgatgctcgatctgtctgtctgtctgtctctctctcccttcctcctccctcccttccttccttaattatattttatgtgattttttaaaaattaaaaatggaatgtttttcatacagtatgttctgattatggttccctctgtcctaactactcctaggttctccccacctccccacccacccagatgcacgactctttcttcctctttctccatctccttaccttgatgcttttcttgttttggtttgatttggtttggtttttcgagacagggtttctctgtgtagccctggctgtcctggaactcactctgtagaccaggctggctttgaactcagaaatccacctgcctctgcctcccaagtgctgggattaaaggcgtgcgccaccaccactcggcaagatagaccatttttaaaaaattaattccttcatttcttcctattctctctctcttactctctctttgaattacttttttttttactggtgtggtaagattccctgacaaaagcaatggaagggagacacgtgtttcctttggctgccggttggaggctaaagcccatcagagtgggttgttctggctgcaggagcttgcagtttggacctgcagttcagaagcagagtgtgaaggatgcggctgctcagccgatggctgccgttctatgcagtccaggacccaagcctaagtagtgccacctaactttggagtgagtctcctacctcagttaacccaaacaagacaatttacaggtgtgcccctaggctaacctaatctacattactcttcattattatacctggaagtttgtgcctttgatgtttccagatgttgtcaagttaataatcagaactggccattgtaggaactgaactcagggctgtgcatgtgttaggcaagcaatttgccactggccactatctctagctacttaaacaaacaaacaaacaaacaaacaaacaaacaaacagaaaaagcaatacagaaggtccacttacatagtagaagaattaacataccatgccttaagtaattattttgcttgaaaaatataaaaggtttttttttctgaatggaatttttattatgcttctttttattgggttacacataaatttcctcagatcaaacagtgacagctacagctgcagtgtcttccatacgtctccctcttcatcagcccttctcagattcttgcctctctttcacgtttttcttataatcgtagaacgtatttttcctcttacttaacagtctattcaacttaggaaaattgcccaaggaagtttttgacgactactcatacacacccactttagttctgaatctgcaagtaggattgctataggcttccaaagacgttccgcatttgttacctgggtgctttgtgtagttaggaaaactatcaagaacataaacactgttagcctgacagcgtttgaattcctcatcccagcaagcctagctagagctgttccctgtacttctaatcctttttatggaacataaggtattttttttttttattgccgtttcattaagaacagaagttcctgtgtgggtacaacctgctaattctatagttaccacacagcttaaaagctttagttactggatagctataatttatagtttcataaaactcaccatcaatcaagtgtttttctctttttgagagaatataagcgtgaaattgattttttttccaaataaatcatttgacttagacttccagagctacttcaagcagaccttactcacaagcagagcttccttttaaaatcctgtgtagtcatgaaatacagctgtgtttttgaattatgctagcccaaaggttaccatcactggaatttttcccgtgcatttttttgtttttgaagtgctcatccatcttataaaagggctttggaagcgaaatggtaatggatgtttatatctgtgtgtgcaagctcttgtaacaactccttctgggaacagaggcatgtgtggcttcgtttacgttctcagaaaggcatgctaagtcgaggggtccactaccctgggatgaggttagcgtgtcccatagcagcagtgcctgctttcttagagtcccttgcttctaaataagcaagataacttgtggattgatcattataatttctgctttcagctcaggagacttgaactcctttaaataataatagccactcttggctgggttgccagttcaaagagtatgtgaatctttatccagacagctctttctgtccccaaagatgttggaaatcctgatatcacaaaagctagttacctattagacagtatgtgcctacagtgtacagactttgatttaaagaaatcatccaacttttgattcttacatctgccccaggtttagctacatcattagtgtagggatgggtagggggagaaagagatagagaactgattgaggcaggagctttgtagggtttaaaaagttgtcttgttcccctttagaacttttagatagttacttcctggcacgtgagctgatcttagttttaggcgttaggtttagctttagacccttggagatctcttagccattctaggcggagagaagctgggacagagaacttcactgcagttaaacatttctctcctgcttctctctgttaatgttagtagagtaaatttaattagtaacttatgaaaggcctgctggtctgccattacatatcctggtagaactactttaatgtaaaaaagaaatgcccagccagttaaaaaatgtctgaagtcttgggattgtccaggtaggctggagtgccaggcaggtcttcagaagatgcgagtgcttggttttgtagagaacaaaatcttcctggggctgggggcagggtttacgtatttcaaaacgtacttagagtcccccccccccattcatcgaataggtaaatattcagtgaggacccacttatctgcaaggcaccccgggaaatgtggaaaagtgtaagttcaacgttagtcatattctgagaaacaagcatattttatctcagaaattaaataattagagccccactcatatatttgagaacgggctgtacattttccttccatgaaaagtctggagctcaataactagtttcacaggactgggacaatgaaagtattgtgacctaataaaagtttgcttgccaaagaggcaagacacctacattcttgttccagcctgacggttatctgttatgtcaccagaaaagggtgatcattaattagcaactacatcagcctctctctgttttttttgttttttgttttttttttttaaacctgcaaagcagtaatatttatccctctggattctagagggccgaagagaaaggagaaagggtgaaagatacattggctactcctacagctgtcaaagcgaggcctgggctgggggtgtggtgcggtgggggagcgctctcccatcaagaccctgaactcagttcctgtgttagtcagacttctctcccagcatcggaagacagaggagtgaagtcctggctgagtgctagtgtctgtgtgtctctgagggctcagtcccttaggatttgaatcccagctgtgacatttcccccagaataggctatttgttaactttgggggcggggggagaagtaactttttaaaacattaggtggtggttgtagagatggaatgagaaggaatgtctagaaataagtaatttattattttaacccctaaggtcagtggctttcaactttctggggcgactaaaagagaagacactaagatgttccaggcataactaaatgtagatgttttcagtcgctgtttgttgtataagttcagctttacaaagctatgtcagggcacctaagcgttattctgaatgtaatgtctcagtggcttttactgtatcaacctagtatgaatgctgtccatgaaaagtcagttatttataagaggctcctattgctcagagttccttaaccaatagttatctggaaagatggggcttaaagtttctaccatttctatatgaattacactatcttctaatttatctagagcttacgtggatgctcgggtgcagccgatctacggtggtaccaacgaaataatgaaagagctgatcgcaagacagatcgtcagtgacagctagacatctgcctacatcctggaatcctattacatgcagctaatgcggattctaatctacttgagataaagtgtaacctggaaaagggggggaaatggtaaagctggttttatgtatgattgttacagagaaagaaataaaatagaattctaaagattaacacaggaagagagaaatttttgagcccaagagtctaaagttttgtcatgaaaggtataacctttttttatgcatatacagtgaatataaaagattttctaactcaagagccttttaatgtcttacttgtctttcaaattctgaagagcataagttggctttcattcttaaagttgaggcagaatttaacattaataatacttataagactttggaaaggtcaaataattgtaacttatatgaagtcatttcagctactttttgctccatattcccccaggacattggttcccaccatgttacccccaaccccatgtttttttaagtaatgaacagaacccttcagaaaaaaatggaccgtactgtatataatgcacatagaggcaattgtgtatcaatattaaaaataaagtaaaacttaaagcatgtgtagaccgtgtgaggccctggggaatgagaacgtgttctggtgggagactgctatgttcttaagcaggcatgtgggctttcagcacattccattcccacttaatttaaataggagaactcagtactccatcatctttaaattcaatgtttggtaggtatcaaagccaaggctttttttttttttcagcagtgtgacatatttatatttaataaatactatgcatcttctata

SEQ ID NO: 142 - DNA, 2153 bp, Mus Musculus
gccgcggagcccgccagtcccgtccgccgccgtccatcccgccatggctgcgcgcctgctcctccgctccctgcgcgtcctgagcgcccgctcggcgccacgcccgctgccctccgcccgatgttctcattctggagcagaagcgcgtctagaaactccttctgctaaaaaattaactgacgttggaatcaggagaatcttttcctcggagcatgacattttccgggagagtgtaaggaagtttttccaagaagaagtgattcctcaccacacagaatgggagaaagctggagaagtgagtagagaggtctgggaaaaagctggcaagcagggcttgcttggcatcaacatcgcagagaaacatggcggcattggtggggacttgctctcaacagcagttacttgggaagagcaagcgtactccaattgcacaggccctggcttcagcctccactcagatattgtcatgccctatattgcgaattacggcacaaaagaacagatcgagaagttcatcccccagatgacggcgggcaagtgtatcggtgccatagccatgacagagcctggggctggaagtgacttacaaggagtaagaacgaacgccaaaagatctgggagtgattggattctcaatggaagcaaggtgttcatcactaatggctggttaagtgatctcgtgatcgtcgtggccgtcaccaaccgtgaagctcgatcgcctgcccatggcattagcctctttttggtggaaaatggaatgaaaggatttatcaagggccggaagctgcataagatgggaatgaaagctcaggacacagcagaactattctttgaagatgtccgattgccagctaatgccttacttggagaagagaataaaggcttctactacctcatgcaagagctcccacaggaaaggctcttaattgctgagttggcgatttctgcctgtgagttcatgtttgaagaaaccaggaactacgtgaagcaaagaaaagcttttgggaaaacagttgcacacatacagacggtgcagcataaactagcagaattaaagacacacatatgtgtcaccagagcttttgtggacagctgcctgcagttgcatgaaaccaaacgtctggactccggttccgcttccatggcaaaatactgggcatctgaattacaaaacagtgtagcttatgaatgtgttcaactccacggaggctgggggtacatgtgggagtacccgattgcaaaagcttacgtggatgctcgggtgcagccgatctacggtggtaccaacgaaataatgaaagagctgatcgcaagacagatcgtcagtgacagctagacatctgcctacatcctggaatcctattacatgcagctaatgcggattctaatctacttgagataaagtgtaacctggaaaagggggggaaatggtaaagctggttttatgtatgattgttacagagaaagaaataaaatagaattctaaagattaacacaggaagagagaaatttttgagcccaagagtctaaagttttgtcatgaaaggtataacctttttttatgcatatacagtgaatataaaagattttctaactcaagagccttttaatgtcttacttgtctttcaaattctgaagagcataagttggctttcattcttaaagttgaggcagaatttaacattaataatacttataagactttggaaaggtcaaataattgtaacttatatgaagtcatttcagctactttttgctccatattcccccaggacattggttcccaccatgttacccccaaccccatgtttttttaagtaatgaacagaacccttcagaaaaaaatggaccgtactgtatataatgcacatagaggcaattgtgtatcaatattaaaaataaagtaaaacttaaagcatgtgtagaccgtgtgaggccctggggaatgagaacgtgttctggtgggagactgctatgttcttaagcaggcatgtgggctttcagcacattccattcccacttaatttaaataggagaactcagtactccatcatctttaaattcaatgtttggtaggtatcaaagccaaggctttttttttttttcagcagtgtgacatatttatatttaataaatactatgcatcttctata

SEQ ID NO: 143 - protein, 430 aa, Mus Musculus
MAARLLLRSLRVLSARSAPRPLPSARCSHSGAEARLETPSAKKLTDVGIRRIFSSEHDIFRESVRKFFQEEVIPHHTEWEKAGEVSREVWEKAGKQGLLGINIAEKHGGIGGDLLSTAVTWEEQAYSNCTGPGFSLHSDIVMPYIANYGTKEQIEKFIPQMTAGKCIGAIAMTEPGAGSDLQGVRTNAKRSGSDWILNGSKVFITNGWLSDLVIVVAVTNREARSPAHGISLFLVENGMKGFIKGRKLHKMGMKAQDTAELFFEDVRLPANALLGEENKGFYYLMQELPQERLLIAELAISACEFMFEETRNYVKQRKAFGKTVAHIQTVQHKLAELKTHICVTRAFVDSCLQLHETKRLDSGSASMAKYWASELQNSVAYECVQLHGGWGYMWEYPIAKAYVDARVQPIYGGTNEIMKELIARQIVSDS

SEQ ID NO: 144 - DNA, 37513 bp, Homo Sapiens
cgaccagcctgtggcgtggttggggctccggaagggcgcgcgcgagcgcttttttgggaggacaccacaggtggacgcctcagctgatcgtcctccctcccggggaccctgccccgagtcgccgagtagccgcagagtcgcctccgtcgccccgccgcccctgtgtttcggacatggccgcacgccttctccgagggtccctacgcgtcctgggcggccaccgtgcgccgcgccagctgcccgccgcgcggtgagtgccagccgggacttccgcggctgcaggccgggaggctgtggggtggggcagcgagtcactcctgtcgctggcttgaagcagggcggtgcgcgcgcggctgggagtgctccccaactccggcgccgggctagagctggcctcctttcctggatcccgcggactgggtgcaaccagcatctgggcggaggaaaaaggggtgtcagccgtgccgccccgagaacagaccgccgagcccacgtcggggaaagccgaaagatttctccagaagttcattccggagccccaatccaacccgtctagttcagcggcctgcagtgggacccgggagcctgcgttttgggaggaggtggtcaccccctgggcccggctgcaggagcgcgggctgcgatctgtgtcccagttcgagctgtgaacccggcgttccccacggcttagactcgccgcgcggtagtgaacttgggacccggactcagtgcccgggctgcggcgcggaccagaattgtccaggacaaactgggctagaaatgacctggcgagggttccatcaaacaaggaaattagctttagatatatcaacaaatctaactaaatacagaggattaatgaagacagagtctaagtagttcagtgactactaaggtggtgtttataatatgatcaaaagtttcagatactgtctgatgcataaaatctattcactgggtaaacaaattggaagcatggagaattcattatttaataagggtgaaggaactggcaaatttgcgaatgacagcattggtgtaagctactctaattttatttgagagctatgaaacaaaatgcctacttttcctggggagatttgggaagacgtcactgagaaggtgacttttctttaggatacatacttaactcttccttggaacattataagacagtgatcctcaaacttttttttttttttttttttttttgagacagagtctcactctgtcgcccaggctggagtgcagtggcgcgatcttggctcactgctgcaacctccgcctcccgtgttcaagcaattctcctgcctcagctttcctgagtagctgggactacaggcacgcaccaccacacccggctgatctttttagtagagacgggggtttcaccatattgaccaggctgggctcaaactcctgacctcgtgatctgcccgcctcggtctcccaaagtgctgcctcaaaactttttgataacagggctcccttatgctcttaaacaggacctcaaaggacttttgtttatgtaggttatatctatccgtctgtcgttatcgaaaggtatctacataactgagaaactttacagatatttagtttatttaaaagttacaataagaagctcattacatgttaacataaataacagtttttatgaaaaataacttttcctaaacagaaaaaaagtgaaaagagtgacattgttttacatttttacaactcccttaatgtctggcataatagaagataaccagataactatatctgcttctgttttatccattggcgtaagttagtttgattgaagcatggcaagaaaatctaccctcaaatagagaacactggaaaaagggagacctgagagaccctctgaatgggctggggggctacagttttgttgtaacagcttttttacctttaatgtgcaaaggaatcacctgggaatcttgttaaaatacagcttctgattcagtgggtctgggatggggcctgagattgtgtatttataaccagcttctaggtgtgtggaaggtgctggtggagattgtctcccttttaaaatgtaggagactttaaaaaaacaataatagcctagccaataagattagttgcagtttattgccttagagaaaaaaatgccaatttttccattacagatttcttcatctttagactgagaaatacatgttgcaataaacttgctgccaagtgttttgattttcttccctctgcatattctctcttgaccacctttgactgacctgaaagtctttattcgtttggcatttcttttgctttcctatgtctttatatattttacttaaaaatattgcagagatttccttaacacagtacaggctattcaattttaagatccagtaagactcgattttaaattctggctctattgtttactcattatgttgacaaatgattcggtgtcttacagccccagtttcctaatctcagcatatttttttcctgagggaaactctcaagtatggaaaatctatatggacaaatacgtgctttataattttatctctactagcaagaaaaaggagccgatcatttccattatagggataaagtagatgttagtttatttgatgcaacaggacaatggtcaaggtcccctgcatgtcctggtcccctgttatctcttcttcctagaatctctggcctcatctactcttctcagcccactctggctacaattgcctccttgctctttctagaacacatcagacaccattcagacatacagcctttgctctagttgttcttttgtcctaaaattcttttattctagaggtatgcctggctaactctatcaccttcaagggtttgctcaaatctcacctttctggtttaacctaccctgactgcagcacttttttttcttttccttttttttttttttttgtttgtttgtttgtttttagtgacaaggctcactatgttgcccagactggtttcaaactcctcagctcaagcaatcctcaggcctcggcctcccaaagtgctgggattacaggtgtgagccaccaagccccgcctactacattatttcatacggcaacctctgtctctgcctccccccaggcacatactcctgatcccttctctacttttctttctccataatacttaccaccttctaaggtattatacaatttgcatatttatagtttattgtttattcagtttccctttgttagaatgtaagcttaaaagccaagatctttgtcctcatcttagtcctttgttcgttattgtatcccaagttactagaacagtgcctggcacagaattggcactcagtaaatatttgctaactaaatgaatgaataagccacaaaaaaaatgatacttagggaaaacttagaaataggttgtaatagcgactgggcacaatagctcatgcctgtagtctcagccctttggaagctgagatgggtgtatcacttgaggtcaggagttcaaaaccaacctggtcaacatggtgaaaccccgtctctactaaaaatacaaaacttagctgggtatgtgtggcaggcgcctgcaatctcagctactacagaggctgaggcagaagaatggcttgaaccgggaaggcgaaggttgcagtgagccaagattgcatcactgcattccagcctgggcgacagagccagactccatctcaaacaaaaaaaaaaaaaaaggaaagaaacatgtaatagtaaaaagttatttttttaaaaaccctttaagtctactttgattaattacatgaaatagatcttttctggataaggactagaaaagaaaaggcagagtccaactaaggaagaaatacactaaattagaatttaatgcaaaatagaaaaagcatcctttggcaagatttgaatatatgataagttttttagatgtgaacttgaaaatgtacaaaatgatgcatagattttcaaaatttctttcaggggtacttcaagggtaaaaaaggctgaagaccactgaactaaaggagctacaaaactgtctcatttgaagcttggtgtgggagggatgggagtaggtcttaaataattccattttacagaatctttatcagagattgatgggtatttttatctccacccagattggctttgtaatgtggcgattacatcaacatggtttgcatcttatacacctgcaatttgaaattgtgtgattctggttaaaatactaattttggaggctttgcattattttaaacattgtatatgatatgaaaatttatcagtattactctaccgtactatttgaattttacataatgtgatccatatgtcacctgacaatactacatttcacctcaagtcagacctgtggttagttctaggcatcatcttctttaaggatttggagatggagaccgagttgaataatgataaggtacttcttaattccagctacatgaggtagatcccatcaaaagtggtggcgcccaaatttgaacccagctttgtcataattcaaactctttctacttgcctctcaagtttctctgtgaaagaaatccatgttgttcagtggcactaatttggatatgaagagtaacaattcacttacttttcctattgcatatatatatttttaagatgttctcattccggaggggaagaacgtctagaaactccttctgctaaaaaattaacagatataggaattcgaagaatcttttctccagagcatgacattttccggaaaagtgtaaggaagtttttccaagaagaagtgattcctcatcactcagagtaagtggcacattttcctctaatgtaatgtatactaggggtattataggaccatttcctagaatgccatatattgctatacagaaaacatagtatgttcagggctttattaacatttttactgctcttcactgtagtactataagatcccaggattcttagagctttttaaatgaattttaaaatgtactatacacaaataagaaaatttgaaaatttacaacttagtctaagagtagtgtttttgaaaaccatgggtaagtggtaacaaaatactagtcaatttcatagtctttctttttctgcttcatgaattaattaaactgtaaaaacccaaaaagtcagcacaatgcaaaccttggtaagcaattggttacctctggatagttcttgattaactaattattattattttattgaccagaaacttatctatttctattacaataagattttgcttcatttccaaaattcactcaatgctagtacagatgctcctcaatttagtatggggttacaagttgaaaatatcataagtcaaaaatgcattgttattatgttaacactgttactatgttattataaaaacaaaaaaattctcggcaccgttattatgttagaagcagaaattagaagattagtaaaatgaagagagaaatggttcaggaacatcataggtttgtgaggttttacacacctagcctactaaaccccatagtttaggccagcctacattaaacatgctcaaaacaattacataagcctacagttaggcaaaatcatctaacacaatgtctactttgtagtaaagtattaaataactcatgtaatatattaaatatatttaatatatgttaaagtgaaaaacaaaatggttatatggatacttgaagtaagcatgttttcgactgaatgtgtattgcttttgcaccatcataagtaaaaaaattgtaagttgaactgtcataaagtacagagacatccgtactttaaaacatttagaatggtttttaaatagcattaaaagtaacttccattaggtttttactaataccttcttggtaagaatgaccaaaataagctaaactcagaagccagaagccatgactagtcttcggtgaaaagcaactagcttctgttttttgaggacttgtttgtttgtttgtgtgtttgtgtgttttttaagacatggtctcactctgttgccaaggctggagtgcaggggcatgatcatagctcactgcagccttgaacttctgggctcaagcgatcctcctgccttagcctcccaaagtgctgggattacaggtgtgaaccaccacatcgggcttcaactagcttcttaaagacaaaagagacattgtacactttgctctggtaggatctcttgtttatttctcactgcttttaaattttattccagaaaaaatgttaagaaggctttgaaataaaataataggagctgacaaattttaagtcaataataaaaatatttccaaagctactttaagcaagaactgtattcaaaacacacatgataatccaagtcttaaaaatttttgtagtgtcagtatcttcaaataccccatatctcactataatccacttaaaaatacaaaaattctcagatattttttcactatctccaactagccatctgtttcctcattctgccattctcatttttaaagaagaaaagctgaggttgcctaccttacacaaatatctaattttttcagaagttaatttgatatagagccatggtgtaaggtgcttctgctctcctgttcttcctatttaaactgtaatgaggttccctactttgtcagcttttgtatgcttgtaccataagttcagcactttaaggaaatatgccaaggagaattgccttttacaatacaggttaggcaaattcccatgacaacatgccataactaagcttgtatgtaagagtacctgctgagcaaaactacatcaatgaatatcagtgggtataattttcaagtccaataaatagtcaagatgggggaagacaatggcaaatataaataagaggagagggctgggtgcagtggctcatacctgtaatcctagcgctttgggaggctaaggtttgaggactgcttgaggccaagagttcacgaccagcatgggcaacataataagaccccgtctctacaaaaaaaaatttttttttaattagcctggccttgtggcaggtacctgaagtcttagctgctcaagaggctgaggtgggaggattgcttgaacccaggattttgaggctgcagtgatccatgattgtgccactgcacaccagcctgggtgacagtcctgtctcaaaaaaaaaaaaaaaaaaaagcagaaaaaaggaggaacagaagtgataaaagagtcagaggcaaatagaagcatatggctaatgtaaataactacctttaagaatgcatttctacacaaaatcattcataagttcaaagttgtggccatttaaataatatttaaaaattatctgaatttaaaatatttgttatttgcagatgggagaaagctggagaagtaagtagggaggtttgggaaaaagctggaaaacaaggactgcttggtgtcaatattgcagagcatcttggtggaattggaggggatctgtactccgcagctattgtctgggaggagcagtaagtatggagacttttaaggttgagtcttgttttgtaaacacaccactcacctttctgaaatgaccaaacaaacaaacaaacaaacaaatgttttctaatcttggaagattgaaaattcagtgtaaaatgtaaaagattataccgctcatgcactcttgcacattttttgaatgtgggataataagaaaatccttttaagttgctgaaataggtgctattgaaaattaaagagatagtttttttttcctgtcaatgcttatggttacttttcccccttagaaaagatatttgaaagagaacagcagagtagaaatatacttccatcaaatatattagaaatttaatatacaagaacaaataaagattgcagttgaaaaatgggcaaagaatttgaagcaataattcatcaaaaaagaaatgcaaatatgtttttttaaatgagaaaagttcatccttagtaacaatcaaatgcaaattaaactgatctggaagtatcattttgagcatctataaaattagtgaaaatgaaaaatcctaatacccagtgctgacaagattgcagtgaaagtgacatacactattggtggcattataaattagaacaataaattttggggggattaaaaaggtgaaaacatattttaaaaaatatgttcctgctctttgacatagaatgccactttggggaatttatcctaaggaaataatttaataggaaaaatagatgctgtgttcagaaatcattgtcatgttaggtcacagttctccaaatgctgaagcaatctaaatgtccagcagtgggagaatggataagtaaattatggtacataaacaacttggaatattttgcagctatttaagattaaaatatatgtaaaaaaataggattttgttgtgtcatataatttatttttaaattttaaatttttatttgtgtgtgtgtatgtgtgtcataattttaaaagaaaatagcaaagtacaaaattcactccatgactccatgttttgttttgttttgttttttggtccttttttttctttttttctattttttgcttttttattttttatttttgttcttttgtttctttgttttaccaagactccgtcttattagaatatatccttatggcaaaggtaattagaggaatacagttattattccactgtgttagaggaatacaactgcaggtgattcatattttaaaatattttatctctcaattaaataagtgttcattgaactctggtagaccactgttattgtgttggaaccagaaattttaaaattagtaaaaacaaaaagagaaaacactcaggaatgtcataggtttgtgatgagataggccactaccaaacaatttgataggaccttaatacattgttgttataatagtcgttttttattgctattttatgctctaatttttcttcttttttcattctaagagcttattcaaattgttcaggcccaggttttagtattcattcaggtattgtcatgtcctatattacaaaccatggctcagaagaacagattaagcactttattccccagatgactgcaggcaaatgtattggtgcaatagcaatgacagagcctggagctggaaggtaagttaatatttagttggctttggattcttggaagcagtgccttaacattttcttagtacttggttaatacatagactgagctatatgctaggaggaaggcaaagatgaacacgggataattcatgacctcaagtcggaaaataacaataaagcggattataatgtaagctatgtttgagatattaacatagttttatgcaaagaaaatggtagtgtgtaagttgaattttcaccataatgaattttaggtgtaggatgagattcacatgtaaatgccaagcagtttgttacagaggtatatttggaattctggagacaaggatggagtagcaataggttttaaaagtctttcatttataagagttgatacaataggaatgaataagatcacatattcagttatttgctggttatttcataagtgtcttcagtgtgccaggtatacagtagtgaacaaaacagatgtggcctctgtgcttattgaggagaagggcaagggcaagaaataagcaagtatatatatttgtagctataaattatgataagtactgtgaaggaaatgaagtactgtgaaggaaacaaagtagtgtgctgtagactaatggtatgtttgtgtttggtgggatagggaaaaacgaatttagatgtgaatgctaacaaaggcctataaaaagtggttgtatttaaactgagatttgacaaatgagaagaaaccagttttataagaatgggagaaagagcttccacagagtgggacctgatcctcaagaggaaaaatgaaacacaaaaaagggaccaaggaggaaaatctgggcattatatttcatttggaactgtacaaaagaagatggagcaagagagacagaaggattgagagttttaaagaaatctagacatgagtaggaagagaagtcagttggaaaggctgtaggaaaggagaaagaagttagtaatgtcaaggccaccgtgatgttgagaatggagaagaggttttggcaggcctgatgatcctttgtgatttcagtggggtggaggggcagaagttaccttttatgggagtgaggtggttgttgagaaaacagaggcagagaacacaaagtaatctttctcagagctgagtggtaaaaggaaatgtagagagggggcagtggtttgaggctaactggtaagggaaattatttatgttaaagacagcagcaacttgtgggtcaacagaaagcaaatagtgcaaagaaagaacttaaagatgccaaagaagtgtaagtgaaaatccaggaattgtttttgcggaggtcaggccctccttttttattgtaagattttcttttctgacagtgttatttatttttaaatctcttaatattctatagcatgacttgcaatatgtttacattgtatttatctttttaagatataaatccctaattataggtcaatactaacaattttgtcaaagattaaaggtttctgttcacttctgttgcctacaagtgtgatctaaacaagtagaaatttaaccttgttccttaaaatttgcttttaatttcattctctaagataactacctgactgactgccaatattcagattgagttgtattagctctgtggttagcatgttccacttccagctcattgcatattagctctcaaaaagaggctatagaataaatgaaatcttgatttatctctaatttatacatgcaaacaaaggttcatgtgatttttgtttaaagtctctggccttatctgtggttaagtgtatataattaagaaggaaacctgagaatgaagatggagaaaataagcagatttctttctttctttctttctttttctttctttctttctttctttctttctttctttctttctttctttctttctttctttcttttttggaaggtcattgaaagtcatgagaggatatagtaaataagtcaggtatttagagagatgagcaaagagcccatgtgggtaagagaatataagaacagagaaaagccacagatgaagaagagtaatagagtgttgaggaattacggaattatggcatgaaattggcatgaaatagggaaaaacacgtgggaagaaaagaagatagaagatggaatatggttcattttgcctgccctcagagatggattgagcactgtctatatttttggtttgatttggcctccacagaaaaaaatgttgcaattgttgaaaaacatccagagtttcactggccctttccccttccatggaggaaagcttcattatatataattatgtatctttgtatgttgtattactttagcattttataaatgctttcatgtttattttattattttttaaagaaatagagatggggtctcgctatatttcccaggctggtctgaaactcatggactcaagcattcctcctgcctcagcctctcaacatgctaagattataggtgtgagccactgcacctgatctcatgttgattttattatatggctattataataagatatatggaatatagagatatgatttctgtataagaaggaaacagaaaataataaatgaagtattttgaccaagttcatagagcaaattgttgacatctttggagccagagtgttctgacaccagctgtgtgatcttgggtaaaaatctctgagcttcaatgtctcttatcaatgaaattgagaaaatgatactgaagaagattattgtgagggtctaacttgttggctttactaagtagtatactttttcatttttaatatttcatatataacattcaaaaatttaggaaaaatttacaaactgagctatgtcattacctttatttcctttgatatgtccctgtatagaagaattttttttttttaaacagtctcgctcttgtcacccaggctggagtgcaatggcgcgatctcggctcactgcaacctccacctcctaggctcaagctattctcctgcctcagcctcccaagtaactgggattacaggcgcccgccaccatgcccagctaatttttgtatttgtagtagagacagggattcagcaggttggccaggctggtcttggactcctgacctcaggtgatccgcctgtcttggcctcccaaagtgctgggattacaggcatgagccaccacacccagctatagaagaattgttttaataaactatgtacagacattagttaccgatactttatacatacttatgatgaaaaatatgatgttagaatacaatagcattcaggctgggcacagtctcttgtttatagtggaggtcggtcatataggcaccctctgcctggcatgtaccaaaagttcagatccctaaaaggaaagcaggtattcagcataagccaaattgtttgcgcaaacagttcagacagtaagccactcttatgagtactgggaatggtgggaactctcctgaaatccagattctcagatgttagccacggacaatgttgtaacaggcctttctaaggatagcagtctcaggcctgctatattaattcttttctgtatacttggcattttaataatataatttaacaaatgtttattgagtgcccgttatgtacaaagcagcatgctaggcaccaagcatataaatatgatcttgatacaccacatgttctcaaaaaacttgagtcagataagtgtggtaggtgggaaagataattcctttttattataattgaaattcaaagtaaatggctctaagagagtatatttgttgctttatggcgtctgtgacaaattagcagagacttggtggcttgagacacagaaatttattctcttacagttctgaaggctaaaagtccagaatcagtattgttgggcccaaatcaaggtatcaggagggccacactttctacagaggttataggggaggatccactcctttcctcttctatttcttggtggctgttggcgttccttgccttgttgcctcgtcactgcagtctttgcctttgtggtcacattgccttctcttctgtctatgaaatctctctttacctctcttttataaggacattcatgtttgcatttagggctcatccagataattcatgatagtctctctatcacaacatccttaaattaatcacatctgcaagattctttttccatgtaaggtacaacagcctctagggtataggacctgatatctttagggtcattattcagcctaatacagagagtgatttaaaaaaaaaaaaaatgcaaccaggtgcggtggctcacgcctgtaatcccaacactttcggaggccaaggtgtgcagatcaactgaggtcaggagttcaagaccagcctggccaacatggtgaaaccatgtctctactaataatacaaaaaacttagccaggcatggtggcatacgcctgtaatcccagatactggggaggctgaggcaggagaatcacttgaactggggaggcagaggttgcaatgaaccaagattgtgccattgcactccagcctgggcaacaagagaaaaactcggtctcaaaaaaaaaaaaaaaaatgctgaggggcataaaataaaaacaccactgtatttattactcagtttttgcattgctataaaaaatacctgaaactgggtaatttataaagaaaagaggtttaagtggttcacagttccaccagctgtataggaagcatggcttgggaggcctcaggaaacttacagtcatggcagaaggcagaggggaagcagtcatgtcctacatggccagagaaggaggaagagagagaagggagatgtgctacatacacacttttaaacaaccaaatctcatgataagtaactcactgtcacaagaacagcaaggggaaagtccttccccatgatccaatcagcccaccaggccccctcctccaacactgaagatcataattgaacatgagatttgggtagggacacagagccaaaccatatcacccacataaagaagacaaattggaaaaattacacaagtaatgtggactgtttatacactctgctgtttattataggatattaataaaaattgggacctaagtgttttaacaataggggattatttcttaaaattatggtaaatccatgatgatgctctattcagctaataagaagtcattagatattgttaacagatcaaaatcatattatatggttccagttttataaaaatgcatatatatgtatagttatgtccatagaaaaatattggaaagatatacctttaaaatgttcattccaggagataaaattatttttaaaattatttttctcctttggactgctgtgttcttaatattttatttactaatatttgtttctcttatatttagaaaaataatctattctacacttagagcaggtttgttagaaaaaaatggcatttgagacatactcttttttttttagacaaattctcactgtgttacccagactagagtgcagtggcctgatcatgcctcactgcagcttcaacctctcaggcccaagtgatcctctcacttctgcctcccaagtagctgagaccacaggcgtgtgccaccacacccaactaattttttaactttttgtagagatagagtctagctttgttgcccaggctggtctcaaactcccgggctcaagcagtcctccagcctcagtatcccaaggtgctgggattataggcatgagccaccatgccctgcctaatagctaaatttttgatcaatagagacaggggaaggaaccaaggtgtttaaaggcagcaaagtacatggtgacacgtaatctcagggatacagtgaggtttgaaatgttatgtgagtcccactggggtctcgaatgttagttgggctttgttatactactgtataaaacctggctaatttatataataaatcttaatcatatatttatttgtataagtgctttagaatataatagatcagcatggtttttcagtgcaattgtgtgaacattcttaatactcagcaattttataatggtgtagccagtttgaataatctaatttacatacatacttatatcatttgtataatttaatttttatcatttgatgaattttttatcttttctttcaattacagtgacttacagggaataaaaacaaatgctaaaaaggatggaagtgactggattctcaatggaagcaaggtgtgtaaaaaaggacttctatagcccttcttttcagagtcatgccatgggtaacaatgtctcaaagacaactcattaattctattaaatctagggactcaggcaggaattgaatttatctaagttgttttggagacagtaaatttacaacatatattacttaagatctgtggtagcttcttctatatttcattttgcatgccccctcactaatatggcaaaggttgttttagcttccaaacagcccttattaaaccagaaaaagacaaggtgaggctcacattgcccaaatgtgggacaaatattaataatacttaaactttatgttgataaaagattgggggaaaagctttctcatatagatcaagaagaatttcaaaagattctaggagaaggccaggcacagtggctcacacctgtaatcgcagcactttgggaggctgaagcaagagattgcttgagcccagaagtttgagaccaacctaggcaacaaagtgagaccctgtctctataaaagtaaaaactaaaaaaattagctgggcatggtggtgtgccctttggtcccagctactcactcaggaggctgaagagggagaatcacttgagccaaggaggttgagacagagtaagaccccctctcaaagaaaaaaaaaaaagatcctaggagaaaaagatatcagtgatacagtgatagaatttgagagccatttgagaaccattcagttctactaaattaatcaactcactggtagaattggagagcgcttccaattaaggttacaaatgggctcaggatctctgatatcaatgagggcaaatgcatttgatatcactgagggcaagtgatattgcccacctgaaatggtatctggtatatactcagtaaatatttgttgttgactgagtgttacgtgaaggaaagatgttcattttatttactgttctaaaacaatctttctgaaaatatgtgccaaggtctgttgaagaattagtttttataagtttgggctattatctctgtatttacaaaattgaatcactggtgttcttcaaatatactttaataaatatttgtttaaataatttctcctaagaattataattaaacggatgatagctccaacatataatcagttaactcctcacatatagaaggcttgttttgaaaggggagtgggatatttggtcagaagtgaaatgggaaccacattctcttatgcctctagctctctaagcagacctcgtctgctcagccatagggttttgtgggaaccacacaggaaaagtaccactgactctgtttcaaaaactctattagaaatagcaaaaaactgaaagcaagtaaaagtaaaggaatgggtaagcaaatacggtgcatctgaacgaatgtgcagccattaacactagcaacacaaagtttttaacagtacaggaaataattatacattaagtgaaaaaacaggatatagaatgcaagtataggaacatttttactatattaaaatttaaaaatatgagaaaggaaattatcaatgatagttgtattatgtacttatggagaattatattttcctttttcttttgaactttacattctctatacaatatctgcaatgattttctgttattttataagcatttaatatcctcctaccacccaaaaatgttggccctcattagggataatttcagccctattcaaactttggagtgtcataattaggaaacaaactgagaaagtccacttgcaaggaaaattctcatataactctattagaaagggggatccaccatggtgtttaaactcactttaggtcgcactgttgtagaaatggttcagattttattaatcctttgctataattacttccaataagaacttctggagaactccacttgatttaccaaattgagctcagcatattaaaatgaatagtttttgcccaatgaatttctcctcccttcctttctattccattgtttatttattatctgtagttaaaacatgtatgagaccatttgagagcatactgtagatactaattcctggatgctgtgtgatgcaaaacaaacaaaaaagcactcatagcatttcaactgtggcagctatacagacattaggaactagacagaaaggtaggagcttggtagacttataaggtttttgagcaagggagtcgtgtaatggagcaatactgttgaaaaaatatttttgccaagttgtatagaatttttttgaggaacatctttttcaaaatatatttttaaaacatcctttggcctcctctgtgccaaaaagaattctaagcacttaagatagatatatgaataggaaatggctatgagctcctagtaaggaggcacgttgatgatcttttattattgtgtcacctataaccatactgccaccactatattcatttgctgttgtgtagacaacactaacattatttgcccatttttcattatttgtatgtatcagtgctgtgcattttaggtgatgggagtaaccaacatcattttatacccctactatttcaaagagagagagataaaaacagatcattttggtaaatttgaggtgttgtaggaccgcttaacccagcctggagaatttgagaccttttggccaatctgatgtctaaaccacccaggatgagtacaattcattgcagcagagttgggaaagggcctttcccaagtagcagaaacaagattttcaaagactcataggtcaggaagacctcgcaacgtgatggacagcaagtagtttagtagagctgactgaagaagaggaaattggggaaagtgggacaagcaataagccaggtaaggagaggtaagctagtgccagtttgtgataagttttctatttcctgctaaaggttttgaatttatcctgaagcctattaggagctattcaaaaatttttaagtgtgaaggtgatatgatcagattgcatttagaaaaatctctttgacatcatgatgaatgatacagctgtagagagatcagttgtaggaacttaagaaatgatgagggctggaaataaggtaattacaatagacttgaaaggaagtgaataaattccaaaagtattaagatgggttagaaaaaactagatgctgaattgaatatgaagcaggatgataatgtaatttattgaagcattcattgagatagggaaataggttgataatcaggattggataggagtaggggtgggaaggaatatgtcctgcccatgagtcatcaggtggaactatccagaagcaagtacttattcaggtccaggtcctatcaagaaatgtggcttaccaggagtttgaggctgcaaagagctatggtcacaccactgcactccagcctgggtgagagagaccctgtctctaaaaaaaagaaaagaaacatggcttaaataaagatttggagacatcagcatgtagagggtgactcaagccgtgaaaatgattgagatgaaccaggaaagatgcagaatgagaagataattattaatatttgctctgagtatactgttttctgtatcaatatcatctgataatccctctcatttggcttgtcatttttccctccttaatcatagtttcctatttagaccattttaaaggaagcaggatatcaattacaaaaatcaaaaatagtccttttcaaaaactgataaatctgagaataaataatatagtgccatttacagcagattttctttctttttatttttcttttattttcttttctttttttctagagacagggtctcactctgtcacccaggttggggtgcagtggtacaatcataactcactgtaacctcaaactcctggactcaagcgatcctcctgcctcagcttcctgagtagcttggactatatataggtgcacactaccacatcagctaatttttaatttttttgtctctactattttggcaaggctggtcttgaactcctgagctcaaatgatcctcttgcctcggcctcccaaagtgctggggttacaggtgtgagccaccgggcccggccagattttcttttcttatcagtggcttccttctaaaatacaatttatcatcataatagacaatttggtttcatttttaaagaacataataatctctgtttattattattatgtataatattaatagtgaaaagaaaatctataggtttcattctttgaagcattaagtaatttttcccctgatccttgataacatcatgtgtgaataatcaactttgcagatatttgggtagggtacagagagaggtatcaagcatgtcttgtctgttttagttttctgtaatatactttctcccaatcataacttgcacatagaattgaattatcatggtgcattaataatgtacttggggttttgcaggtgttcatcagtaatgggtcattaagtgatgttgtgattgtagttgcggtcacaaatcatgaagctccctcccctgcccatggtattagcctttttctggtggaaaatggaatgaaaggatttatcaagggacgaaagctacataaaatgggattaaaagcccaggtgagtgataatgtaaatcatattcagatactaattgagtttactgttaatcagataggagacttacatagaggattacatgtggcacaattttatttcctatgctgaattcctaaaatatgcttttctgatgtggtaatgagatttattctcatttataccactctatctttctgatggtcagcaatagaaatgaatcaaggtattttgaatatctgttttagaaatggcaaaattaactgcatggtaacaagccatctatttgtaaaatgcattaaagaaaaatatgaaataaaaataaagtgtggccaggcacagtggctcacacctgtaatcccagcactttgggaggctgaggccagcggatcacctgaggtcaggagttcaagaccagcctggtcaatatggtgaaaccccatctctactaataataaaaaattagctgggtgtggtggcaggcacctgtagtctcagctactcgggaggctgaggcaggagaatcacttgaacccaggaggcagaggttgcagtgagccaagatcacgccactgcactccagcctgggcaacagaatgagactctgtctcaaaaaaaataaaacaaacaaacaaaaaaaacccagaaaatgttctttctatacattaccaaaaatgcatgttttgcttaatatgtattagaaatccttagttccaagtaccttgagaactggacagtattagagctggaatgatagtgtattgcagtaggaaagccacaaggtttagaatcagatggctgtgggttcaaatccctggtttaccacttactagttatgttcattaactactccaacttggcttccaatttgtgttttgtttttttggaaaaaataatattcacttcaatattcactgggttattggaagatttaaatgagatcattctctacattttttgtatggtctcttaggataccgcagaactattctttgaagatatacggttgccagctagtgccctacttggagaagagaataaaggcttctattacatcatgaaagagcttccacaggtcagaagtgtttaaagattccatcttttgactgaataatgaattggaatagaataatatagaaacatgttatttctatattatgcattcaaatttatacatgcaaaacttgtgaaatagctaatcatttgagtattaaagttgtaataaaagtatgagttttatagggtagttaagtaaataactgaactcagtaatatccaatcaaagcttataaagtaagtaggaaaaacagatatttcagttctgtgattccttcttagaatgattttagcttcttaactacaattcaaaaacttttagctctttgtaaggaaatgtcttgcaaaacatttgatagtttgccagtttttaaataataactgtgaatcaaagggaaaagtataaaattcagactgaaaagttttagccacatagggtcagtccctaaacagctatggttttaaagtatggttgacaagtgattattgagcctcagatgccagtgtaagggggtactcctgcctagtgactgccatgaaaaacaccagcatgatggaatcaaactgactaaggctacttttacattaataggtagaatttaacttatgtgctttaagatgtttatttccacagatatattgagtcatacagtgtgcagagattaataaattgaaataagcaactggggattgtttttaactcacatgtgagtaaagagaagaaaaattaaattgcatatatataatgaagacagtcattcatgggcatggtgttatgtgactgttgtcccagctactcggaaggctgaggtgggaggatcacttgagccctggaattccaggatgtaatgaactatgattgtgcaactgtactccatttttggcaacagagtgagactttgtctcttaaaaatttaaaaagattataaaaaaataaaggtagtcattcataaaaataaaggatttgctttagaaagtgattagagatatgtcaaaagaatctcataaatctgttttcttataaggagttaagatataaattaatctttatgagtttattataaagataatttataggatttatcgtaattgaaattgtgtgaaaatcacttgcataattagagtaatgtttaagacctaatttttgtgttataggaaaggctgttaattgctgatgtggcaatttcagctagtgaattcatgtttgaagaaaccaggaactatgttaaacaaagaaaagcttttggcaaaacagttgctcacctacaggtaagcttgtcactgtggtttagtattagatggtatcagtttactaatctgaaatggcctggggtaaatagaagtttggagttattttcatgtaaggtgatattagaaaccatggaagtggatgagatcactaaggagagatagtagagagtaagacaggagtggtcttaggacacagtccttgaggaagactacaagatttaaaggtagaattcatatttggaattcatattgtctgaaaaggaggagcctgtaagatgactgagaatgaataaacagaaaggagaaagcaaatcaggagagctttgtcacagaagctggaaggaaagagggcttcatggagtagggagtgggatcaattgctgcttaggggaaaaataagacgaagggcaaagagtgttcattgaatacaatgatatggagattatttagtaagagccattaatggaggcggagggtgacacacccgatgagtagatagaaatgaggacgtaaaacaatactgatggtaggcaactctttcctgagtttggctgtgaatggtagttgagagaaagggtggtaagggaagaggggaggggaaggagatttgagattcaagggagatatttgggagttattaattttttgtcgttatttttaggatgggaatgtgggtgcatattttaatacctgtatataaagaaaggatttaataaagagggaaaggttgtagataggaaggaaataatcaactgcgtaaggtctttgagaaagggtgagtttgtggatgctgacacatggaaagataggccttcccatcaacaggagagggattccttcatttgcacaggaagaaaggagcaaaggacatctatgagttcagacagatacatcactctgttggtagaaaactacaaaagttctttatagaagacttctatttctttaaataacgtggccaggcacactgactcacgcctgtaatctcagcactttgggaagttgaggcaggcagatcacttgaggtcaggagttcgagactagcgtggccaacatggtgaaaccctgtctctactaaaaatacaaaaattagccaggcatggtggtgcacacctctaatcccagctactcgggaggctgaggcaggagaatcacttgaacccaggaggtagaggttgcagtgagccaagatcgcaccactgcactccatccagcctgggctacagaacaagactccatctcaaaaataaacaaataaataaataaataacaatagagaaagtccttgaaagacaggtgagtgaaggaggcatggaggtgttgcagaagggtgagggaggtatgaaatatcttcttcagaatgagaaactaaactactttctgctttttgtgtatcaatcagctttatgataagagtttagcttcccaggtacaaacatagagaaaagacagatgattgtgtttacctaggattgagttttcccaggaacttgagggtttttgcaaaagaactcagtatatagtggccgcagtcactaaatatgctaattaaattttagaccctatagtttctttttaaatgaaggaatagtttataattccttcatgtggtcatcaaattggcaaaacatctcaccagcaaaaaacctggagttgggatttgacttaaaaatttttaagtagaatgactggctgaaaggctttgtgaagggaaaggtagaaatgaaacaacttggtggcttttcagaaccagcattctagaaattatgttcaagtgtggtttatgtcctaacacagctacttgaatctccgtagtctagtcgtgttctctctctcaaaaatagtttcctatttgtaaatatataaaatgtatttgatttgcaaaattgtaaaattttgactataaatctttaaaatttataacgtttgtaaatatttataaaatattttcctacttgtgaatatcagagactgcctcatagcgttgttgtgaggattatgttgtagaaaaaactgggttcttgtcacaggaccaggataatttgggcacgcagacacattgtagattgagtagggcagggtttattaaatgaaaaggagaaaggaactctcagcaaagtgaaagaaagtcctgcgagcagttctcctgcctcacagattgaatcctaggtcatcacacaggaacaggagaggctaggctcctctcctctgcaaacagtgtgaacttcccgaggctccaccccgtcctcccagtgcacaggtgggcattattcagaaaggatcagttgggaaagggcaggcttcatctgggaccagcagtcgggtttttcagcctttaggctgtttaggcttgaaggcagggtttcaccagagaccctcggctgtctcctgtctctatcaattagatggggtaatatacataaagcgcttggaatattgcctggcaaagtaagcccacattaaaattagctgttatccttattttattccttacataatgccttgctccattttgtttcaatatgggagacctttttaccatctacttcctcttgctcttgatctagaccctctctttgtcgttttgggaactgtttgctaccggtattgtcatcaaattaactttttccatcctgaaaaaaagtctttacatcctaacttttcttattgacataacaaacctaaaacagttgttctgaatctctaaaaatgaggtacactcaatcaagaaaacatttaacaaaacagtatgacttgacttgattaaattctgatttccttaagagcaaggatgttatactttatattccctttcatttatggatcactgatttacacgtatcagaggttctcagtgaatgccctttcactcaggtgtttagaaatgtcaggaatgaggtggaggtgggtgtgcacagttgactggaggtataacttgtatagtgccctggaggacagtgttgttaaatgtcctgtaattcacatttggattacaactaattgtgtcactcaaaatatcaataatttcccattgagaaaaactgacatatatgattttttcctttttggttcactgaacaaatatatattgattgcctcctaagggtaatgtgttcaactgtaatttgatgggtgtaactctagaaacacatactacgctcctggcaatatgaaggaagtgttaccacttgatatcactctgattttctcaactgtacccaaagtggaatgagtatcatttgcttctgaaatccaaccaccaccacttaaacatcaaaaatgtttactaaaacacttataccaaggccaggcatagtggctcacacctgtaatcccagcacgttgggaggcctaggcaggcagattgcttgagcccaggactttgagaccaacctggacaacgtggcaaaacctcatctctacaaaaaatacaaaaattagccaggtgtggtggtgtgtgtctgtagtctcagctactcaagaggctaaggtgggaggatcgcttgagccctggaggcagatgttgcagtgagctgagatctcactattgtactctagcctgagtgacatagcaagaccctgtctccctgctccccacaaaaatgaatacaaaaacaaaaatatacctttagccttattttggctaaaggtataacagttgaaccaaaagacatgtttccattcctttggaaatctacatttcctgtgtttatgaacttaatactagattacaacaaggatgactatattattacccagattgcctgaatggctcagaaggcatgtaatttgacatttaaccatgaaggaaataggaaagtggtccatattgttttctcataggggaaaaatattcttttaaaatatatatttattgtattttaatagcaaaaaataaataactttaatcattcctttttaaagaagtatcattttattgttgccttctttcaaagttagttccctaaactttcagtaggtggcagtagcattctacttccacaggtcacattattgatagctagtagtattgttttccaagtaagtttatatgttctgagatttctgagatatgtcttctgatcttcctattttatctaaataaatatatttgaataatattttcatatttcaagctaggagtatattcagagatgatgaataaccgatactgtacatacctataccttgtattcaagagctgggtacactatggatctagttattcaattgaaatagaagagctttaaatgttacaatatacttggccacatgtcattttataactatataactattcagtttccattctctttgttatccttgaattttggacattttggggctttctgaccagttgaaatgcatgtcacaaaatttattttctttttagaatagaaacctacgtatggatgtagcaataattattaggatttttaaaatctatgctctccatagtttatgtcgatcttatggttttttgcggaatagacaataaaacagtaaaatccagatgttaaataataatggatattattgcttgactgctccctatctgccagacactgctaagtgaatggtctcattctttttcttcacaaatctatataagtattttaattatttttattttacagttaaggaaattaaggtatagagaggttaagtaacttgccccaaattacacatatattctaattccagaacctacactctttacgtatatactgttattactgcccagaagtgcaaagcagatgggccttttttcttttcctatttccttcactcagtgggcaacgaagtgaaaatggaatgttttttctaatctaatgagagctcttggttagtcatttcctgtgtggtatgtgttcttaattctaagggcataaagaattagggagaggaatagagaggaaaaaaataatacttcttcttgacatgtgtctaaaatgggaatatccagtttttaagaccttgagcatgggactaattaactatcaaatagcaaacctagtgtgtttcattttatattttaaccataatatgtgagagcaactgatgctgttgtttaaatgaatactgggctagataacctctccaaggtgttctccatttccataattctaagaattctgtcattcagaactctgaaaaagactccatccagcccacttagtaacttcagaataatttttaatgctagctgcagtattatttattaacaaatataaatgacttaaaaatactgctatgaccttgtcgatcattcactaagagcacttgactagtaatgtgtggtctaatttttagttgcctttgattagaggatgatttcagaaagcataatgcagtgtctgcagtgaaaagcaaagaccaaatctgtttagtaacgctcaacccaatggcaagaatatgtaaatatttaatctttttatcctcagagagtaaattatgtactcttggagacattattctctcagacctctggacttcactgaatgcactgatgcaagaattctaaatcattccattctggtttgaagttttacttcagcttctagaagtttccagcatttacaaaggaatgactcttgtatgagagaatcaggcttagatatctttactctttcatattgtaaagacagtgcataaattcccaaatgtggcatcatgtaggcaaaaaaatatcttgagacttgttggatccacccttattttccaaataaagtgtcatacatagtgtcattgaactaaactaggagtaggcttagaaaccatcttcagggattttcatggaatactcatctgttttcgatatatagattatttgcctatttttttctttttttgttccatctttatattgtctaagagtaaacttcaatgtgtgggttgggagtgggaaactttgtgctgattaaagggtagatatttgacctaattaaatatatgatgaatagaaatggagatagaaaaaattaagggaaacaataagcggggaagaaagttttgatgtgacccagcatgttcagaactagaggccagaatacagagatggaaggagtggggtgccaaccttctcattgcttagttttggaatcattcgatgccagttacattctctgtttctagaacagggtgaaataaaaccaggggaaagacagtcagttggagttttcatcagcacagtagttatgttgatatacctgtaaggaatctgcccctcagagctttactccacctgatacaccctggtcttgcttggtcctgggtctttttacactcccattctactcttttccagaaatggtaagtatcaaaactgtcccaaccaacaatgacagtgaaagaatcagttttataacttgagaattgctgtagccagcattaaaagcagaccatgtatcttctgagaatgtgtcccaccaccctcctttgagaacacagctgtggctttggacttggtagtacctaggtgggatgtgtttaatttctagtttgagtttcactgcaccacctttgcctgtaactttccatgtatatgctattagccacagtgaagttcttactcatttcacagcagaatgatcagaactgtttctatctgaattttcacaaagaagataggccagctgaccatatctgggccttggacctaagaaatcaactagaatggagtatacttttggagctacccaaagtgggaacccagtatttcaagttcaagccaatttcctgagggaggctcaagagtcagtgccaaagagaacagatatacactccaagttcagagtgtgagagcctagagtcaggaatgaaataaagcttgattgaagcaaggacagtcagcaacaattgagaatggtctaaatagaatgatttccaaaaatgctaatgggttgtccatggccagtaggaggaggtaggtacatagctatattaacattgataatcccagaccattcagtccaagctagagactgctaaacaagctattgagaggtacgggaggtgtattcatccattttcatactgctatgaagaaatacctgagactgggtaatttattaaaaaaaaaaaagaggtttaatggactcacagttccacatggctggggaggcctcataatcatggcggaaggtgaaggaggaacaacagcacatcttacatggtagcaggcaaaacagcgtgtgcaggggaaccactctttataaaaccatcagatctcatgagacttactcactatcacaagaacatcatgggacaaacccacccccatgattcaattatctcccaccacgtccctcccacaacatgtggggattatgggagctacaattcaagataagatttgggtagggacagagccaaaccatatcagaagggataatgtgaagggatgaaagaggatgagggtactggattttgatctctttagtactctgattttattctattgctttctacagatctagattaaatactgtgcaatattaaataataccttatattttgatgtttatgaacatatatagaaaccccttgtccctccagatgttagaagcagagtagcaaaatctgtatacttaatttcattaataaagaaaaaaatcttcaaggatttaatctctggaggaaaaagcaacaggtgttttcaacggctgtacctaaataactgtaccacaagatggtgctcacacattaaagtcatgctgtttttcaagaattttgcctcgtctaaattttacaatctgaaacaagacattgtttatgttttaaactatttttgcatcttttagtacaaatttccttagcactgaaatatagtgagttttaaatttaagctgatttggtaacaaatgccatttttatggaggaaaaaaccaacaattccacttttgtttgccctaaagatcttttattgtataatttctgatatgttaagtgggttgaagtttatatttctaccatgctcacttttttcttttatttcctttaaattcaagacagtgcaacataaattagcagaattaaaaacacatatatgtgtaacccgagcatttgtggacaactgtctccagctgcatgaagcgaaacgtttggactccgccactgcttgcatggcgaaatattggtatgcatgctacagtaattagagtgcggtgtgtgctcagactgatatggaattctgccaattttaagctcagccttgagggtcttaaaggaagaaatctgtgaaatgaaaaataaaagtgagactccactttaaaaaaaaaatgctaaaaagttccattaagcatatgtataatgtgctaaaaatgtttcaagttggtatttaatttttttatcctaataggcaagcaaagttagtatttaattcttaacttgctattgaaaataaaatattaagagtgggaaaatgaagagtgatattgataggatgactgattcattcattcaagtaatagtttaatttcaaattatctgaagagtggcagtatagtgaggctgaaagggaacagtaaaacttaggagtcttgagatagagtccgaattcttttattaaataactataattaaacttaattccatccaggaaaatgtttttgttatctgtgaaatgactaagttggacaggatttttctatttaaggtgctttccaattttaagaaaaaattcaggaagaactggctgtccaatcaaagtttcacaggctctattaagtgaaaggagaataaaaatcctattaagtttagaaagacttcgatttgaattaaagattattagcaatggtgttaaagatgagttgaatgaaaaaacatccctgtatgtcagacttttgtatattttaagattttagaatatacagtctaaatcagattctggaagtagatttggtttcctctttttaaaaacaaacattctcccatatcattagcccaagagtaacttagaataaattcctgtcattattcattaacttgtgttcagttcaatcacaggtagaacaggggaaatattttgtgctttatataatgatcccataataacaaaattgccaggttgaaaaataatgtggaattacttttcagaaacttgcacttttgaggagactttttatatttacatttacaagaagttctttgactagtggcaaaaagtgtaaaaaaaatttacatatttttggaaaaagagaagtttggatagccattgaccttgttatttgaaaacctcaggtttatacacatgctcatatttcacactgaaacacaggaggcaactagttatagcccagtaaatatttcactaaaatacttgccaaatataaaaaattagagaaatccaaatattattgtccccaaagtcttgtctattaataattatattgttaatatattgcttagaaatatcctcacctgtcgtatggtctgagttttaaattattttaaataaaaagaagtatctacccttatttttgctttatgcttcccactattgaaaaataagtagtggggtgctgtagcttgccactgtagtaactcctacttgagaagctgaggtgagaggatcctttgagccctggagttcaagactgtaatgagctatgattgtgccactgtatcccaacctaggccctagagtgggtgagactccatcactaaaacagactcacaaacaaaaagaaagaaagaaaagaaaaataagtagaaaagaattttgaactaatgtatttttatgttaaggtgaataaaatctctatcatgaattttaatgatagaattgtgatattatcagaaaagaatttttctcaagcactgcatgtttatgtatacaaacattatatataatactaatacatacacttcaggaataataatctctatataattttctaatgtttcctatatgatagcatatactttgttagtctgccctcttaggttttcacttttatcttcaatttatttctgaaaagtcagaaccctaaaaaattgcttttttatactgaaattcagaatcgtgatcttcaagtagaaagtgacatcattggagaaaaaatgcatattacaagggcaaaaagaactaggtggctgagtaatttagatcatatagagaatccaaataaattagaacatattcaagtctttactgcatgtttttctagcctcaaatagccaaaatctaatcatctgagttttctaccttttgtttctagcctaacaaaaacctagcaagaaatataattaatgaaaaaggtactcttatatgaaaattctcttgaaatatatttcatatgtaatttttatcttctttgcttagctaatatgccgttctaattgcttaataaatgtgcacatttaaacaattgtaaataattagttttctggttttgaagcacctcatgaaaatccatttcaaacatttcttttctgccttttattttggtcatttagggcatctgagttacaaaatagtgtagcttacgactgtgtacagctccatggaggttggggatacatgtgggagtacccaattgcaaagtaagtatagttttctgatacactcttctttatgatgtgaagaaaaaggaaaatttctttactttgtacatcaaatgtagagggaaaggaggtgtgcaatcttttgaatttttcagctgaatacagacaaaatgtattcaagcaaatggaaacagctttttttttatcaactccctactaggattttatttttcttaaataaagtaaagagaccaataaacaaaagcttgatccttggctttatttgaatccttatgtagaaggacaaatagtattttcaaaaattttttaatttttttattttttattttattttgagacagtctcgctctgtcacccaggttggagtacagtggcatgatctgggttcactgcaacctccaccttccaggttcaaataattcttgtgcctcagtctccagagtaggtggaattaacaggtgcgtgccatgacacctggctaatttttttgtatttttagtagaggtgtggttttgccatgttggccaggctggtctcaaacccctggcctcaagtgatctgcctgccttggcatcccaaagtactgggattacaggcgtgagccactgcatccggccaaatactactttttttttaaaaccaaaaaaaaaaaaaagcaatacagaaaaattaactggcatatgaaaaggatctaagttgtcacatatcttaaatatctgattatttgttttgttctaaaaaaattaaaaatcttctttctaaatagatttatttccttcaaattgaaagaaatcaaatatatctttttatcatatatgaatattcttatcagtttgaagcagtactaatttgtaaataggcagtgtccccattcatatttcttcctcaatctccagaatttccttttctcctaacagtcttttgcctcagaagtctccccatagctttttttcctcatcaccctagaaaatatatttttctgattatttagcaatgattttggtttagaaaattttcccaaggaaattttttatttatacagaaaagttcagtttgttctgaatctgagagtaagaatgctataggcttctaaaaatgttttaagattatcttaatataaagtatctaaagggaaaaattatgaaacctacattcaaactggcagcctaatgatttcaaatttatctttttggtaagtataattggaaacatttaatatgcttatagtccttagaaaaaatattttactaaaattacattaagaacagaagctatgtagtggctcaatgtttgtgtggtttagttcacatttaagaaaggcctattaggtggggagaaggcaatcatctaaatggcttaagattagagcgtggcataagccttggtctctgttttctcggagtcaactccttcaagttggtaccaagcaaacaatgtagattgatggcttatttgaaatctctggtttcagtttgagagacttatattctctttaagaaacaataatcacctttcttggccagtttgttagttcaaagattgtatcaatttttaaactagactgctatttctcttcccatatatcgcctaatatcaaaaaagccactgaggccacgtgcggtggctcactcctgtaatcccagcactttgggatgccaaagcgggtggatcacctgaggtcaagagttcaagaccagcctgggcaaaatggcgaaacaccatttctactaaaaatacaaaaaaattagctaggcgtggttgcaggtgcctgtagtcccagctactccagaggcatgagaatcgctctaacccgagaggcggaggttgcagtgagtcgagattgcgccactgcactccagcctgggcgacagagtgagactgtctcaaaaaaaaaaaaacaaacaacaacaacaacaacaaaaaagccacatagacacattggcaatatgtggatgtaatgtatagattttgatttgataaaaaaagaaaaatcttctaattgtgtttcttatatcccccagactaaactacattagtttatatatatgttgctgagggttggtttcatagataagaggtgttttctctgcttttttattttgtttttttgtttttgtcttctttaataactggtcttcagcatgtgggtttatttaataagtcttactcattaggctcgagcccgtgaggagtgagatttaagccttgtcattttaagatttctctgccatgctgggaagagctgccttagatgtagaacttcactgcagtgtggttaaacatttctgctgccgcctttcactgttaattttagttgatgactaaatttaattagtaacatataaaaggtctactaatctctgctttactccattggaacttctttaatgtaaaaagaagcctagcccatttacaaatatatatatatatatctaaacgcattgggactgctgaagtaggcttacagtaggtaagtgctcaaaatgcaggtgctagattttgtagagaatagcaaaatccgttcagaaaaaaatgtttgaaaacataaatatctcaagcttttaaagctttcagcagaaagttctgagattgtaaatttcctttgtaacaccgtaaatcatatcagtaaatatttactgagtgtccatttctttgtaaggaaccctgatgaatatggagaagaataagtccaaaagtggtatgttcctagagagctggcacatttaatttgtcttaaaaatcaaatttaaacaaaacaaaacaccaagattatacttgagaaaaaaaaaagaaaagcctttgagtgtgtctaccaggaaagtccaaagttcaataactagctctaagtgctttggccaatgaaagtgttgcaatatacaaaaaagatatttgaaaaagaggcagaatacctacatcctcattccagtctgccaatgatgtgttgttggtgaccattaaatagcaaccattaattaggaaatatattaacttctctctactttagttcctttaccagggaaacagtattaacatttatccctccccaatcccagagctgagaggataaaatgagatgagaaaagataaaaacaactgtacagtggtacggttgttatcatgactatcaaaagtgaacttatgatatttgggttttttttttctttggtgtgggtatagcaatggactcagccacttagtattttaactccacacattgctgaagtgactattaaccatttccaaaaaacaagttacttgttaactttctgggaaataatatttgctaaagcattagtttatattcctgatagtgatagtggttgtgggaatgctagaaaatatgtatcttttttcttttgttttctataaaaccagtggatttcaactttttaggaaacattaaagataaaaagaaactaagacatcctgtgcatttcctaatctaaaacagactttttaagagtgttatcatatgtgctgaattttacaaaattaaatcagatgaaacatactcattatttttattttgaatttgtaatctctttaatcaaattaatacaaagctatacagattattaacatcttaatagttttttttactattattccaatttaggatgaatgccatattgaaaaaataagtaatttatgaaggacttttattgtttgtacttcactaattgaatagtttatgagttacctggtaagacaaaatttacagtttctaatatattttatttattcattcaatcatctgatttatccagagcttatgtggatgccagagttcagccaatctatggtggtacaaatgaaataatgaaggagctgattgcaagagagattgtctttgacaagtagacatctgcccacatcctggagtcctattacagctaatctcgttttaaatctgctcaagataaaatgtaacttggaaagcgaggaaacactaaacatgtttttacctgctctctctatagagaaggaaataaaatataaatataagattaacacagtggaaggacaaatctttgaagccaaaattctagttttccaatataaggtttaacttacagttttttatgtagccaaaggtaaacggttttctgaatcttgcctaggtgtttcatttatctctaaaattctaaaaagcataaatcattcaaatcttcaaaccaaggcagaaataattttatgtcgctatagtataaaaacattaataagatagcacattgacttttaaagggaaaagtaaatataacttagcatgtaaactcatttcggctaccatttgctccaaattccctagaacagtggtttttaccactgtactccaaccccgtttttaagcaatggaactctttcttcaaacaaaagcttatgcagaacatctctgtgaaacgctgctgagtgagaactgctttcattgaagctggaagccatcataccttactgccttgaaacccctaggactcagctaagtatttgcctaaccctgaccagggaatgccttggttctgtcaattgctgacatctgagaacacagaataatccatcatttttaatttcaagatattggtacattttataggtatcaaagcaatggcttttcttttgcaacagttaatgtatttattaacttaataattactttatgtcttctataaaccaggctgttaatacaatgatgacaaacaaaactggcaagatcactaaaaaataagtgaataaacaaataagtagtaaaataaggtaagaagtaaatatgtaaaagagataatttcaagcataagtgcaatgtaaataataaagtaagcatttaaaattcaaaagtgaggaaatgacatttgatttaagacttaaaagtaattacaaaaaataaa

SEQ ID NO: 145 - DNA, 2488 bp, Homo Sapiens
cgaccagcctgtggcgtggttggggctccggaagggcgcgcgcgagcgcttttttgggaggacaccacaggtggacgcctcagctgatcgtcctccctcccggggaccctgccccgagtcgccgagtagccgcagagtcgcctccgtcgccccgccgcccctgtgtttcggacatggccgcacgccttctccgagggtccctacgcgtcctgggcggccaccgtgcgccgcgccagctgcccgccgcgcgatgttctcattccggaggggaagaacgtctagaaactccttctgctaaaaaattaacagatataggaattcgaagaatcttttctccagagcatgacattttccggaaaagtgtaaggaagtttttccaagaagaagtgattcctcatcactcagaatgggagaaagctggagaagtaagtagggaggtttgggaaaaagctggaaaacaaggactgcttggtgtcaatattgcagagcatcttggtggaattggaggggatctgtactccgcagctattgtctgggaggagcaagcttattcaaattgttcaggcccaggttttagtattcattcaggtattgtcatgtcctatattacaaaccatggctcagaagaacagattaagcactttattccccagatgactgcaggcaaatgtattggtgcaatagcaatgacagagcctggagctggaagtgacttacagggaataaaaacaaatgctaaaaaggatggaagtgactggattctcaatggaagcaaggtgttcatcagtaatgggtcattaagtgatgttgtgattgtagttgcggtcacaaatcatgaagctccctcccctgcccatggtattagcctttttctggtggaaaatggaatgaaaggatttatcaagggacgaaagctacataaaatgggattaaaagcccaggataccgcagaactattctttgaagatatacggttgccagctagtgccctacttggagaagagaataaaggcttctattacatcatgaaagagcttccacaggaaaggctgttaattgctgatgtggcaatttcagctagtgaattcatgtttgaagaaaccaggaactatgttaaacaaagaaaagcttttggcaaaacagttgctcacctacagacagtgcaacataaattagcagaattaaaaacacatatatgtgtaacccgagcatttgtggacaactgtctccagctgcatgaagcgaaacgtttggactccgccactgcttgcatggcgaaatattgggcatctgagttacaaaatagtgtagcttacgactgtgtacagctccatggaggttggggatacatgtgggagtacccaattgcaaaagcttatgtggatgccagagttcagccaatctatggtggtacaaatgaaataatgaaggagctgattgcaagagagattgtctttgacaagtagacatctgcccacatcctggagtcctattacagctaatctcgttttaaatctgctcaagataaaatgtaacttggaaagcgaggaaacactaaacatgtttttacctgctctctctatagagaaggaaataaaatataaatataagattaacacagtggaaggacaaatctttgaagccaaaattctagttttccaatataaggtttaacttacagttttttatgtagccaaaggtaaacggttttctgaatcttgcctaggtgtttcatttatctctaaaattctaaaaagcataaatcattcaaatcttcaaaccaaggcagaaataattttatgtcgctatagtataaaaacattaataagatagcacattgacttttaaagggaaaagtaaatataacttagcatgtaaactcatttcggctaccatttgctccaaattccctagaacagtggtttttaccactgtactccaaccccgtttttaagcaatggaactctttcttcaaacaaaagcttatgcagaacatctctgtgaaacgctgctgagtgagaactgctttcattgaagctggaagccatcataccttactgccttgaaacccctaggactcagctaagtatttgcctaaccctgaccagggaatgccttggttctgtcaattgctgacatctgagaacacagaataatccatcatttttaatttcaagatattggtacattttataggtatcaaagcaatggcttttcttttgcaacagttaatgtatttattaacttaataattactttatgtcttctataaaccaggctgttaatacaatgatgacaaacaaaactggcaagatcactaaaaaataagtgaataaacaaataagtagtaaaataaggtaagaagtaaatatgtaaaagagataatttcaagcataagtgcaatgtaaataataaagtaagcatttaaaattcaaaagtgaggaaatgacatttgatttaagacttaaaagtaattacaaaaaataaa

SEQ ID NO: 146 - protein, 430 aa, Homo Sapiens [sequence omitted]

SEQ ID NO: 147 - DNA, 932 bp, Mus Musculus
tgttgtggtcgcttcgccgaagtctgcagctcgaagagccggctctgtcgcttcccatcgccatgaagtggatgtttaaggaggaccactcgctggaacacagatgcgtggaatccgcgaagatcagagcgaagtaccccgaccgacttccggtgatcgtggaaaaagtctccggctctcagattgttgacattaacaggaggaagtacttggtcccgtcggacatcaccgtggctcagttcatgtggatcattaggaaaaggatccagcttccttccgagaaggccatcttcctgtttgtggacaagacagtcccacagtccagcctaactatgggacagctttacgagaaggaaaaagatgaagatggattcttgtatgtggcctacagcggagagaatgcttttggcttctgagaatgcttttccttgctgggctacgtgcgcccttcctacttgtgtctcttgtaaataactggctgttctcagttactctgccggagcctccacacagacctactagtgcatttgcaactggatttatttcttaatatattggaagattttgtttccttagattagtaaattatcatacagagttttattttcagttttctttttgggcactgtcctcatggctatatgctccagggaacctgtcctctgggaatcatatttaatgaagatatttccgtaatgaagagaggtaggtatggtggtaaagggaaaaggaggggctgatgcatagttctggattatgttgaaagtgttagatggctaagtattaaaagcacccagattaaatccttagcaatcggaacacttgcttcactagatcttgccaactgcaaatcatgttggactgagctaatctgttcttctttctgagactattaaggtaaataattaacaataaagcctccttataaaggc

SEQ ID NO: 148 - DNA, 932 bp, Mus Musculus; identical to SEQ ID NO: 147

SEQ ID NO: 149 - protein, 117 aa, Mus Musculus
MKWMFKEDHSLEHRCVESAKIRAKYPDRLPVIVEKVSGSQIVDINRRKYLVPSDITVAQFMWIIRKRIQLPSEKAIFLFVDKTVPQSSLTMGQLYEKEKDEDGFLYVAYSGENAFGF

SEQ ID NO: 150 - DNA, 56192 bp, Mus Musculus
  misc_feature (1)...(56192): n = A,T,C or G
gcaaacgcgcagctcgcgtccccacggccggccgcggcgtgatgcgcacggcccggcccgtgacgccgcggccgtccctgtccccgtccccgcgtccccgccgccatcgcgcgcccggctccgggatcccggcgccgggcctcgctccccatggggctgcgccgctggctacggagcgcctgctgctgctgcccgtgccggtgcctggaggagcccgnnnnnnnnnnnnnnnnnnnnnnnnnnnnnnnnnnnnnnnnnnnnnnnnnnnnnnnnnnnnnnnnnnnnnnnnnnnnnnnnnnnnnnnnnnnnnnnnnnnnnnnnnnnnnnnnnnnnnnnnnnnnnnnnnnnnnnnnnnnnnnnnnnnnnnnnnnnnnnnnnnnnnnnnnnnnnnnnnnnnnnnnnnnnnnnnnnnnnnnnnnnnnnnnnnnnnnnnnnnnnnnnnnnnnnnnnnnnnnnnnnnnnnnnnnnnnnnnnnnnnnnnnnnnnnnnnnnnnnnnnnnnnnnnnnnnnnnnnnnnnnnnnnnnnnnnnnnnnnnnnnnnnnnnnnnnnnnnnnnnnnnnnnnnnnnnnnnnnnnnnnnnnnnnnnnnnnnnnnnnnnnnnnnnnnnnnnnnnnnnnnnnnnnnnnnnnnnnnnnnnnnnnnnnnnnnnnnnnnnnnnnnnnnnnnnnnnnnnnnnnnnnnnnnnnnnnnnnnnnnnnnnnnnnnnnnnnnnnnnnnnnnnnnnnnnnnnnnnnnnnnnnnnnnnnnnnnnnnnnnnnnnnnnnnnnnnnnnnnnnnnnnnnnnnnnnnnnnnnnnnnnnnnnnnnnnnnnnnnnnnnnnnnnnnnnnnnnnnnnnnnnnnnnnnnnnnnnnnnnnnnnnnnnnnnnnnnnnnnnnnnnnnnnnnnnnnnnnnnnnnnnnnnnnnnnnnnnnnnnnnnnnnnnnnnnnnnnnnnnnnnnnnnnnnnnnnnnnnnnnnnnnnnnnnnnnnnnnnnnnnnnnnnnnnnnnnnnnnnnnnnnnnnnnnnnnnnnnnnnnnnnnnnnnnnnnnnnnnnnnnnnnnnnnnnnnnnnnnnnnnnnnnnnnnnnnnnnnnnnnnnnnnnnnnnnnnnnnnnnnnnnnnnnnnnnnnnnnnnnnnnnnnnnnnnnnnnnnnnnnnnnnnnnnnnnnnnnnnnnnnnnnnnnnnnnnnnnnnnnnnnnnnnnnnnntgaccttttgccttctaccctttcctaagtggccttgtggccccttttcatctcccttttgcgagtcaggacttggaattatcatcttgttatctggtgaggtgtttcatgaaatatatctagatacccaaggcaccacacacacacacacacacacacacacacacacacacacacacacacacaaatacacacacacacacacacacacacacacactctgtcttactatgtagacctggctgacctctaactcagagatccgtttgcctcctgggtgatctgattaaaggcgttcaccacccctcccggctaccatactatgtttggttgtttttgctaatagccctctcacttagattttgagattactttgggcttggagaaatctaaattacctatctttaatttaaacagcaaaagctaaccgtgtagatttttatctcaggactttagactctaggttcttatgaaatacagccttcaatttactttcagccattttttttgttttttgtttttgttttttttctagtgcttttttttttttttattcttttagaattgctggacttcaggtgctttttattttgaaattgagaccttctcctgtcttgctttatgctcagtggatgacagtctgaattttgtgactttctttctttttttaaaagaagatgaagttagctaggcatggtggaacagggtcatgatcatagctcctaggctgggaggcaggagagtcaggtgttcaaagctgccttggccaaagaaatctaaacacaacaccctatctgaaaagaaatgtttaaaatttacgaaggtggggctggagtggctcagtgattaagagcactggttgctcgtccagaggtcctgagttcaattcccagcaaccacatggtggctcacaaccatctgtaatggaatctgatgccctcttctggtgtgtctgaagatagcgacagtgtactcatacataaaataaataagtccaaaaaaaaaaagttaggaaggtgccagggcagttgtggtggcgtacgcttttaatcccagcaggcagatctctattagttggaggccagcctggtctacagaaaatgttccaggattgccaaggctacacagagaaaccctgtctcaaaaaacaataacaaaaaaccccaaacaacaacaacaacaacaacaataggaaggtatcatcagttggagcagcatagcgaagcgttgatgagccgggctacctgggaggagtcaggtgagtgggtggctggccgtgagttattaaggttatttgtgtcttccacagcttcctcgtgtctttgtgaagggtgatgatgcctatgcatcctgcagaggctctcggggagaaaggaagggaggtcatacatgccaagtgcttaatagagtgtctgacaacacggcaaatactccataaattgtaattagtactaattttcatgttatgcttctgagcatgtgagtgtgagtgggcttgtgtcatgtggtttagtgttatcctggcgccatcttgatgataattatttcggaaggccagcttactaatgggcttgagatagtggtatacatgtgtctgtgggtactcacttgttcttttctacccaagttatcagaagatctggtttgaattcattgttttagtattttattattgcatatttatgtgtgtgatattgatatgtttgcatgtttatatgcatggtcacatgtgaatgggtacgtgtgtgtgtgtgtgtgtgtgtgtgtgtgtgtgtgtgtgcaggcatatgtgcatctagaggcctggggttgctatcacgtgtcttcttgactgctttcttccctatatgttgaagcaaggcctctcacttgaattctgagctcgctagctagcccctttgctcaggagatcgccctgtttctgcctcatgagctggaattacaggtggatgaccatgcccacttggcatttatgtgggtgctgaggattcaaactctagtatatgcacaaaatcatgtggctgtcggcatcttgagccatccttggcttatgtgtggaggtcagaagagaggaccacttgtgagagccggttctcttctattaccatgtgagtcccagagactgaacccacaggtcttcaggcttggcagcaagcaacgttaccctctgagccatcttttcagctggctatttggtactgtttaattccagtgtatttttaacccctctcaaaaaaccaaaacaaaaacaaaacgagcaccctgctaaccatcacttttcttattcttctcaccgctagttatggttaccaagcaaccagtaatctacgtctttggcattattgatttgcctattttgggtatttttttgtaagtgatcataattggccttttgtgtgtggctttctatacttatcatgatggcttcaagctttattgtattggggcttgtatcaatactctccattcctttttatggctggatattatttctttgcatcattctgtgtttatctgtccccctgttggtgggcatctggattgtttctgctttttcctgttatgaagagtgtgtgaacattcgtgtgtaggtttctgtgtagacatagtttcagctcccttgggtaaagctctcagagtggaattactgggtcatgggacctgctgttctgtttctaaagagcctaggtgaaacatttactgatgaggtcctgtgaccagatggttcacatcgctactgagaactttagttcctcgtgtcatcgtttttctttcccttatgaatttttttctttttcttttttttttcgagacaggttttctctgtgtagcccttgctgccctggaactcactctgtggcctcgaactcagaaatctgcctgcctctgcctcccaagtgctgggattaaaggcgagcgccaccactgcccggcctgccattttcttaagtcctctatatcacatgcagatgtctgaagagaagttgcctggacccccatttccttcttgactactgttgttgttgttattgttgttgttgttattactaaatagaaacagttggtaaaaacacagtttctggtacctatcccaaagagattgataaataagtctgggacaggcctgggattctgcattttaggaactataactgcttggtggtttggctgtgggtggtctgtggacctagttgtgaaacacacctaaaagctatgctcagggctggggagacggtcagcagggaaaaattgtgctctgctagcaagaggacagagatttggatctctagaacccatgtaaaacgctgggtgggtgtgtcagcccgactgtaatcccagtgcttagaaaactagaagaaagggacagaggattccccgagcagactggctagcaagactacctgaaattcagagctccaggtagcaaagactggcctccatataaaaggtggagaacaatcaggaaggcctccacacatgcacatatgcacataagcaaaagaaataaaaaacgatgctttaggtgcagtggaggggcggtgagcacgtgggacacacccatagagatagcatcgatttactggactccttgactcttcctgatcctgaaatcggacttctagcccaatggatagtgtgcttctgaaagttgcaagcggagagaattggctggtcccctctcagcgtgcttgctacctgttgccatgctggactcccttgtctgcgcttcctcatttccccttccctggagtctaattttgcctttgctgcctctgcctgtaaccaactagtgtgctggcttcctacctgctgcctttgctgatgtcatgcttgtcagcagagacacctttttattttctgtattccctcctcactttgtgtgtgtgtgtgtgtgtgtgtgtgtgtgtgtgtgtgtgtgtgtgtagagtgtgtgagcagaagacggaggaggatagctgatatcctgccttcaaaccacaaattatccttttgagacagggtcttactgtagacctaggctggcagccagcaagacccagtgaccctaccgtctaccccatcacagtactgggactgttcacagagtgtgaacgtggccatacttgaccttttacgtggatgcttgagatagatttgaactcagtcttcatgcttgtccagcaagagcttgtgagctatctctccagtttcccagtttctttcctcctgagaaactttgctcgggtttaaggcccatttcagtgactgcctttttgagcatatgttgggaagtctccctaagaagttaaggtgtctctctacttttactcttgggcctctccctgccttcggccagctgtcacagttataaggtgtatattttgaagtctggtgagactagaggtctcaggccagcatctggtgactgaatcctcgctttcatatgtcctgtggtacctggcacagtgagccacaatggagaaagagtcaaataaaatcatttttgactattagttatatttgttcatttatgaattgcttgctatctgttaaattttaatattatctttatttatttgtttgttttttgagacagggtttctctgtgtagccttggctgtcctggaactcactctgccctcaaactcacagagatccgcctgcctcccaaatgctgggattaaaggtgtgcaccaccacttgcctggctttaaaattattttaaaaaattataacgagtagtaaaacagacatcaacaattctgacatgtaccttaaagaatgataacacccctgtacctgtcacccttgtgtttgcctgacctagatctaaatgagatgagtttctagaattcttaaaccttatgtgcaaagtacttgttgcattcaggctcttgcataagtgatgtttatttgcatatattttcacttaattgtcacgtgaccaagagagatagaccttatctagttataagtaaggattcccgagcactgagaaattaaagaatgcattgaaggtaataactgataagagaatgtatgtgagaaccagttgtggggctggagagatggctcagcagttaagagaatggctgttctaggaggatgcaggtttcattcctgccacccccatggtggttcactgatctgatgctatcatctagactccaagggaaccaggcatgtacatggtgcacagccatacacgcaggcaaaacacctatgcatgtaaagcaaaataaatagatcttaagggaaaacaaaacaaaacattgtgatgacgcatagctgtaggtatgatgcttcagagatgcggaggcagaaggatgggacggacgttcaaggtcttttaagatgtggtgacacatgcttttaatcccagcattccataccagaggtgggtgtatctctgtggatctgaggcccacctgatctacatagagagttccaggtcagccaggatgacacagtggcacacacacacacacacacacacacacacacacacacacaccaaattcaaggccaacctcggttatatagtgagttcaaggtcaggttgggatataccagaccctacttgaataagaaagaagatgtgactccttgtctgtctggttaaaacctgtctgtagggggccaggagtggtggctcagctgttaaagggcgtgccttgcaggcatgaggtttgatgagcagcacccgtggaaacaaaagtcaggcatgatagtgtgtgcttgcagtcccagaattggagcctcctgttagctgtggaggtgtgggaatatgtcctccctccttccctttgttcctccctttcttcccccctccttctctctctcccttcctctttccccctctccttttctttttttctctttcttttctcctccagggctgtgaggttggaactcaatgccttgttcatacgagccaagtgctctcctacggccccagcccctgaagtagacattgctaacacaagacagtttaagaacagacataggcctggagaaaggactcggccagatcttagcacagtttatagtctgaaagaaagcacaggtttctttggatcatatactcactgttcactgcccgtgggatggaagtcttataagtactaatcacagtaacatgaccatatcaaccatccatgtaaggtttaagttctgagtgccattgttcccacattgaccacattcccaaaatagggtaaaaagtgattggattagcatccacaaaccattgcattgaggaaagagccacagtgcagatggcttgctctgagatggctaaatcattggccacccatcatctctcaagtactgaatgccttcatgttggttgggtcaacattttaagttgttaattataagaaacatgtgaggtatggatcaaggctgtcacaataacaaagtggtggcttacggccacagaaatgtgttccttcatggttctttgattctctcctaagccacttgaatggacacggaagcttccagatatcacgctccctgcttgtttcaggcacccacctgcagcttcaggatgctcacactggtgggcaagggacggaggagaaaggcagcccttcggtttttctgtggtgcctggataccaattatggaaaataaatgagacctcactttgctctagataattatcttgtgtccacagagggggtgttttaggaaggaatggaatgtttccgaatgtcccccaggtcgtgtttgagccagcctacttcaggatgagagtcgaggaggaagcatcgccgttagctcatcttccctgagcttgccctgacccttcatggcctgtccttcttgcttctggtgtaggaggcacagtgaaccaggctttgtatgtgttagttgaatattgccctaacccatgaggaggcattagtcagattctgtgaagtactgtaacaatggagctacctccctatcccacacacatggattttcacatttcagtaccagtcacccttgggagcattgtaagcagcaggccaacagtgaaaagtgaaaaagaaatataaaatatgtcacaataaaatgtttttcattttacagggtagtctcacatggcctttgagttgatgagttatgtatattaaaaaaaaagggcactcagccgggcagtggtggcacatgcctttaatcctagcacttgggaggcagaggcaggtggatttctgagtttgaggccagcctggtctacagagtgagttccaggagagccagggctacacagagaaactctgtctcaaaatgcaaaaaacaaaaaacaaaacaaaacaaaaaagaggcactcatcgccagcatgcgagaggagcaggggctgcctgtccagtctcaattgggattgttgctctgtgcctgccaacatatgaccttaaaactatcggttttagtatcgattttagggttaaggtaaattttagtgagcgggaagtcctgtagatgtgggttctgtgcataatgaggatcaatgtactcacagctccgcttgacacttgagaagctgaggcacagagagcttcaataacttgtggaaggcatgcataggcctgttacattttgttgtcattgtgagagcggagcccttctcgggtacagcgtatgtggggcttgtctccagctgcttgtatactgcgggctagacactgtgttttgagtgtgagactttccttgagttgtggtagccaggggttcagaatccccgagctgctttccctgtactgaggtcagagatgacctctcagtgtggaggaagggcggggctgacggaggctcatggcatttgaaggggtcatcccatacttagaagtgtatcacttcttacatgtggcagtttttctttttacaggatggactcacatgatctctgagttgaccaaatcacacccatccttagaagggcttacagaaagctggcagatgtgtcgatgttgctgagagctctcagcctgcggtccagacccaactcgctttgcagcaagcacactgttggttttgtagagccaggtctcagtagattgcaaagggttaactcatctcacccctgatctctgcagtgtatgcaggctgtggcctgccacagccctagccagaaagtgagtcacaggagtcagcggagacacacaagatcgcacgaatcccaatctagggctggcgcatataccttcttgagacctagagcaaagctggaaaataggggctgctcctggaacagggactcagagatcagccattcactgcttacaagatagctctggctggcctgggactttctgtgtagcctgggcttatccaaaactcacagggatcctccagcctccagcctcctaagtgctgggattagaggcatattaccacaaccatgttagtgtgtgggtgttttgtgtgcgtgcatatctgtgtatcctgtgcttgcttgatgcccaggagggccgggggagaacatcacatcttctggagctggagttgcaggtggttctaagccaccacgtgggtgagaggacttgaatctggtcctctggacagcagtcagtggttttaactactgagccgtctctccagctctcaacaaggatgattttaaaaggttttcttccctggtaactcacagcagcatccctgttctccttttgtgacttgtatcagttggtcatgtgaccctggaaggtccctagaaggtgacatttctttcagttagtcatgtgaccctggaaggtccctagaaggtgacatttctttcagttagccatgtgacactggacagtccctaaaaggtgactttttttctcttgtacatcatatggtctgctctaggtttcctagaactttctaaaagtcttgaagtgactatatcacttcacccttgtgtaaagaaactctgcttaaaatagtttattctgttagatatgtgagaatttttagctgggctaatatttgaactgtcatagttatatactatacattctattccttttatagttacatattgtacatcctattctttctttcctttgagaaaataattttgatgagacattgtacctaaagactatacctttttcaatgtttggaagtaacctgagtttctcttctcttctcttctcttctcttctcttctcttctcttctcttctcttctcttctcttctcttctcttctcttctcttctcttcttttctttctttctttctttctttctttctttctttctttctttgagacagaatctctctaagtagccctggctgtcctggaactcaccacatagatcacattggtctcaatctcacagaagtctatctgcccaatgagtgctgggtttaaatgcatgtgccactctgccctgctcattttagttttctaaaacgtgcgtgtttaaatgacattacagaccaaagacattcagaactgtagccaaccgctcaagataagagataggtgtcacatatcctctccccatcatatctagactttcgtcagagtcatttccttgtatttcttttttttttaatactttttattaggtattttcctcatttacatttccttgtatttcttttcagctttatcacctctctatgcaccttatagactcagcctggttttgcctttaaaccacacccacagagtcaaaccttatatgtccccacacaccttactttgctcacctattgcggtgagcttgcttcatggttcttcctgctgcacagtctgtattctagtacactcactctttctactaatgggcttgagagtggttcccagtttaacgctattaagtaagtttctaaggtcagcacagaccacagaattatccatctcctctcctgtggccctctcctggtcctgtagctatgttaagcagggcctctgtgaatcttactctctctgcctagaatattctttctctggcttcctgcatggatagctctcactttattcagatctccccccccccacccagtgattttatcagagatcttcccctgactgccatgtctaaccctgctcctcccctctctctgagcctctctgtgtatttcttcatagtcctggctgtcatctgacagaaacacatgtgcccatcatctggtcctcccacaagactctcagcctgattttcgttagtttaaccagctgaacaatgtgaacagttttcttggagcccagtgacagcctcaactctgtttggagccctgaggatttgggaaacaaatgttcagtaattgagcaaatatttattaagtacctattgtgtgtcaggtactgtgttaaataaacactggtcataaaccactgagcaagcactgtggctgggacctggtcttcatatgtcttctaatgatggtcagcaaaggacacaacagacagtgactataataagtaaattggggccgggcatggtggcgcatgcctttaatcccagcacttgggaggcagaggcaggtggatttctgagttcgaggccagcctggtcttcaaaatgagttccaggacagccagggctatacagagaaaccctgtctcaaaaaaaaaaaaagtaaattgggaattataggtatgcagaaagaggaagggtagatccgaagggggaggtgtgatcacagtaaattgttcagagcaggcttcaagagcaggtgatgtgtagaagggtagagtgggggagaggcagcaagtgtctgaaggaatcgggtgggcatatagatcagccaaggcagggggatgacatggcctcactgacattttgggagaatcaatcctgttggcttttggattaagagcagaaaaaccagcttggagagagggctcagctgttaacagcccttgctgcttttgcagagggactgggtttgattcccagcacccacccagtggctcacaactatctgtaactccactttcaggggatctgatgccctcttctgggttttctgggcagcagacacatatgtggtgcacttcaatacatacaggtaaaacactcatacacataagcttaaaaaaagaaaaactaatcgactggaaaaaaccaaactccacagggattcttatggcagacctaagcagccacggctcggggtgtagggcggtgggtattcttttgaacatagaagcagtgggattttctgatacactggaaataggggttgagggattcagggtagctttgtggccttgatctgagcaacgtgaagatggcgtgggagtggggaggccactggtagcaaggttcgtgtttgtatcctgtagaggtagtgccgtctgttagacatctcactggagagagggaggctaacactgggagagatgctcaatggggtgctgatttagggattgtcctaatgtggatagactttaaaggcgggaggctggatgaggaaggcaggagtccaggcaagcagaggggagggggcgggtggagcctcagcctcctgagcccttccagtgtctccccagctggagggaatgggcacagtgctgccctgctggctctgcagggtctcagccttgggtcctcatcctcatttccagggatatcacatctagtcttgtgtgaaggtgagccagggcccagaaaatccccacagcatttaaatgaacaagctttaaacttgaggcaacatagagacagactttcaatacatagctgtggacattttggaactcactctgtagactaggctgaccttgaactcaaaaagatctgcctacctctgcctcctggtgctagcattaaaggtttatgccactatgcctggcttgggtagcagatgtttaaacactggatcaagtagggttttataaaagaagataaaaggctagactgccttagaagtgaaggaaggatggaagaatgaagagggaagggattggaggaagagagcacaaaagggagtgggagggaggacaggagagacagcgagggaagagctcttagagtccccggctccatcacagagaagggccattgtaagggactggccaggccctacttggacaaggaggccttgggcagagcaggggagatcatacagcttctcgaggcctgcctttctagactccggctttgttcctgtccctggtcatagcttcagtcttagatcagccattgttgacccaaggcccaggatcagagcagtgaggtcattggaacttctggccagcagccatcccgtacctgtggtatcttgtagctcttttcaaaatctttttacacagggtccttggcatagtgaggaatcccccaggctttccctgtaaatggctttcatgctgacaggcacttggcaaccatgtgcccagcagacttttacctacactgttgaaagaagactcccgagcagtttgggtctcatgccctgaggtaaggtgaggatgaaatgcaagacctctcccctttgggagtgagagtggcttctgcacggggtgcaacatctgagcagcttctcaagtgccccaggttcattaaatatttattatcagcagatggtggccaggggcgaagcgactgctctcactttctttagaccctttcagacttggtttataggagggaggaagagagagggggaagctgctggctggctggaagtccccttccttcttcctcccaagactcctagggctcctgccctaccccccggcccccaacacacacacagttcagttcacacgcctgccctgcgcacttcatgggcagggccttacagaggtcccggagctgtgtttcctcaggtgatttgctttattcgtttcagtctggcctctcctggctgctttcagagtgaggtaaattgatagagttgctggagtcatcccggagcctgtggtgatcaagactgaggactcaggagctggccagacaagacctgtctaaagagctcgcagccatggctctctctgaagtatgtgtgtgtatgtgtgtatgcacgcacatgcacttgtgtgggtgtatttggagaccaaagaacggccttggtgtcattcttcaggagctgtccatcttccttttgggacagggttcccttgccaactcagaactcaccagtagtctgggctgggattacagccttaccttaccatacatacctgtgctgcagaggcagccagtttccacactgagtgagctattcttccagccccttgactgcccttttggaaatcattgctcgaataatcagttatttagtggcaggagtccaccttccctctgattctaaagaagacttagtagtactgaagaacatggccacttgggccctggtggggagatgtcggggtggggtggggtgaggtggatgtggctgtccagagacgggtgggctcagatgggggcatctgatgaaggagggcgtgaccctggagaggtttactcagggcagcccccggtgggtcttttcctcctttctattgtctcctgagtttcagtgactaggcagagcttgagcctctccatgggctaacttcaaaaccgtacccttaattagaactctgtagaccctcctgcctctgcctctgcctctggagtgctagcatcaaaggcatgtgccaccactgcctggcttatatgttacgtttttaaccttcctattatgcatctctctagctggcatctatcattggatgaagtgactgcacgttgtgtgtgtgtgtgtgtgtgtgtgtgtgtgtgtgtgtgaaggggtggggcaggagagagcaattcagtccctaagagatgattgccctgccttagggctaggggcatccagttactgtcattgagtaattgatcccacttaggggatgagctcaccatgaggcagtctgtctgtgagtgaggcttctgtgttcctggaacccatgtgactataagtcgagagaatattagaaatgtctaggctggagtccaggagatccagagcaggatattgtaaaagctgacagctggatgttgctccagtctggaaagcaccttacttatcttatcttcatgcttttggtcttgagggatgagataggttaggtaaattcagtgctaatcaactttgtattgccggtttttcaacagacaccccttaaatgattaacatgcccatgtgcagactagaacgagaatctgaagttgtaagacaaaggagacaaaggaaaacagaagacgggcacaccaagctctatcccgctcttggctgcccatggggcctccaagagaagggtcagcactaatgagcaaaaccggtctctcaactcctgctgtgacatggctgctcagtgactcccagacaagaacctcacctgggaagattgtcagcctttcctcggagacgtttagttcttagctaacaagtgggatagtgaccctcacccttcctgtcccaggcggctgtataacaggaggggtggaatggaagaacccttgatacaagtgtggagtctaaggtgccacggcttacaggctgcaagagctagtaggcaaaagggaccccccgctcagccgccatgcttctcaccgtcatgctgatgttggacgaagcccctgaagctgtgaacaagcccccaattaaatgttttgtaagagttgcctttgtcatggtgtctcttcacagcagtagaactgtgactaaggcacacagtcctcctcatgtgacagttgattgtgacactgcccccaactatgcaatttccttattcctccttgagagttattgctctaccaccctttgatctgacctgtcacagctcaatgggacagaagcctggactagcactgtcctcagcctgacatcaaatcaccctgcgtcttcactgtctcactgtagtgtgggtgcaagagcttgaatttccccagcctgtgggtgcctggggcctcctagtgctgatgccctttcttgagcagtttttcccaatgggattcttggccctcgctcctcactcctccgctcctcctttgagtgaaaggctgatgttgtcgccataagagcgcccaaatttccttctcctttcatgcagtcgatcacttcttcctctctgctctcgtcattctgtgctgtaaattgttcttaccttcctctattgtaagggcacatgcacaaagtactcaggtatgtatcaaagtctgtgattgtgataaataactaccagtgtaggtttgcatgaatgtttgagttcagcatgcttattgaagtctttttgcacagagcagcaaggcagctttaatcgcagccccttcccattccctctctttgtttgttttgacacagggtttctctgtgtagtcctggctgtcctggaactcactctgtagaccaggctggccttgaactcaaggagcctcacctgcctctgcttcccaaacgctgggattgaaggatgtagctagggatcttaccagcactgttcagtactcagcagctaggtcctatgccggctcaggtggctggcctctgattggccttggctccaacatcctcctcaccttttgccctggctttcttgtgtgggccctggctgtcattgccattgctgaggactggctcgacagcctggtctgcacctgctcactctcccccagggcatctctcctggttcccagtctggctcttgcttcctgttgcgagatttccttgatgccagcttccgggagtgtcatatttgtggacctcttgatggttgccttcagcctacctgccatttaccctcaatccctccttcccctcggccgtctgttcttctggatgtcttctgcatgttttgtttgccatgctctcattttacacacactacatgtgcgttcccgtggccaatgggcattctagttctgcctcagaatggcatcactctgtatcctggtaagtcagtcatagctcagagggactctgactcccctcgcccccttgcagccgtctcccacctagttcaactctagcaccctaattctgccgtacggagccatggatgggacagccttcatcagctccatgctgccattcagatcctgacatctcttgtctctcactcaagttatctgaattgcttatgtttggatgtgtgcacttattctggtgctaaggatcaaaccagggcctcccacacctcaattacatcttcgttttgccttccccttcctcttttttttttttatacatggggtatctctgtgtagcacaggatggcccaagcttgctgtgcccatgtctagttcctcaactacatagtttttttttaaaaaaaaaaaatctcgccgggcggtggtggcgcacacctttaatcccagcactcgggaggcagaggctagtggatttctgagttcgaggccagcctggtctacagagtgagttccaggacagccaaggctatatagagaaaccctgtctcgaaaaacaaaaaaaccacaaaaaaaccaaccaaccaaccaaccaaccaaacaaatctctggagtcctttcctgcgtagctcaagcaatccccatactttacctggtttttaagatgctaatacattcatcacagtcctgcctttgctcaggagtcaagcccgtactaacctagggaaaggttaggtgcatgaatgtgcgtgtctctagccctgaacttcctccccagcttctctcacttcttccagtgtttcctcccgcacctcccttgctggcagctctgttgttacctgcctctgtaccgttctagtgtggtttctccatttgcctgcccagtgtctgctgctgccaggatctgctgccagcatcctagatgtgctctcccccgcctccctttacagcacttatcatagtttttaattattagccatgtgatcacccagtagcaagctcttactggttttactgaggatgggagacaggagtcacgaccatatgcccacacttttactgagtcccgtgattaaggtgtagtcacccttcatacatgttattacatgaagtgagcagctccagtgtggctgactgtcctgtccttcagaagttaactagggctatgtacaggcatgtcctgtgtgcgatgcttcatcaccagcctccccaaggccaaacatgggtatactttatgaagaaaaaatcatgaaacaagagtatggaacaaagagactgaattttcctttctctgtctgtctgtctgtctgtctgtcgtgcatgtatatctatatgggcatacatgcacgtggtagtgcaggcacatgggtacaaatgcatgtggaggcccaacattaatgtcagcagatcatctccttctgtcccacctttttttgataaggcagagtctctcagtcaaacacagaggttgccgatatcacatggctagtcttgctatccagcttgctggagggatctttctgcatcatctgaggctgtaattacaggtgggctgccaaacacccagctttcacctgggttctggagatttggactctggtcctcacccttgtgcagaaagtgggatttttgttgttgttgttgttttgtttttgtttttctatgtagccttggctgccctggaacttgctaggtagaccaggctagcctcaaacacatgaaggtcaacttgcctctgcctcctgaatgtggaattaaagatgtacaccactacacctggctccaataaaaacaaacgtgcatgggtgttttgcctgcttgcacatgtgtgattggtaccctttgaagccagacgagggtgttggataccttggaactggagttacagatggctgtgaccctccatgtggatgcttggaattgaacctggctcctaacagctgagctatctctccagccaggaaatgctttaatccactcagccatcaccccagtctacagctgaaattcttagttcttgatcattcagagtatatgggtgtacatatttgttgcttagggtttaaatgttttcttggggctgtgtctcccagataacctggattcagttctaagcatccacatggcagttcacaactgccggtaattcccattccagaggatctgaagccatcacacagatatacctgcaggcaaaacaccaatacacataaaatagaaataagtaaatcataatttttcctatctatctatctatctatctatctatctatctatctatctatctgtctctcttttgcctggatttatgtctatgcaccacaagtgtgcctggtgccacagaggccagaaagggcatcagatcccctggaacaggagttacagatggttatgcgctgccatgtgacctgcaccctgggttctctggaagagcagccagtgcccctaactactgagtcattttcccagacccaggcttgtttgtgtatgtgtgtgtgtgtgttgctagacacccatcttgccatccctttttggctattttctttctttctttctttctttctttctttctttctttctttctttctttctttctttctttctttctttctttcttatttgtaagtacactgtagctgtcttcagttactccagaagagggcatcagattttgttacggatggttgtgagccaccatgtggttgctgggatttgaactcgggacctttggaagagcagttggcactcttaaccactgagccatctcaccagccccctttttggctatttttaaagtgattaattaattaattaagtaagtaagtttgttatttgttgtgtttatgtttagttattaaaaataacttagacctttttgttatagataagttacatgtttttatttatattgtaagatttacatatacagtatataacatatatggtatataatatatacctataacaaaatccttactctttctttctttcacagtggtaacaatccgtattcctcctttggagcgactctggagagggatgatgagaagaatttatggagcatgcctcatgacgtgtcccacacagaggcggatgacgataggatcttgtataatttgatagtcattcgtaatcagcagaccaaagactcagaggtaaatccccttctgacaccttactatgaacagcttactatgcccagaaatggctattacagggctggggccggggttgactgtcagcacagtgtctgttgtgcaagggtgaggacccaagcttgatacccaagagctcacataaaaaagctgggcatggcagcacttgcctgtaatctcagtgctgaggaggaggctgagacacaggaggatcactgggtcatccagtccagccgaatccgtgaactccgggttcattgagaggtcctgtctcaaaagatagggtggaagactggagagatggctccgtggtaaagcgcttgctatgcaaggctgttgacctaggttgggacccgcagagcctatgtagaagtcacatgaatctgtcatcctagcatgcccctgctgggagatgacagcagagacagaattgccagaagctcgcaagcctgctggcctggaaatacacagcaacgaacagtaggaaagaccttgtttcaaacaaggtagaagcaaggactgatgctggaggttgtcctctgacttacacacacacacacacacacacacacacacacacacacactatggcacatatgtgagtgtgcacctatgttcactcacatacgtatacacagagccaaggtggcaagcatctaaggatctactgttaacccctggtgtatgtacacacgataagtaaaaagaaatggtaattgcagggagaccagctggaaagaaagacgggagcatgactatacagccaggtggtgtggtccagggctatcaagaagtctttctgcttcatcctgcttggtagtagggactcagcctataggagtggaaggctccctataggaggctgagttatgtgaaatgaaggacatattttagtagtatgcattaatactggttaattagggttaatcctgatagatttgcttgatagcctggtaagactcattttgaagtttttgttttttttaaagatttatttttatttatttcatgtatgtgggtacactgttgctgtcttcagacacaccagaagagggcattggatctcattacagatggttgtgagccaccatgtgtttgctgggaattgaactcaggacctggaagtgctcttaactgctgagccatctctccagccccattttgaacttttatcttaacagttacacattacatgttgactgtaatgaatgcccttgaatggcaatgagaaggatggcttgatatcttacatcatttatctcttattttcccaatggtttaacaaaccatggttagatagttgagattgaaattcgaagggcagtttgcatttccacgagttctgagtcagcaggacctgaactattggtgtgtgtgcctttgtagcatcctgcctagcttttaggagtaactttagaagttcacatgttttggtgttttggttctggtgtgatttgattgcttttggttagaattggaatggggaaagatggcgtttctctggttctgatggcccagagctttctgttggtatttagcatctcacttagggcggaggttctcaacctgtgggtcgaaaccccatttttgggggtggggggtgtcaaacaactccttaacaggggtcatctaagattatcagaaaacatagatattcacattacagtgtacaacagcaacaaagttacacttaggaagtagcaatgaaataactttatggttggatgttcaccacagcatgaagaagtgtattagagggccgcggccttaggaaggttgggaaccacttcacttggagggtgtttgcagctgaatcctgcagctctcctagggggagttcttgtctctgtcttctgagtgtctctgcttttgaaatgacaatccaggaggccataggagccgcagaacactctccccaagtgcagctttcgaagtgagccctgtatggatgtccacccagaggggtttgttcatttagtcttgttcaagaaatgtattgagctttactcttggagacagggctacacagagaaaccgagaaaacagagaaaattaaaatatctattcattcacagggcttccctttttgaaaaaaatataaaagtaatatatgcctaatttaagaagcttgtattttcttttaaaaagtgaaatgaagtcatataaattattcatttctcacagattggactgtcctctgcaccttgttttttgttcttcttagtgtgttgtagatacatttccatttctatatgcttacttttttttcctccttattgcgtttggagactgtctggtattctgttgtatgaatttactactgtttattcagtggtccatattgctattgagggtaatccttttttggctattagaagctatactgcagttggtgtctagatagatttgtaggaccttccctgtttttctcaggaattgctgggatatagcatatatatttaaaatagaaactgggggtgtagaaagaaggctcagtgtttggcttctcttctagaggactcaggttctgtttccagcacacacatggtggctcacaactatttgtaactgtagtttcaagggctctgatgtccgcctctggcctccatgggcaccgggcacccacatggtgcacatacatacatgcaggcagaatactcatacatataaaactaaataaaataaaacaatttaagtggaaactagaagaacatttcaaggtagaatggaggttgcatctgagatctcaccagggaataggttgtaattttagtgaatggtggggttccccccaactccccacccagcatcctgaatgctattaggaactcatgctgcctctatgggcacagttgctaagatccagacagctgcttgccatgctgagtgtgtggggcctaaaatgttggaacttttgctttttaaagtaaaactgagaaatctacattttcatatgaaatagccagatttttaaaggaactcatattagaaaacttgccggctaagcaaaatgttagcacattactgctgcataaggatatatggaatggagccactaggacttactgttaccactttgtgcagaatgatcgcacagtggactaaccattgttctttatgaagatgaagctagcaagctggaatgctggtattttaagtctgaaaaattctatacttattactgtgcttgaagaggataacattggtacagattttatttaataaaacaggatttgggttttgaaagaaagaaattccacctaatacaaggaatgctaggcaattctgaatgtattgtttggaagctcaagcaatatattgaaggaactgaactgtttgtccttgagtaacggcagcaccaaagactcgggaacattggtacttaggattctctgaataatgggaaatgatttcagaagtgtgtgtgcgctagctacagtctctgcattaaatctggcgctgttagaggcttcctttaccctcctgctgaggggactttactccagatggaaaaggacgcagaagaggacacactatgaaggagaggctccagatttaacttgaagtgtcaaaaagtgtgaaaagtaacatcgtttgcatctcacagacagaatttgcttgcttttatttatgcaagctctcaagcgctagtggaaaccagacacggagcaggagaaacgacgcgctgacagccctgcaagcggtgaaaaatgatcctttgaatgatgctgagaaacgcttcacgtttgactgagaagtagcgaatagtctcctgctcatgtcagtaaatcacaatccttatgctcttgctcactaaactacttctacttcatatactacttagttctaaggagcttaataattgctagtgatttactgttgatgcacccgattcattcatttgtaaaagcaatagtaacgatactgattttcttgaacataatactgaaagcagtgcttagcgctaggctcctcttttgtgtgtttgtgtgtgcgcgccaatgttaggatgccctggtaacaactcggtaagtaagcacagttattgcttccattttaagcaacttactcaagagcacatacctgttacgtttaaagccaggatttgaatctgggctttaagagtcccaagacgtaatacttgggaggaacggacaccaccagtgcctaaattcagacttagatcgggtttcagagagcatgagcagaaacgtgttgaagccagcagaggaaaggcattttcacgagtgaaagaagtgccatgcttggtgggaggccggcggccacatttcaggaagtgtgtctcagcattatggttttccatggtgaccgatgctgctcgacatttgccaagccccgccaacagctctctgaggactgggtacttaattctgcagggctgggaataagtccaggatcttgaacttgctaggcagctgtttggccactgtgccatgtccccagttcagatttgacactttcgattaagagaattcatgttaaatgtcagagcattctccttaatgcctttaaaggcatagtcggaggacagaaattctctgcttacgtttttggcagatgagtaaccacatgatcaaaaatgtatgcagttgtcatgataggaacctgccaacttgtcacccaggtagtatttacacatcaacaggtgccacatggttaccagatgcttgtgtgcatggaataatcctgtagaaaccacattggcccaaaccccaggggaacagctagctaaatagtattagggttttttttattttaaatgttaaagacaaaatcataatcatagcaagagggctaggttctggcaccctgttagcaggcatggcacacagtttctgtaaggtttaaaatagtgtctggccttccttaggggctatttctagtgttggatcctatgttcaggctatcatgtccttgatccagaaagaaacagcagagtatagttgattgggatatttgcagagaaagaaagggctgacctgatcgcagaccaggctcgtggaggatccctggagtgcccggagacttgggttttccagtcgggctctgcattacttgccccagcaggtctccagagttgggcaaacctcatcctttcagggacacctgattgcctgcacatggcagagcattgcctagtgttggagatagggccgcaagtcacaccaaccacaagtcacaaaaccacagggggacgtttaagctgttctccagataattctgggttcttccaaatgctttttatgggggattcgaataatcagtctctgaaggcattcttttttgttggcttttttgaagtgttggggttcaacctagggcactagccaattgctctaagtctgagccaagcccttggtcccaaatgcctcagttctgcattttactttgctagcaactgttcggatctaggtgacctgatgagggatccggaaagcacaggagccgaggtgccaggggccccgccctgttttctgggtagcagtatttatgaagtactgtgctgtgtgctgagcagtgtgcgtgtggcatgctgtcctgacaagtattgagttctcctgaagctcggggagggggactttcagcaggaaagctaaaagctcaggaaactgaatcatctcaaagggttggaggaaaggggagggataactgcggtccctgcccagggctgtgtaacccagaaacctgtccgactagaaacacccttctggtccttccggtaagtttgggaaaacctggtctactttctggttaaagccaaaattgcctgtgtaaatcttgacttaatgctgtcaagtagacagtagagtctgtgtgtttacatggacacaccctatacagtgcaattagggtggtaagttcttaggtgattgtggggctattggggtgacatgcccctggtgctatggcatattctggatagtacagtccaccgaaccataccaggtcacaatctgcttattttaaaaagtatagctgtttccggatgtcaggattagcataccccgcattttttgttttacacatctgtgcgagccatgttaaccagcagagctgaggcagtaaactggcaattagatgatagcagagggcagggacatcattggacacactgtagcatgcttaatgtggaagatcacacacagctgggagggtgagagatgtattgtcaccatgctctaattaggcaacacctattcaactttagagtgactgtactgtttgttttcaagtttgggtcacagtcaccaagtctaactaggaggaaaggagatgtttgctaatatctagccaaaaatataaaccaagacttacctggacaggctgagacatagaccaccttgcctttttccttccttccttccttccttccttgcttccttcctccctccctccctccctccctccgttcctgtaaaatacacataacagcacttaccatttaattatcttctctcttttgaaatatatacaatgtgtttgtgtgtatgtaatttgtttgagtatgcatgtggaagctaaagacaaccccaggtggtatccttcaggtatgtctaccttggttttttaaacataatctctcactgacctggaactaagtagactagactggtggctcacaagccctgtccccactcagtgcagggattacaaacatctgcccccacccctggcttatattcttttctttatcttttttttgggggggaggacaaagtatgtgcatatggggaggacaatttgtaggagttagtcccctccgccctctgcttcctgagtgctgatgtcatgagcatgcgcccttacacctggatgttttatgtcccttaaaaacagaacgtttgtggaagtcacgggacagcttgttggagtgggtttggggattgaactcagggtttggcggcaagcaccttcacctgtgagccagctcgccaggccatgcttgcccctgcttccattggttcaggagacggaactcagggccttatgcttgcaggcacacagtctcccagggcattttcaacgctgaatgttctgtgtagtgacatttagcacgttcctagtctttggcagctatctattctttagtctccaggcctttgcgtatgtaagtctcagggcctaaactcaagtcgtcagatttgccagtgagcactcttacctgctgggccatctcagtagcctttgccttttgttattttattttattttattttattttattttattttattttattttattttattttttgtttaggagtctgtctttttccattgtccaggctggcctggaaatctctcaagcttgtctcaggcttgataacctcctgctttaggctgccgaacctgctgggattagaaggcaagggccgccattgctgtggggctgtttttgaggctctgtcctcattgacttccgtctgaagctgcaggagggaaggtttgtggaagtggtaaatgtacttacaaacaccagcagctctgtgatgtaggcaggaccagctgggcagaaactggccggcttcctccatagccgctgtgtcctgtccctgaagcagagggccaggcctctgtgggttagtgtgtgtgaggaaggctcttcttagtcggcaggtgggctcaagacaatctgctggtaagattctacctccgggtacagaaggcagatggagttgagaagaaactaaaactacaaatgtgtcttaaaagtcttattttaaaaacaaacaaagcaaccaaccagttgaccctgtatacattcaaaacactgaggactaatgccaagcttattgaggaccactgcccggctgattgattgattgatttatattaaggttaattttatatgtcaacgtatttgggctacaatgtacaggtatttggccaaatattctggggactggccgggtggctcagtgggtaaagtgcttgaggatctgagttcagatctcagttcccatattgaaagctggccgtggtggcgtttaccttccagctcagcggtgaggaggtagagatggaggacccctggttctcagaggccagcctctgcctgtatccctgttcagtgatcaccgggttccttgatagaccctgcccaactgtgtgtggtgctgaggatccagactcagggcctccagcgagtgcagcaaacgctttacccgtcagccactttcccagtgaaagtacagttagtacatcacaaatggctgctctagtaggtggtgtgcagcctggctagagaagaggatcatgggtatatatatctgagaaaggctgtctgtctgcttgctgaatggaaaggtgtgcctatctcatctgagtacacagatgctgctgtgcccttgtagtttccttactgcctggatacaattcagatgtgttaccttgtcgtcatgggctttatttaaagaaaaaattctccctagtacttatagcataatccgtgatgatttgccccccccccccgctccccccgccccatgcttttctaaactgattggctttgctttacttgagtgctctggaaactgggtggggatgagggagggtgtgtgtctatgagtggccgaagcaggctctgtggaactcctccaaagtggactggctcaagcgtgatgaagccatcggtcacatgtgtgtttgcagtgtcacgttagtcgcttgcagtgnnnnnnnnnnnnnnnnnnnnccttgtaaacattcctgccctgactcctgccctctgtcggtcttgcttctctcagaataaatgaaatcagctcttaattgcttgagaggctcgccacagacccactgggacctcctgctgtcagtgtgactcagctggggatcacgggagggttctgacgagtatgcagaagaggcttgcggcttgtttgctggctttgattgcacctgtgtgggaaataggagatccttcagttctggagggggtggagagctgcagctcagccttcaggtccctaggataccggggaaagggatcatcagggtgcagggctcctggatacctgttgttccatcagcaattgttacgcatgctggtttggctgtgccactttatggttgtgcagtttaagagtcagtccatgtagctaatgaataccagcaggcacaaataattgccaagtttaattatggatcaggtgaggaaaagtcacacccagcttttttttcccccctagtttattgtctttgttatcaaagctcttaactcggggtgattttctgtggacctgagttaagacgagctgagctcccccttccctaagccgtgtgtgtttcgttgtaagcagcttccagcgtgcagaagtgtgtgttgggaccacaggttgctagtactggctgtgcagtgtgtgactcagatccaggagatctgacacccttgatggttacccaggcccaggtaacccaggccagccatcccagaggggtgtgatggacgcagcctttcctacagccaccgcatcttatctgttcactcgtccaacggaatgtgattctgtttcttcaggcttcatttttacctgattttctttttttcccctagcttcagttgaccttaccagaaaaaatattgaaaataggtgcaaaagggtacatctagacgtccctcggggacgtggccttcttagctattcgctctggtctctttccaaacggccacataaactttgggggactctgaggagctctaagagtggggatggcaggggcttgcaggaaagacttgagactgtgggctgggttttaatccaggcttgacaatctgcnnnnnnnnnnnnnnnnnnnnnnnnnnnnnnnnnnnnnnnnnnnnnnnnnnnnnnnnnnnnnnnnnnnnnnnnnnnnnnnnnnnnnnnnnnnnnnnnnnnnnnnnnnnnnnnnnnnnnnnnnnnnnnnnnnnnnnnnnnnnnnnnnnnnnnnnnnnnnnnnnnnnnnnnnnnnnnnnnnnnnnnnnnnnnnnnnnnnnnnnnnnnnnnnnnnnnnnnnnnnnnnnnnnnnnnnnnnnnnnnnnnnnnnnnnnnnnnnnnnnnnnnnnnnnnnnnnnnnnnnnnnnnnnnnnnnnnnnnnnnnnnnnnnnnnnnnnnnnnnnnnnnnnnnnnnnnnnnnnnnnnnnnnnnnnnnnnnnnnnnnnnnnnnnnnnnnnnnnnnnnnnnnnnnnnnnnnnnnnnnnnnnnnnnnnnnnnnnnnnnnnnnnnnnnnnnnnnnnnnnnnnnnnnnnnnnnnnnnnnnnnnnnnnnnnnnnnnnnnnnnnnnnnnnnnnnnnnnnnnnnnnnnnnnnnnnnnnnnnnnnnnnnnnnnnnnnnnnnnnnnnnnnnnnnnnnnnnnnnnnnnnnnnnnnnnnnnnnnnnnnnnnnnnnnnnnnnnnnnnnnnnnnnnnnnnnnnnnnnnnnnnnnnnnnnnnnnnnnnnnnnnnnnnnnnnnnnnnnnnnnnnnnnnnnnnnnnnnnnnnnnnnnnnnnnnnnnnnnnnnnnnnnnnnnnnnnnnnnnnnnnnnnnnnnnnnnnnnnnnnnnnnnnnnnnnnnnnnnnnnnnnnnnnnnnnnnnnnnnnnnnnnnnnnnnnnnnnnnnnnnnnnnnnnnnnnnnnnnnnnnnnnnnnnnnnnnnnnnnnnnnnnnnnnnnnnnnnnnnnnnnnnnnnnnnnnnnnnnnnnnnnnnnnnnnnnnnnnnnnnnnnnnnnnnnnnnnnnnnnnnnnnnnnnnnnnnnnnnnnnnnnnnnnnnnnnnnnnnnnnnnnnnnnnnnnnnnnnnnnnnnnnnnnnnnnnnnnnnnnnnnnnnnnnnnnnnnnnnnnnnnnnnnnnnnnnnnnnnnnnnnnnnnnnnnnnnnnnnnnnnnnnnnnnnnnnnnnnnnnnnnnnnnnnnnnnnnnnnnnnnnnnnnnnnnnnnnnnnnnnnnnnnnnnnnnnnnnnnnnnnnnnnnnnnnnnnnnnnnnnnnnnnnnnnnnnnnnnnnnnnnnnnnnnnnnnnnnnnnnnnnnnnnnnnnnnnnnnnnnnnnnnnnnnnnnnnnnnnnnnnnnnnnnnnnnnnnnnnnnnnnnnnnnnnnnnnnnnnnnnnnnnnnnnnnnnnnnnnnnnnnnnnnnnnnnnnnnnnnnnnnnnnnnnnnnnnnnnnnnnnnnnnnnnnnnnnnnnnnnnnnnnnnnnnnnnnnnnnnnnnnnnnnnnnnnnnnnnnnnnnnnnnnnnnnnnnnnnnnnnnnnnnnnnnnnnnnnnnnnnnnnnnnnnnnnnnnnnnnnnnnnnnnnnnnnnnnnnnnnnnnnnnnnnnnnnnnnnnnnnnnnnnnnnnnnnnnnnnnnnnnnnnnnnnnnnnnnnnnnnnnnnnnnnnnnnnnnnnnnnnnnnnnnnnnnnnnnnnnnnnnnnnnnnnnnnnnnnnnnnnnnnnnnnnnnnnnnnnnnnnnnnnnnnnnnnnnnnnnnnnnnnnnnnnnnnnnnnnnnnnnnnnnnnnnnnnnnnnnnnnnnnnnnnnnnnnnnnnnnnnnnnnnnnnnnnnnnnnnnnnnnnnnnnnnnnnnnnnnnnnnnnnnnnnnnnnnnnnnnnnnnnnnnnnnnnnnnnnnnnnnnnnnnnnnnnnnnnnnnnnnnnnnnnnnnnnnnnnnnnnnnnnnnnnnnnnnnnnnnnnnnnnnnnnnnnnnnnnnnnnnnnnnnnnnnnnnnnnnnnnnnnnnnnnnnnnnnnnnnnnnnnnnnnnnnnnnnnnnnnnnnnnnnnnnnnnnnnnnnnnnnnnnnnnnnnnnnnnnnnnnnnnnnnnnnnnnnnnnnnnnnnnnnnnnnnnnnnnnnnnnnnnnnnnnnnnnnnnnnnnnnnnnnnnnnnnnnnnnnnnnnnnnnnnnnnnnnnnnnnnnnnnnnnnnnnnnnnnnnnnnnnnnnnnnnnnnnnnnnnnnnnnnnnnnnnnnnnnnnnnnnnnnnnnnnnnnnnnnnnnnnnnnnnnnnnnnnnnnnnnnnnnnnnnnnnnnnnnnnnnnnnnnnnnnnnnnnnnnnnnnnnnnnnnnnnnnnnnnnnnnnnnnnnnnnnnnnnnnnnnnnnnnnnnnnnnnnnnnnnnnnnnnnnnnnnnnnnnnnnnnnnnnnnnnnnnnnnnnnnnnnnnnnnnnnnnnnnnnnnnnnnnnnnnnnnnnnnnnnnnnnnnnnnnnnnnnnnnnnnnnnnnnnnnnnnnnnnnnnnnnnnnnnnnnnnnnnnnnnnnnnnnnnnnnnnnnnnnnnnnnnnnnnnnnnnnnnnnnnnnnnnnnnnnnnnnnnnnnnnnnnnnnnnnnnnnnnnnnnnnnnnnnnnnnnnnnnnnnnnnnnnnnnnnnnnnnnnnnnnnnnnnnnnnnnnnnnnnnnnnnnnnnnnnnnnnnnnnnnnnnnnnnnnnnnnnnnnnnnnnnnnnnnnnnnnnnnnnnnnnnnnnnnnnnnnnnnnnnnnnnnnnnnnnnnnnnnnnnnnnnnnnnnnnnnnnnnnnnnnnnnnnnnnnnnnnnnnnnnnnnnnnnnnnnnnnnnnnnnnnnnnnnnnnnnnnnnnnnnnnnnnnnnnnnnnnnnnnnnnnnnnnnnnnnnnnnnnnnnnnnnnnnnnnnnnnnnnnnnnnnnnnnnnnnnnnnnnnnnnnnnnnnnnnnnnnnnnnnnnnnnnnnnnnnnnnnnnnnnnnnnnnnnnnnnnnnnnnnnnnnnnnnnnnnnnnnnnnnnnnnnnnnnnnnnnnnnnnnnnnnnnnnnnnnnnnnnnnnnnnnnnnnnnnnnnnnnnnnnnnnnnnnnnnnnnnnnnnnnnnnnnnnnnnnnnnnnnnnnnnnnnnnnnnnnnnnnnnnnnnnnnnnnnnnnnnnnnnnnnnnnnnnnnnnnnnnnnnnnnnnnnnnnnnnnnnnnnnnnnnnnnnnnnnnnnnnnnnnnnnnnnnnnnnnnnnnnnnnnnnnnnnnnnnnnnnnnnnnnnnnnnnnnnnnnnnnnnnnnnnnnnnnnnnnnnnnnnnnnnnnnnnnnnnnnnnnnnnnnnnnnnnnnnnnnnnnnnnnnnnnnnnnnnnnnnnnnnnnnnnnnnnnnnnnnnnnnnnnnnnnnnnnnnnnnnnnnnnnnnnnnnnnnnnnnnnnnnnnnnnnnnnnnnnnnnnnnnnnnnnnnnnnnnnnnnnnnnnnnnnnnnnnnnnnnnnnnnnnnnnnnnnnnnnnnnnnnnnnnnnnnnnnnnnnnnnnnnnnnnnnnnnnnnnnnnnnnnnnnnnnnnnnnnnnnnnnnnnnnnnnnnnnnnnnnnnnnnnnnnnnnnnnnnnnnnnnnnnnnnnnnnnnnnnnnnnnnnnnnnnnnnnnnnnnnnnnnnnnnnnnnnnnnnnnnnnnnnnnnnnnnnnnnnnnnnnnnnnnnnnnnnnnnnnnnnnnnnnnnnnnnnnnnnnnnnnnnnnnnnnnnnnnnnnnnnnnnnnnnnnnnnnnnnnnnnnnnnnnnnnnnnnnnnnnnnnnnnnnnnnnnnnnnnnnnnnnnnnnnnnnnnnnnnnnnnnnnnnnnnnnnnnnnnnnnnnnnnnnnnnnnnnnnnnnnnnnnnnnnnnnnnnnnnnnnnnnnnnnnnnnnnnnnnnnnnnnnnnnnnnnnnnnnnnnnnnnnnnnnnnnnnnnnnnnnnnnnnnnnnnnnnnnnnnnnnnnnnnnnnnnnnnnnnnnnnnnnnnnnnnnnnnnnnnnnnnnnnnnnnnnnnnnnnnnnnnnnnnnnnnnnnnnnnnnnnnnnnnnnnnnnnnnnnnnnnnnnnnnnnnnnnnnnnnnnnnnnnnnnnnnnnnnnnnnnnnnnnnnnnnnnnnnnnnnnnnnnnnnnnnnnnnnnnnnnnnnnnnnnnnnnnnnnnnnnnnnnnnnnnnnnnnnnnnnnnnnnnnnnnnnnnnnnnnnnnnnnnnnnnnnnnnnnnnnnnnnnnnnnnnnnnnnnnnnnnnnnnnnnnnnnnnnnnnnnnnnnnnnnnnnnnnnnnnnnnnnnnnnnnnnnnnnnnnnnnnnnnnnnnnnnnnnnnnnnnnnnnnnnnnnnnnnnnnnnnnnnnnnnnnnnnnnnnnnnnnnnnnnnnnnnnnnnnnnnnnnnnnnnnnnnnnnnnnnnnnnnnnnnnnnnnnnnnnnnnnnnnnnnnnnnnnnnnnnnnnnnnnnnnnnnnnnnnnnnnnnnnnnnnnnnnnnnnnnnnnnnnnnnnnnnnnnnnnnnnnnnnnnnnnnnnnnnnnnnnnnnnnnnnnnnnnnnnnnnnnnnnnnnnnnnnnnnnnnnnnnnnnnnnnnnnnnnnnnnnnnnnnnnnnnnnnnnnnnnnnnnnnnnnnnnnnnnnnnnnnnnnnnnnnnnnnnnnnnnnnnnnnnnnnnnnnnnnnnnnnnnnnnnnnnnnnnnnnnnnnnnnnnnnnnnnnnnnnnnnnnnnnnnnnnnnnnnnnnnnnnnnnnnnnnnnnnnnnnnnnnnnnnnnnnnnnnnnnnnnnnnnnnnnnnnnnnnnnnnnnnnnnnnnnnnnnnnnnnnnnnnnnnnnnnnnnnnnnnnnnnnnnnnnnnnnnnnnnnnnnnnnnnnnnnnnnnnnnnnnnnnnnnnnnnnnnnnnnnnnnnnnnnnnnnnnnnnnnnnnnnnnnnnnnnnnnnnnnnnnnnnnnnnnnnnnnnnnnnnnnnnnnnnnnnnnnnnnnnnnnnnnnnnnnnnnnnnnnnnnnnnnnnnnnnnnnnnnnnnnnnnnnnnnnnnnnnnnnnnnnnnnnnnnnnnnnnnnnnnnnnnnnnnnnnnnnnnnnnnnnnnnnnnnnnnnnnnnnnnnnnnnnnnnnnnnnnnnnnnnnnnnnnnnnnnnnnnnnnnnnnnnnnnnnnnnnnnnnnnnnnnnnnnnnnnnnnnnnnnnnnnnnnnnnnnnnnnnnnnnnnnnnnnnnnnnnnnnnnnnnnnnnnnnnnnnnnnnnnnnnnnnnnnnnnnnnnnnnnnnnnnnnnnnnnnnnnnnnnnnnnnnnnnnnnnnnnnnnnnnnnnnnnnnnnnnnnnnnnnnnnnctaatgggatcctcagggttttcatagtcgaaggcagtgaatctgcctgaatctaatcctaccagagcgttgagcacggaatgccgggccctctgtatcccctcatccatgtctgatggttgccgagcctaaccttgtgtgcgccttgtgcagtatctaaaactgctgagtttgtgattgggataaaggtgttttgccctaaagatgccattttactcccagcacttgggacgcagaggtagtgaatttctgagttcgaggccagcctggtctacagagtgtgtttcaggacagtcagggctacacagagaaaccctgtctcgaaaaaccaaaccaaaccaaaccaaaccaaaccaaaccaaaccaaaccaaaccaaaccaaaagatgccattttacagcccgtctcgttcatttttccagctcttaatttcttctgtcccctcctcagtgctccctgagcctgtgtgagagaggatggcataaatgactctgggctgctactttgcagcgtggagagaagaaactgaacccgtccacagccatgctccatgtgaagagcctggtctgcccagtgcgttgcgttcctgctgggctgtcaggcaccccccccccccccccgtgggaaaggctgccctgacttgaggactgacttccttggattaaggttgaaacagcgtccccacctcctgaaccccactagcttgggatccaggattccctgggatggagacaaagtcctgaggttggaggccaaggcaccgcacacagacagttagcacccaagcagtctctgaggtggtgagggcagactgtgggcaccccggggatgcccagaatgccgttcccatctgatagacaatgtagggaattggagaactggtgccctcctctctgctggcagatccctgggtgatgttgaaacacagtccttcaccccactgcctctacctgcttctctgccctagtttctaaagggcagcttttgttctgtttctgctgcttcctacctcttttgacgcttgtggctgcagaaggctgagggcagagcgatataaaaccactgggaagcgaagcgagcagagcgtctgctcgttcgtccgtccttttccctgaagaccaagacgttctcatctgtctttcctttatttgtctgtccctgtctttatgggaacttctcatctgttgcactggtcactaggagagcattgggttcctggagttagagttgtgggctccctgatgtgggtgctgggaactgaactctggtctttggagtgagcagaagtcctctttcctgctgagccacgtcgccggcctcacatgctattcactttagtagtttaatatgtggtctagtttttaatctcttacctgttggaagtgatctttgggctatatagaaactagtaggtgtgcacactgaaacatttcagagtgacactctcgcggcacactctcctccctccacgtgcaggtggccgttcactctgctgcttttcagccagttgtggaagctgatgctgtgcctgataattaacattcactgtcttaccctgttttctgttgctaagaagaatatctgagatttaataataagcaaatgaaagacttttgttctggatcctgtttgggagagtggtgctgataggggggtcgggggcttgtgctgtcagctcacggcagacagcagagtggcaggagggcagtttcagaagtacagtacaccagggagccttcactttataatgaccctttctgaggcaaccaattacagtggtttgagcagagtgccctccacagtcttggttatgtgaacgcggggctcccatttgcaggtgctgcttggggcgggggcgttaggtgatccagcctcgatggagggagtatatcatgggagtggggttaaagtgtatagcagtgtggagggagctttgagagtgtgtagctgtagcctcaccttacttccactttactgtctgtccgctttgaacttgcagttgagggtgagatctctcagctttatgctcccccaccatacctccccaccatggtggacccgcatccctctggaaaccctgagcccaaataagcccttccttctgtaagtcgccttggtcatgccattttatcccagtaacagaaacaactaagacacccgttcagccctttgagatggctcttcatcctctcgttgagagtggggctcctgtgacataattcccacgagggtcccatcccgtccagtgctgttacatcagcagtgacacttcaacccaggagttggtggaacaagccatgtccgaagcccatagcatgggcggcgtgcttctgagggagtgcctttgcttgtgttcttcacaaggtgagtagtttccatcctatagtggatgagatagaaggcaccgaggccatgtggcttgctggtaacggatggagattggctcagatccagagcccgtgccctttgccgcaatcttctgcatcggtagctgtgacgatctgtaagaaacttttgctgtagagacctggttttaaagctcgcacttcacagatggatttgagacattttttgtgatttcagtgggtatataattagctcactgcggctgctggataaagtaccatgacctgggtggttttaacgacaggaatgtattctcccagagttctgtaggccccaggtctgggatcacagactggtttcttctgagggctcctagatgtgataatatcgtaccatcccgtgtctttacatcagtgtgcagggtacagtctctgtgtgcagatctgtgtctcgacttttcatacgtcattcttttatagtctcattggaataggactctcccctacgacctcatttctatttcattattttcaaataagggctcattttaaagaactgggagttaagatgctaacatgaatgtcttaaggaacacacacagatcagcccatagtggtgagcgtgtcagtaaaacatagctcttccttttggtatccagacacagcagtaaacgcagggtctgtgtttaaggatcttatattctactaaggggagaacaggtaagtatgatgttgggtagtgacaatcactttgaaatcgaatgatgggagagggtgagctctctgaggaaacagcctatccaggggctccaaggcactactacagcgtagtaggaagaggaggcaggccctgtggcttcagaggagcaagaaagaaccacgcagtcagggcgaggaggatttttaactttgccctttgcaaatgtttttctttctcactaattctggatgcattttgtatctgggaaactcattccttggagtcatgagaaagcttagcggtgacttcctcttccatccctgtgtgtgactaaagtctcttagccacccctagacatgggtaggcactgtctgccctttgttttcctggactgtgtttcctaggatgtttgtgcaacccacggctctgggaagtggatggaggttgggcctccttctgctacaaagggcggctaggctcactgtaaaaaatgtgtgagtcccctaacattggagtttctttcctctacatcactgggtctcagccttcctagtgctgtgaccctttgatacagttcctcatgtcgtgctgaccaccatgaaattatttttgtttctacttcataattgtaatttgctatgaattataatgtaaatatctgatacatgcaggatatctgatatgtaatcctggtgaaagggttgtctaacctcaaagggatcatgactgagagccactgctctaacgcagtccactgcatgtccaggtgtcttttgtccctctttgtgtaactgtgtagaaatcaaggcttaaggagatggaataaacatactgatacaggggttgcagaaatggcctgcattaagaatgcttaccgatcttaaagaggaccctgggtttggttcccagcacctatttgatagcttttaattgcctgtaactctagtttctaggcctacacacacacccacatccacatacaataaaaaatacatttaaaaagaaaattaaaaagaaatacattttaaaaatggaatggggggtggggggggggagccaggcacttgtggcgcacgcctttaatcccagcacttgggaggcagaggcaggtgaatcgctgtgagttcgaagtcactctggtctacagagtgagttccaagacagctaggactacaccaaggaaaatggatacagaaatcttgtgctttaaaaaaaaaaaaaaaaaaaaaaactggcaccagtgaaatcgagagcagaatcagcctgtaagtgggagaatcacagaggcacagatgtagtaagtgtacctgagagtgtggggtgggctgctggaaggataaaatgtcagccatagccaagggccggcgagagcttctcaggggacagtcacgggtttcacaattctttctctcttaaaaaattatttatttttatcttatgtgcatttgtgttttgcctgcatgtatgtctgtgtgagggtgccagatcccctggaactggagttacagacaattgtgagctgtcgtgtgggtgctggaagaacagccgttgctctcagccaccgagccatctctccagccccctcttcacaagtcttgacacccttaaaatagctttcacactgcctgtaatggagatggtcaccggccagtgctttccgagtatgtttgtggttttcaggttttttttttttcattatctctgcaacttttcaccccaaactgaaacctaccaagaaactgacaacatgacaactttggttgaaacggggtcccagcctagacctccccatggttggcagctcccaagagatccctgtggaaactgcccagctcggttctcaaatcagtggtgttgagccagcaaacagccttttacaattcagatctgatagctcaaaggatactctattaaactgttagtggagagagattatattttaggggaaaagttaatttaccactaactattggggccacgatatatgcctgtgcttgaagtggaagctgtccccccctttttttaattaaaaatagttgtgtgcatgagcgcacgcgcgcgcgcgcgcacacacacacacacacgcacacacacacacacacacacacacacaccagctcacggctgtctgtaactccagttccaagggatctggcaccctcacacagacatgcatgcaggcaaaacacaatgatccagtatgtaatattggtcaaaaatttaaaaactaatctttattataattaaaaattggtgtgtgtgtgtgtgtgtgtgtgtatccttccgcatttcccttccagctgtttttgcaagaagagttttattggctccttggcctacctgtttgtttacatactctcagtccagtgacagagttgagttgtcaagtgactgagagctaaagtatttagtatttggccctgagaagagctagatgacagaccctgtttgcggtcccttaggcccttagttttatctggtcatggtggacttgcctgaatggtcgtgtgatttaattttcatatgaaaagagtgcagacatgggctccttccttggtgagccttctcaaccacgctgataatgagaatttggaggacgaggtcaactttagaattgagaatcttggaggtttttttcatttgtagtatgaactttttttcatttactgattttttttccctttgaatagatggatgatacaatggtccagtatgtaatattggtcaaaaatttaaaaactaatctaatcttttttataattaaaaaattgtggtgtgtgtgtggggggggagggtcatcagagctcgttcttccatggttgaatctgggaattgaactcagattgtcaggtctgcaaatgcttttactagctgaacaatctggcccatctagttgggggcatctttagagtaaacaacggctttaaagtgtgtggatgacttcaaggaaacagcctagtccagacaccacaggactgacacacatgagactgtgagcatgcacagatctgcacacccaaaaaaactggttcaagccacaccccaaatccctgtgttgagaagggggagccacaaagccccattgctacctaaccaagaagctgtttgcagctggtacctgtgggggaaggagaaccagttttccctggtgaaatgtcactgggcttagtgactccaggacagggcctcatgctggggtggtttggactcccttttgtgtctgtgctttttgttttgtttcatatttttctttcttcccttcttcccttccttccttcctctcttttttgggggttgttaagtttggtttttttgtttttccttgagagagagagaggaagagagatgaagttgggtgggtagggagataagggaggacctgagggaggggaaagaatatgatcaaaatacattgtatgaaaaaatttaaattcaaatttaaaaatccataatctttaatttccagctatgttaaaatgtactccagtttagattactgtgatatcgcctttccccttatacttctgggatttttcaatcctctggaattgccttaaggacttcgtttagttaatgagaacctgcccagttgataaggaggcaggcaggtgactgacaggacagacaaaggtctacagaactagagggggctgtgtctccaggattaaccggcttgcagttgggttgataagtagaccgcacctgtctgtgccagcaggtaatgatcagcaggtgttatagcagagagctcccgggtgaaacctggactgtcactgcgtaagtggctgtttttccttgaggcctatatcgacacatccttcttcattcagacttagttaagagtaaaccctaaatacccaagaccatatgcaaacagcacaccattttatacaagggacatgagcatcttcagatgctgacatctgacaacatgaagtacacaatttaaatatatcctccagtatacttcacattaccccgaattgtggcacctcgtaaaatataagtagctgcccacagtccgcccacacatttaaatttggctgaggtctttgaggtggtctatatcatgacacattctaggtgtatgaagtgtgacgtggccatttctgccttgctagaaatactaagtctccctgtgagcaggaccttgtcttattatcttttgcctttggtgacagcagtagattgtcatctttccttcagcagctggagccccagaactctgaggtagttaggcatacttgtgactcacagaaaacactgcttcctctggcagcatcggtgacatcacattctgggttgtaacccctgatgaggcccgagacgcagccgccctcccatcccattcccccacccccacccccagacacaaggagctagccctgtactgactagcagtcccttcccagggctttgacagaatacttgggcagtggtaagagctaagagctaccttttggcttcatctgattaaaagcagataaggaattaggtcagagtccttggactctagtgcagtctgtttgcagaactctaagggagagagataacagagcagaaataaacaagggggtgggaaaagcactgctctgcatttgcctttgacctttcgaggtcaacaccccgcttctggactgaggcagatgaacagtggagccgaggtggcacccagggcagatgtgccattccaaggtgctccaaggcaggaaccccagggtggtattcgggtctggttggcatgtatacagtctgcccccaaagttttcctttattcatcttcgaaaggttggcatcattttaggtggacctcagagcctgctggtacagcagcaacctagggctaatggcgtcatgaatgcctgtaaaatctgatgttgtgtgacttttcctggggagatggtaaataaatgtttgtttattcaccccagataaagagcgaccagtgtagggattctgtccaagtccaggaccgatgagtttattggggttaattacgggagatgggcgactcaccactaggaaaccacacccgagtccattgtcttcttctgacctggtcacagttggaatctaagggagccttctgagtgagtcccgtgaggctcctgagcctgtccccgccctccaggaggaatgttcacaggcttgatgtcctgtgggatattgtaggtgctcagctgccaggtagtggtggtgatttccaacctggaggaaacagatctattatattacaccgtttcccttggcaggtagatgggtttttatttataaattattaataactatttataaatatattgactagctgattggagtgtgtgtgtgtgtgtgtgtgtgtgtgtgtacacatgtacacacacatgccatggtgcatggagaccagaggacatttctcaggagttctacttctatgtacattctagagaatggactcagaccattaggctcagtggcaaataccggcttgaccacgcggcttgaccatctctctcaagcagatagttctagaagatcagtagggaggacccaagtgttacagatccaggcccatttttgcccaccacataggatgtcagacattgaaacaaatgagcgttttgtttgtttcttagatagattcttacaattagtctcagtgcctggaactcactgtgtagaccaggctgatcttacacaaaagcaatcactctgtctcttccttttccatgccgggattataggtcttcaccaccgtgcctggattaaaaagatgagctccaaccccctctctttttctattttgtttgtcatgtagtcctggttgtcctgtaattcgctctgtaaaaccaggccggcctcactcgaactcagagatctgcccgcctctgcctcttaagtgctggaattaaagacgtgcgcttgttgaaatgatggatttttcagaataggaagagtttactcatgagggagccaagtgtgtggggtcaggagagcaggcctcagccattcctcttctgggatatggtttagggtgtttatggctaacagagctgggtgctctgggtgtgagaaggtgactgcaagtaaggaaaattgaaaaaataattggtggtctgtatatgtgtaatcaaacttcatgtctcttctcattcagaaaacactgacatttggatgtgctttggtcctgtgacttcgacaggtcagcagtatcaaccattttgagccactcccaagtccctagaaaacagctgtaggcatgcatatgaccctatggagaggtgttaactgtaacacagcttacgaaagggtagtgcttagctacacaacgtccacagctggccatgaaactgaccacctggcagcaagcagagctggaaggcttgtccccttgggctcatggctcacggtgcagttccaacagcagaagccgcttctgttcctaacagcgtctgctgaggtaacagcatctgctgaggctagtgagaccttcatcagagtctgacccagtcagctgaaaaggctcatctctatcagttctggttaccagcaactagacctttcttagacagagtgccccatggtagtgacatacaatggctgaagccataaagccacatgttagggagacaagtcccagagcccccgtaggcctaagtgccagggccctagacactggcccctcttggactgaattccttgtcaaccccctcctcaaaggttcgtctaggctgatacttatcctttaatgcactgggtttctctgtcctgtcatttgagcctgtcccctttgggacgaggcagatggcaatgagtggaccagctgtctaggaacagtgaaatataatcctgtctttcccgcctcacagcatgtctaatggacagagagaacaagctttgagggtactgaaaggcagtgccccttctgctcaggtgaccttgacactggccagtccagggaggtctggagggaactctgatcttcctgtgcatagtcgcctggctgtcacccacttcctcgccaagtctccccggtctgtttctggaaccaggcggcatgagatctggctgcattggccttctgcctgctgctggagtagcgagcacccagagaccagaggagggccacccctctgcacagtatgtctctttgaatcttcatttccacaccacattggtgatagaggaacaatattgtgggctaaatttgggtctgatgtatttactggcaactccttgagaaataatgggacttgggaagcaaatagtcttggatttaaatttaggctttctacacaattagcttggtttacctcagagtcttccctaataggtttctactataaatcctcttggattttcttctgaacgatgctgaatgtggagcaagtcagggtctgcgacacagtgtgaaagacatgtctgaaaagtgccttttaactcgcaaaggcctgatcagatgcagagctggagggctaatggacgatttggttttattctatcttcattgaattaattgtttttcaaatatatgagagtcaaagcaccttattaaataaatgtgccatgttcaaaatagaaaaggaccacatggtatacatcttcttatatttatttattgtgcgtgtgtgtgcacacgtccactcatgctgccagtgcacacgtagagtgagagttggctgtctgcctccaccacgtgaaccctgggaatgaaacttaggtcttcacgtttgtcagcaggagccctgcactcactgaatcatctagctagcccacgagtggctcattcggctaagatgtaatgctgtttctaggtttaaaaaagacacgatgttacctacagcactgggcgtcctcatgcatcttatgtgcacttggactctgcaagccccctggaggatgctcggtgtagaaaggacgacataggacatggatggactcagggtctagtgtctaaggagcctgcactcgagcagtaaaggacaccctgcacattgcagtgtagcagcgtactgacaacatcgctcgtgaaggagccgagggaagaagcattacttccggtatagctggaagaggtggtggcgttcgagctgaatcctgaaggctaagtaggatgctgatgtaggggaatgaggacgtgatcattcttggtccaaggcacagagggccaacacatgctagaggacagtgtctcagctctgtaatctcaacattcggggtttaggaagaagaaacaggaggactgccgctagttccaggaaagcttgggctacgatagtaagaacatatccaaaacaaaggtgtgtgtttgtgtgtgtgtgtgtgtgtgtgtgtgatcctgtcatttgcaatagtgtggatgatcatagaggtcattgttttatgatctaaaagggataagccagggctggagagatggctcagtggttaagagcactgactgctcttctgaaggttctgagttcaaatcccagcaacctcacggtggctcacaaccatccgtaaggagagctgacgctctcttctggtgtgtctgaagacagctgcagtgtacttaagtaaaataacaaataaatctttgggcaggagcaagcggggcctgagtgagtggagtgggagcgagcagcggtgctgaagttcaaatcccagcaaccggttacatgaaggctcacaaccatctgtacagctacagtatatcatatacataaaataaataaatcttaaaaaaaaaaaaggattaagccagacacacaaacacaaatacggtctgccttcattttcatttggactcagaagtggcaaatttttataagcagagagtagaattgtggtatcaaaggttggaatggtgaccagggagacactagtgaaagaatacaatgttttaatttttttaagaattattttatttttatgtgtgaacgttctgctggcatgcatatttgtacaccttgtgcacaccttgtgctcgcagaggtcagacgtgagcatcagatcacttggaactggagttttacggatggttgtgagccaccatgtgtgtgctaggaactgaacctgggacctctgcaagagcaacaagtgccctaaactgctgagccagctccccggccgtggagaatacagtgctttgatttagggcaggagaaaaagtggtctgtgttagttagggtttctagtgctgtggaaagacgccatgactactgcaactcttataaaggaaatcatttatttggggttggtttatagttcagagggtttttagtccattgtcaccatggcaggattcatggcagtatgcaggcagatgtggtgccggagaaggagccaagtgtcccacatctggtaccacctcgcctggcttgcgcttctgaagcctcacacccttgttccagtcacacttcttccaatcattgcacccctcaagtgcctgtggggaccattttcattcaaatcatcacatggcctacggagcttaaatcagtgctcatggttgtagccagctttgagtgcagctggaagatggtgatgcgagatctttgtattctctctctttcacgcttttgttttagccccccccccttttttttttaaagaaaagatttattcagacacaccagaagagggtatcgggttccattacagatggttgtgagccaccatgtggttgctgggaattgaactcaggatctctggaagagcagtcagtgctcttaaccactgagcatctctccagcccctgtttcaacctttgtatcagttagttctaatctgatttgaccacccgaagagaagaaaccctgtgtccctccctgaagtgtagctgcgaacatccccaggtgtttggttcccaggtgtttcacagagttaattctgcattattctttctgctggatgctacttccttattcttaatatttaaggccatcacagcacgccgaccacaacacaccgttttgggaattatgggaaaacaagtacaagtgaagacaatgaaacctaatgtttggtgcttaagggaatgaaattctccaatgaaagttctttcactgatttttaatttttattttcaagttgtgtccagcctaaaaagcaaatcgttagaatttaagagttctagaagcgcatcaagaacttgctcctttttagtgtaaagaaatagtttttttttcccccagatatgaagaactgtaattggaggaggttgtatgtgttgccatccctcacccgcctcacgttcactctgttacttggagcactgtgtttaaggggcgttccgtctcctctgaccagccattctgttaaatccagttttcagttacattcagttactcaggcttctgctagtctcgtaattgtattattatgtcaaaagaagataatgatagtggattaaatggatgtgccaaagcttgatcccatccatctatgtgcaggttatttacagtaggcaaggctgggatccaaggttgtgtcaccagtcagctggtgagggtgagtaggtaagacgttagtccctagtggcctttatcctctactgtacagagcttggcagcagtaagaagagacgcaggtcatccgagcaccagttgcatcctgcaatgttactgtctgggtacaagacccaggtgtgggattctcgacccttggtagtcacagctacagctcagcctgggggttgactcttggctctgaaaatatgaccactctctggaactgttgcgacaggatactatgggttgacgtttctggctcttacagacttttataccctcctcccctgtcaagattgattgattgatttatgttttgcctgcgtgtatgtctatgtatcacatgcatgcagtgccctcaaaggccagaagagggcatcagagcctccggaactggagttagagatgtgagctgccatataaaagtgctgagcaccaaatcccggtcttctgcaagaacagcaagtacccctaaccactgagccatcttctcagcccgtactggccctctcttaccgactttggttctgtcctgactgctctggaacttttctttacagagcctcttcccgtacgtagtcagccacggccaggacttggggtacctgtgacaataaacaggagttggggtggggagggtgtcaccatgtggactgtccttgggtagctagggttattcaagcacagcatcccttgtcaggcacgggatggagtcttaggagggcggatgagatcaccattggaatctggatacactggcagttgttagtgatctgacatcagtgctgggaaccaaagagtgctcactgctcgtgctcgtggtactgttttctaactatatctacactgacgtggagtagggtgtatgctgacttccatctgaaggccatagaaacaaccgagcttcatagcaagccattgtggtgtaggtagcattgcagatgaggcacaggtagtgaagtaggctggcagacagtctggctcagcacagtatgctgtattgagtcttcacttgagtcctataaggtcttcctgctgaaaaggccttggctcaagctatccctttacagattatccagtcaggggagcgggcgttgtctaggtgtgctttaatgtgatcctaagatgaggccaggatagtgtattatttatttttaaattacaaaaaatattttagatgtatgggtgttttgactacatgtgtctgtgtatcgtgtgcatgcagtgcccccagaaaccagaagagggcatcagaacttcttggaactggagtatcagagggttgtgcgctaacatgtgatgctgtaattcaaacctcagttgggtcctctggaggagcagctagtgctgccatctgctgggccgcctgtccgtctgtccatgatttcagatgacttagttaactgccttcccttctaagacctttctgtcattgcttctaggcactgcacacctgtacacgtgctgttggcttttttttatttttattattatttttttaaggactagggaatccacagcgttttgccttaaagcgatcagcagaaagccttctcactacatgtgctcagatgtagtcatgacagagcgcactgtattttggtagcttctctttttcagagaggcatcttctgatgcattggaacggcagctaagcttatttattcttccctagctaggcaggagcgtcgagtggccatctgcgaggcgcgtctgttctgaaaggaatttagcagggagcgagtggcgtcgttgaaacctcttcagttccaggagtcaaaatattaaatagctcgagtctgaagtcagacgtttaaaatgctgctctctggagccgagagtgaagacagttgtgtcttttctaagaaaggaaaaggtgttcactatgaagtgagcttccttacagagaagtctcctgaaaagcaaattcccgtgacacctgaggacagtggtcctcaaccttctcagtgccgtgaccctttaatgcagctcctcacgtgtggcgaccccacccataaagtcattctgttactacttcataactgtaatttgctattgttgagtcgtagtgtaaatatctgatatgcaggctatctgataaaagggtcagagaatgcttagagcagtgaagacctaagatccaggttctgtgttagaggatcaacatgatgcccatattacccaaaagctgataaaggggttttcagaatggtaaccttttaatgactccctgtgtgcccaaacagtttaccacatcaagagcgaagctaagatatggtaggggagacacggctaggaatcaggatgcttgggattcctagatctctatatagcatcctaatagcacaccgagatgtagattcttgctattttttttttaaagattgatttatttatcttatgtatatgggtacacactgtagctgtacagatggttgtgagcctgcatgtggttgttgggaattgaattttaggacctctgcttactctggtcaaccctgcttgctcagacccaaagatttattataaataggtacactgtagctacctatcttcagatgcaccagaagagggcatcagatctcattacaggtggttgtgagtcaccatgtggttgttgggatttgaactcaggacctttggaagagcagtctttgagtgttcttacccattgagccatctcgacagcccccaagtcttgcttttttttgtttgtttgttttttgtttttgtttttttgtttttcgagacagggtttctctgtatagtcttggctgtcctggaactcactctgtagaccaggctgccctcgaactcagaaatcagcctgccctctgcctcctgagtactgggattaaaggagtgcgccaccaccgccggcttccttagtcactttttgtcttagtcatagaggtaggtgtcccagttgaagtttggctagtctagctattcaggaatgtgttaatccccctcaatatttctgcctgtgagcactggaattatagacctacccctacacccatcgggcctctgcagggtgctggggatttgaactatgggcttcacgcttgtgtgctaagtactttacctgctgagacaacctttgtcctaatgttttatacgttacgtcatgacagtggtcacatggaaactttactattgctaaccacattttcaggtaaggtcactgcaatggagagagttgataatcagaaagcctaagtagcatttagataggacatcgcctagaagcggagagattctccagcaacagcagctgatagcgttcctgtcagctctgcctcacctatgcccccttttcctttaggattatgttatggttagtgaagagaagaaccacgcgttctaggcaacatgcagatcagagactcgatagggggtttaggccagagggtgtgagtaaagtgagtttttatctctttacaggaatggcaaagactcaactatgatatctacaccctgcggcagatccgcagggaagtgaggaaccgatggagacgaatcttagaggacttgggtgagtctgagagattgtgaagctgtgcttttccatcttggtgttgccggtctgtcttagacccgccagccactgagtactgacatgtgggcctttatcagctccgaaagcttggccgtagcttaggcggcttcctaaccagctccttgacttaaatcggccgtttatgctcatgtacgtctgccaggagcgcgttgcctcctgagtgctttttctcccgaccctgactttcccagagtttcttactccacccagaagtcctgccttcccccgccctgttttgcaataggccactccgctctttattaaatcagttgggcaggcgatggagaagatgtttacagaacgctgagacagccgatgcctcattacacagtgcacaggagattgtctcagcaatctttctatcaatagattgtcatctaccgactaattagttactgattaggtcctcagcttttctgttatgctctcaagcataaaccttgatttttctgttgtccccagtccatgttacttggccatatgacttcatctgcccccaagtacaagacagcaccaggtagtgaagtcgtgtgggcgttactacttactgtttttgtcattatttattgattgagttagacagagatcgattgtccaagtagtgatagctttataaatatgacaggtgagagaaatattgtaagagatattaagacacagtagaaaattctcaaagaagcaaaagggagaaaaagttgcaagggtgggaaaatacacttggcattatggcagacatttagtagcggcttttcttaattctattaggattgactaaatatgtcccaaaccataaaataagcttgctctagcgtacaaaactaagcgaccacctttagagtcttggatattctgctttggggaaacatgaccctctggcattatagattcccagagctgggtacctgggtggcagctcttgctgtcttagttgggatcagtggataaggctgaagctccgccctcttaactcgctcagtgctgctgcggataatagtttacttttcacaagtcagtctgagcagtttcattctttgagtcttttctgtctttgggaaagttagctttccaccagttgactagattaccttgaggatgtaaatgggggcttggagatgtggggtcctccagcacctgagcaggctggggagaggtgtagggattccaggacaaggcagctaacaaagtgccatggcagtcaaggccagacctcttttaacagagggaaaaggtaacaagaaaagctaataaagaaaacaaggaatagttttaagtaaagagctccccgctcagtgtggggaccagcacacagtagtgcctttgaccttagttttcactgtgtagaacccacacttgggttcctttgttttattgtttgtattgtattttactttattttattttattttcaagataggatttgactacggagttatgggattaaaggtgtgggccaccacagtaggcaggatcccttagcaatcacatccatagtatcacaggacaggcacttcctagtgatgactttacattcttctcatttaggctttcaaagggaagccgaatctctgttgtcagtgaccaaactcagcaccatgagtgattctaaaaacacaaggaaagcccgggagatgctgttaaagctggctgaagagacctctatcttccccgccagctgggagctctccgagaggtacctcttggttgtggtaagtgattgtcttcctcatctgccctgttgggctttgctttcaccttttctgttatttcctgggacagccatcccagcctcaccaactccaccacaacagtagcgtgtgctgctgcggtagtgtgcacctgtggcctatgccaccagagccacctgaaaagctttaaggggaaggatttctggatctcacctaaagctgttgaggctcaggctgtggccagagtccttttttcagatgagtcctgctgtgtggttagtttcaaccttaggtcaattgctcaaagcatctgtccagcctgtgattgacaggctcggtggaggggctggcgagatagtttagtctgtcctctagcacccactttaaaagcctgacgtgctggcactgctcgaaaactcagggctgggacacagagaaatagatggcttaggcttgctggctggccagcctggatggtcgggtgcctcccggctccccgggggggggggggggggcgagactgaccctgttttagaaaatagtgaaacaaaggttgggtggttcttgaggaacaacannnnnnnnnnnnnnnnnnnnnnnnnnnnnnnnnnnnnnnnnnnnnnnnnnnnnnnnnnnnnnnnnnnnnnnnnnnnnnnnnnnnnnnnnnnnnnnnnnnnnnnnnnnnnnnnnnnnnnnnnnnnnnnnnnnnnnnnnnnnnnnnnnnnnnnnnnnnnnnnnnnnnnnnnnnnnnnnnnnnnnnnnnnnnnnnnnnnnnnnnnnnnnnnnnnnnnnnnnnnnnnnnnnnnnnnnnnnnnnnnnnnnnnnnnnnnnnnnnnnnnnnnnnnnnnnnnnnnnnnnnnnnnnnnnnnnnnnnnnnnnnnnnnnnnnnnnnnnnnnnnnnnnnnnnnnnnnnnnnnnnnnnnnnnnnnnnnnnnnnnnnnnnnnnnnnnnnnnnnnnnnnnnnnnnnnnnnnnnnnnnnnnnnnnnnnnnnnnnnnnnnnnnnnnnnnnnnnnnnnnnnnnnnnnnnnnnnnnnnnnnnnnnnnnnnnnnnnnnnnnnnnnnnnnnnnnnnnnnnnnnnnnnnnnnnnnnnnnnnnnnnnnnnnnnnnnnnnnnnnnnnnnnnnnnnnnnnnnnnnnnnnnnnnnnnnnnnnnnnnnnnnnnnnnnnnnnnnnnnnnnnnnnnnnnnnnnnnnnnnnnnnnnnnnnnnnnnnnnnnnnnnnnnnnnnnnnnnnnnnnnnnnnnnnnnnnnnnnnnnnnnnnnnnnnnnnnnnnnnnnnnnnnnnnnnnnnnnnnnnnnnnnnnnnnnnnnnnnnnnnnnnnnnnnnnnnnnnnnnnnnnnnnnnnnnnnnnnnnnnnnnnnnnnnnnnnnnnnnnnnnnnnnnnnnnnnnnnnnnnnnnnnnnnnnnnnnnnnnnnnnnnnnnnnnnnnnnnnnnnnnnnnnnnnnnnnnnnnnnnnnnnnnnnnnnnnnnnnnnnnnnnnnnnnnnnnnnnnnnnnnnnnnnnnnnnnnnnnnnnnnnnnnnnnnnnnnnnnnnnnnnnnnnnnnnnnnnnnnnnnnnnnnnnnnnnnnnnnnnnnnnnnnnnnnnnnnnnnnnnnnnnnnnnnnnnnnnnnnnnnnnnnnnnnnnnnnnnnnnnnnnnnnnnnnnnnnnnnnnnnnnnnnnnnnaatgtaaataaaggggtaaggcaagtctctaagacttgaagtttgtaatgagtgttttacttgcctccacatcaggctttatcctgacttggcaagcttgcttttctcttttcttcttacactgcaggaccggctcattgctctcgatgctgctgaggacttctttaagattgctagccaaatgtaccccaagaaacctggggtcccatgcctggtggacggccagagaaaactgcactgccttccatttccaagcccctgaagggaggcccagaagagcggagttcttttaccacgacacaggaatttaccaaagttggacggctgcctacggtttcgagcgagccaggagagggccttctccagtcaaacactatcgtgaatcctacaaatataaggtcttcttcctcaggaccttggcctaaggatgctctggttacattaaaacacccggctgccaccatgcatcgagaaaggaaggctaaagattagttggtgggtgggtagttcttcctggatagtcaggttccaagaacctgtggcctcattggctatataagctacagttgttcattctgtgcaggactggtgttttctaatcaacacaatggcatgactaatagagaagggtgta

SEQ ID NO: 151 - DNA, 1142 bp, Mus Musculus
gcaaacgcgcagctcgcgtccccacggccggccgcggcgtgatgcgcacggcccggcccgtgacgccgcggccgtccctgtccccgtccccgcgtccccgccgccatcgcgcgcccggctccgggatcccggcgccgggcctcgctccccatggggctgcgccgctggctacggagcgcctgctgctgctgcccgtgccggtgcctggaggagcccgcagtggtaacaatccgtattcctcctttggagcgactctggagagggatgatgagaagaatttatggagcatgcctcatgacgtgtcccacacagaggcggatgacgataggatcttgtataatttgatagtcattcgtaatcagcagaccaaagactcagaggaatggcaaagactcaactatgatatctacaccctgcggcagatccgcagggaagtgaggaaccgatggagacgaatcttagaggacttgggctttcaaagggaagccgaatctctgttgtcagtgaccaaactcagcaccatgagtgattctaaaaacacaaggaaagcccgggagatgctgttaaagctggctgaagagacctctatcttccccgccagctgggagctctccgagaggtacctcttggttgtggaccggctcattgctctcgatgctgctgaggacttctttaagattgctagccaaatgtaccccaagaaacctggggtcccatgcctggtggacggccagagaaaactgcactgccttccatttccaagcccctgaagggaggcccagaagagcggagttcttttaccacgacacaggaatttaccaaagttggacggctgcctacggtttcgagcgagccaggagagggccttctccagtcaaacactatcgtgaatcctacaaatataaggtcttcttcctcaggaccttggcctaaggatgctctggttacattaaaacacccggctgccaccatgcatcgagaaaggaaggctaaagattagttggtgggtgggtagttcttcctggatagtcaggttccaagaacctgtggcctcattggctatataagctacagttgttcattctgtgcaggactggtgttttctaatcaacacaatggcatgactaatagagaagggtgta

SEQ ID NO: 152 - protein, 242 aa, Mus Musculus
MRTARPVTPRPSLSPSPRPRRHRAPGSGIPAPGLAPHGAAPLATERLLLLPVPVPGGARSGNNPYSSFGATLERDDEKNLWSMPHDVSHTEADDDRILYNLIVIRNQQTKDSEEWQRLNYDIYTLRQIRREVRNRWRRILEDLGFQREAESLLSVTKLSTMSDSKNTRKAREMLLKLAEETSIFPASWELSERYLLVVDRLIALDAAEDFFKIASQMYPKKPGVPCLVDGQRKLHCLPFPSP

SEQ ID NO: 153 - DNA, 70803 bp, Homo Sapiens
attgcgctcggggaattaaaagaggggaaaaaaagcccgaagaaaactcacgccccaaacaaaacgcaaggagaggagggcgcgcggcctgcagccctcgcccgcgtccccggccgcggcgtgatgcgcgcggaccagcccgcgacgcccgggctgccgctgtccccgcacctggacgctggcgcggtggccgcgccccagcctcgatcgctcgccgcggcgactcggccccaggcttccggcgccggtgggggccctcgctctccatggggctgagggactggctgagaaccgtgtgctgctgctgcgggtgcgagtgcttggaggagcgcgccctgcctgagaaggagcccctcgtcaggtgggtgcgccgcccgggccgggatctgggcttacctgggccgtagccgggcgccgagagtgtggacacctgtgtgcttgtgtgagttggggaggtgggcttgctggaagggcacgcggaggcgccatctcagccccttggttccttatgggatgttttgggtttgttccttgagtaagatttttgccgaaaagcacaaatcttcggagacacctgagacccagctggatgtctgtgcaaagtgccaagaattcgggtgtcctacctgggcagggaagtaagggagagaagttgatcagaagtttccataggggtctgataaaatacaactgtgactgggtatttgatcggtatattacagtgaaacgggcgactgtggatttctgtgccactcagcaaaaaagttgtctatttctcattcaattttattacccaacgaagacgattccagtgactgagtataaggaaatatttttcacatgaaaaaaatgcatgtttcatcaaggggcagcctattcactaggatgttgattcattacaggttaagctatgaagtgtgaggaaatgtaatgctcattagcaataagctaagaggctttgtgaagagaccataccagcccagttttgttcagggctgtgattttaagcaatcattttctatcttgagtttgctgaaatcgaggctggactaggtcatgcctcaggggtagacatgacagaaacagaatatttaaaatggaattaggaaacagtatttcaggtggaattccagggttgagtaagcaaatactaaagccagggtttctttcttttgaagtatgaaactcacgtaatacagcttgcacaactttttctaaggaatgatttaccttttcttactctatcaagtccaaacacccccttgactttggagatcttacataaccccttcctgcctgtctactctgattttccagtacattaaacagtgtacactccttgcggccgtgggaataatccactcattcgctccaaccctccctcaagtggtgacctttatccttgctcctccttcccaaaagctattttcaaggccttctcaagcaatcttctttgattactttgcccttatccatcttcctcttctaagatgtagtacttagaaattaccatctactcctcgctgtttggtaagcacacatgtatataaacatgtaactcatgtatattatatatataaagtcatacacacaatatacagtgattttgattgctcttgtcaatgacactcccacttagatttttagattattgtgtgtagggagaaatggaataatctatctctaatctaataggtagtgggtaactgcaatctagaattttatgcttaggttatacactgaacttgtcagggctcttagtaacatgaaatacagacttgagcttagtttcaacctcagaggcttgagtatttccagttttctgtccaggattgctgtttcagttaatagttctggttgttttaaaatcttagatgctctcctgtcttagcttctatccagtgaatacaagtcagtgaattttgcatgtgattttaagaagccccagggtcaattggagcggagtagcatagggcttgtgaatcaggttgcctggaatgagtctgctcacccaactaggtaacctggcacaagttattaaaattatttgtgcctcaatttcatcatctgtaaaatggggatgataatagtacatacttcaaaggtttgccatgagagatgaaaggagataatacatataaagtgcttagtatagagtgtgacacatagttaacactcaataaattgtagttattaattatcattgttattctgagcatgtgggtatgagtggactggtctcatgtggtttggtgtcattctggcaccatttccatataacaatatttgggaagaacagcttattaatggatacgtggaacagtggcgtgtgtgtatatgggtacctgcaggttctttcctatacaaggcatctgaagattggttctgaaaacttttttttagttgatttaaaaattttttaaagtatgcaattcagtagtttttagtacattcacaaagttaagcaacaatcaccactatttttttttttttttttttgagacggagtcttgctctgttgcccaggctggagtgcagtggcatgatctcggctcactgcaagctccgcctcccaggctgacaccattctcctgcctcagcctcccgagtagctgggactacaggtgccggccactgcgcccggctaattttttgtatttttagtagagacggggtttcaccgtgttatccaggatggtctctatctcctgacctcgtgatctgcctgcctcggtctccccaaagtgctgggattacaggcgtgagccactgcgcctggccgatcattgatcatttgtctgtaaaatagtgagtgacttttggttcaaaatttcatcttattaattaaaagaaatacttggagtatgtaatcactggttttctgtggttgccaccaccacttcccataaacgtagtggcttttaaaacaagagaaatctgccgggcacggtggctcacgcctgtaatcccagcactttgggaggccgaggcggccggatcacaaggtcaggagatcaagaccatcctggctaacacggtgaaaccccgtctctactaaaaatacaaaaaattagccgggtgtagtggcgggcgcctgtagtcccagctactcgggaggttgaggcaggagaatggcgtgaacccgggaggcggagcttgcagtgaatggagatcgcgccactgcactccagcctgggcgacagagcgagactccgtctcaaaaaaaaaaaaaaaaaaaaagagaaatcttttctttcacagttctagaagccaaaagtctgaaatcaaggtttccgcagggccacagtccttccaaagggtgtaggggagaatcatttttcactgattccagcttctggttgctcccaatgttccttgacttgtggccacacagcttcagtctttgcctcccttcatctttgatgtgtctctcctctgtgtctcaaatctccctttcttttctcttatgaggacaccagtgattggatttagggtctgtcctaaaacctaggatgatttcatctcaagatccttgacttaattacatctgcaaagaccttgttttcaaataaggtcataattatagtgactggggattaggacttggacatatcttttggggggaaactattcagcccattacagagtacttttgaaagatgtgtgagcccaaagcattggtaattatttcacttttgcagcatggctttcttccatcagtgataagagcatgctcttgccatataaaaatctacctgaggccaggtgcagtgggtcacacctgtaatcccagcactttgggaggccgaggcaggcgaatcacctgaggtcaggagttcgagaccaggctggccaacatggtgaaccctgtctctattaaaaataaaaaaaattagccgggtgtggtggcgggcacctgtaatcccaactacttgggaggctgaggcaggagaatcgcttgaacatgtgattctcctgagcatgtttgtgttcctggaggcacagctgcagtcacctttaaggagaaagacgctcaggtcttttggcaccatggagcctactgccatgtaggatctaatacagacatcagaggcctgggagatgctgaatcagaacacagagaagctggctgtggtgtaaatgtcatgcaccgaaggatctttcacaagggttgctttgaactttttcagtgctgggattacaggtgtgagccactgcacccaacccccacttagcagcatttttttttttgcatttttgtactttagctggcaatttcactgtttagaatatctcccaaagtgtagtgctgaagtgctaacatacatgttggataagcttcactccaacctgagatatagggtgttggccatgagttcaatgttgatagagcaacaatatatattaaataaggtgtctttaggcagaaacacataaaacaaagttatgtattgattggttgacagggatctaatcctgccatcggctcacaggaacctaactctgtatttcccctaggaacaatggttcagtattcactaattcagtgttcaagcgactttacagaacctaactaccacagacaacaagaatcagctgtgcttcatagggctatggtggggatttcattaacagatatagcagaaatggtttagtttgagtcacgccgcttggggcagagactgagttgaagaggaaagtgtctctgacaaggaagttcatcttccctgccctcatgctcctgatcctgtacagattgggcttagtgcttgtgacagactaggcactgttgtaaatgctttgtatctgtgggccattcaggaaaattcaatttgttttgaatttggcccacacccgaaggtcctgatcaattcctttttagaatggtcctttgtgtgggcacaaaacagtcatctagagcaaactgagattttattttactttccctcccaggaattcaggcactgtagaaaaataaaacagtgacgtctgtccattcattgcctgcagagggcatcaagtttgttatcatgaatggaagctgcaggtgggcatccagatgaacaaggagcaaaacagatttggaagctcattatatggtccacttgggtggcttaagagagagccacacataaaatcatagctattgttgttcattctttccatttcttcttttgctgttgaaaaatcagacagatgtaacgatgtttgattatcagttattaacagctaatagaaattagagagtaacaattgttacaaattgaattttcctgaatggcccacagatacaaagcatttacaacagtgcctagtctgtcacaagcactaagcccaatctgtacaggatcaggagcatgagggcagggaagatgaacttccttgtcagagacactttcctcttcaactcagtctctgccccaagcggcgtgactcaaactaaaccatttcttctatatctgttaatgaaatccccaccatagccctatgaagcacagctgattcttgttgtctgtggtagttaggttctgtaaagtcgcttgaacactgaattagtgaatactgaaccattgttcctaggggaaatacagagttaggttcctgtgagccgatggcaggattagatccctgtcaaccaatcaatgcataactttttttatgtgtttctgcctaaagacaccttatttaatatatattgttgatctatcaacattgaactcatggccaacaccctatatctcaggttggagtgaagcttatccaacatgtatgttagcacttcagcactacactttgggagatattctaaacagtgaaattgccagctaaaagtacaaaaatgcaaaaaaaaagccgctaagtgggggttgggtgcagtggctcacacctgtaatcccagcacttcggaagaccaagacaggtggatcacttgaggtcagcagtatgagaccagcctggccaacgtggtgaaaccccatctctactaaaaatacaaaaattagctgggcgtggtggcacatgcctgtaatcccagctactctggaggctgagacaggagaatcactcgaatctgggaggcggaggttgcagtgagccaagattgagatactgcactccagcctgggtgacagagcgagactccatctcaaaataaataaataaataaataaataaataaataaataaataaaatgttgctaagtgatcacaaaaaggacgcttgtttccaatctgagagctgaaccaagaagcctgagtgttgccttttgacctcggctggggctgtgcgtctcaggcaactctaaattttttgtcactctaggcatgttcatgaatgtccttggaaacatcactagtattgattttggggttacaggtaaattttgacgagtgggcgaatttgcaaatgcagaatctccaaataatgaagattggctgtaattatgtccaccatccccagttggccattgaggagactgagacacagagaacttcagtaacttgcttagaggcacacgtggtcgaactgggattcatatgctagtagatttcaatgccatagaaagagcagagcccttctggtgtgcagagaggtatggaactagctgcttacgtggtgtgtgttagaagttgtgtttggagtttgaatctttccctgaattgttatagcccagggtccagaaacactgggtcttttcctgcattgaagctagggaaaccaggtgccagtgggaaagaagggtgggggtaagggagggctcacaacatgtaaaagggaatcaccaccaactctagaagtataataatcttttacatttgtagggtttttcattttacggtgtggactcacatgaccttggagctgaccaaatcatcttctccccattggaagggcttttagaaagttgacgagtacgtttatgtcagtgagatttctcagaccggggcccagatggcctgacttttttcccagcacatactattgggttttccggagccaggtctctgagcagattgggcagattggcacacctcatctgtggcttcctgcagaaacctgcagtttgcaaagccggtagctccggggccggacaatgattcacaggaagtgcctgcaggggcacaaagggtttttactgaaggaaagtgccctggctggaagattcccattgcaaggctggtgcttttgccttcttgaaagacaggggagtgataggggagggccagaggtgcatgagtgctgtcccagggactgggctttaggcccaacgcgtaggagggaagctctttataagaagtcagctgtccaaaattcacaaggatgacttttaaaggttttcttccccggcaagccacagcgtccctcttctctttttgtgacttgcattagtcatagtgccattggaagttcccgagaagatgaaatttctttctcctacacatcatgtgagagtttcttgcaactttttattctctagactcttgaagtgattttatcactacaccacctatgtttaaaaagtataaactctgcttaaatgctgggtaaaatagtttattctgttagcacctgaagtcattttagtctggttaataaatctttgttttgtgacagttatataccatgcactctattcttttgtgcccttttaggaaataattttggtgacatagtgtgcaacaaaagaacccctgaactgtttgacactgtcctgaattggctcttacttagctttttttttttttttttttacaaaaatcttttaaaaacttgtgttccaatgtgtgatattacagacaaaaaacatacacaaatatgttcagtataaagaataactataggctgggcatggttggctcacacctgtaatcccaacactttgggaggccgaggcaggtgcatcacttgaggtcaggggtttgagaccagcctggccaacatggtgaaaccctgtgtctactcaaactacaaaaaaattagcttggtgtggtggcggcacttataatcccagctactctggaggctgaggaagaagaatcacttgaagctgggaagcagaggctgcagtgagccaagactgtgccactgcactccagcctgggtgacagagctagaacctgtctcaaaaaaaaaaaaaaaaaaaaaaaaagaataactagaaagtgaatactcgtgtaaccacctccatggcaagagatagctattgccagccccttatctcctccttgatcatgtctagacttctagctttcccacctatgtgtgcaccttaaagatgtacttttgttttgcctgcctttaaactttgcataaatgggatcaaactgtgtgttctcatagaactcactttgttggtggagctttgtgagattcctccgtgttgttgtatgtagccttgttcatggtccttattgctttagactgtattccattttgttcccctattctactcttggtggacttttgggtggtttccagttttgggctattaagtatggtttaaagtcagcatataaggtgaaattaattattcatctctcagtcatactggcttcccctggttcctcaaatataccacccacacccctgcctcagcgcctctgcactttctgcctgccctgccttgaagactctttctctagttttctgtgtggataactccttcactttatttagatctcttctcaaagtcattttatcagaacattctaccctgaccactctcttaaaacagtgccccacccttcactgtgtcccttactcactatgtatttctttacagttctgaatgtcacatggcgtaaacatatgtgcttatcatctgcttcctcccacaagactgtaaggccaattttcataaatttaaacagctaaaaaaaatgttaggagcttgtctgtgagcttgaagacacagagtcatactcatctctacagtttagagccctgtgaacttgggaaacaagagtgcattggttcagcaaatatttattgagcatttactatgtgccaggcacaggttttttttttttgtttgtttttttgttttttttgaggcagagtctaactctgtcgtttaggctggagtgcattggcattatctctgctcactgcaacctccgcctcccgggttcaagtgattctcctgttaggcactgttttaagtacttgagatacatcactgagcaaagtagatacagatccctgtcctcgtggcttttgttctagtggtggtggcggtagtgttggggagcccaataaacaggaaacataataagtaaactaggagataaataagtgtgtaggaaacaaaagtagagcaagggagggagcatgtttgcaattttaaataggttggtcagggcaggccttgttgaggaggtggtgtttaaacaaagacttgaaggagagggaggagtgaggacgtggctgtcaggagaaaaacattctaggtagatggagatcagccagtgcaagggccctgaggtcaaagtgtgacttgactaatgggttcagggaactgaagagggcagggtggtggactgtcactgcaggcctggggaccactgcaggactttggcttatcctctaggccaaatgggttagccactggcaggttttgagctgagggatgacatgatctgatttacatattaaaaggatcactttggctgttgtgttaagaatagaaagaaataactgggtaaaagagacaacagtagaaattcttatgcaaaacataaaaagccttggctcagggtgtagtggtagaggtggatattttttgaatgtggaccaataggattttctgatggatagatataggggatgagggagtgggggatgccgtcaagggtcttggcctgagcaatgggaaggatggagttgccatcatctgagtggggagcctgtggatgggtttagcgggaagatcaggtgcttggtcgggaccacactgagcttgtgttgtctgtgagacatcccagcggagatgggaaatttgaaatttgggagagagtactgagctggggattccgattcgggaatcttcctcatgtagatgatgtttaaaggcatggcactagatgaagtgaccaggtgtgaatgaaagcagaggagacaccaaggactgggtcttcctcctgagccctcgtgtttccttagctggatgacacaacagtgctggcttcacagggtgcctgtcaggaccgtcttcgagccttgaaagcagggcacagatgtgtgaagcagcatcatatggggctctgcctcagcgtgagaatagaaagcccaaatggtaggagcacatcagagtgggatgccaggaaaggggtgcccagggcttttcttccttcacactgaggcaggtcacatctctggggctgaaggaggtcatgagtgtaggtggcgagtgctgaggaaagcgctggaactaatggaacaatcgccccccgacaccccagcttgggcaacacagcaagactctgtttcaaaaaataaaaaataaattaaaaacataagaaataaacttggggataagacatgtttaaacactggatcgactaggtaagagaaaaccagtatcagaaagaacaaaggaaggagagacagaaagagagaaaagagagagagaaggaaagagagaatgagagagaaggaaaaaggagagaggaggagagggagagaaagagagaagagagacagaaagagaaggacagggagagagaaaaacaaagaaaggggaggaagagagagggggaagaaagaaaaaagaaagaaaagaggagagggagaaaggagggactgaaggaaagacaaagaaggagaatggggagggaagcaaggcgaggatggagagggagaagatcttaggttcacctgctccatcccagggaggtctcaatagagggaagaagggaaaggtcttgaagccaggggggtagcaggccagcgacttcctagcaggaaatcaaaccaaaagtctgtgagtgtcaagggtgtggacctggcagcctgtttttctggaccgttggttgctgttgactggagattttctttctttgctgttttcagagtttcagtcttaagctagtggccactgccacatggcctgtggggagagcagtaaagtcactggaactgccggtgtcagaggccagcctgtgtgcactgtatttcgtggagccttccaaggtcttttacatgcagcccttgttagtagtgaggaatcctgaggaactctcggtaaatagcttcaatgctgactagcactttgcagccatatccccaggcagaagttagtacttacaaacatttgtctcttttttatatcatgttgaaagaaaagactctggattgattgggtcttgagcccctgggtgggattaagggtgaaatcttaccctaccttttgagagtaaaagcagcttagtgtgtaatatcagagccacctctcaaatgcctgatgttaataaaatatttatcatcagcaggtggtggccaggggaaacacaaccactctcactttctttagagccttttagaactcatgatatgggggagggagagaaagggaaccttctgacttatggtctgtttcccgccatctgtcctcccaggggttttcaggcccagacccccaggcctttgcactaaattctgttgacacaggccccagagcccttcgtggtctgggatacatagaggttccaaaggtgcttctctttaggccatttgctgtaggcttctctctgttctagtttctctgtccaaagggttaaaagttttaaaacaatgtggcttgataccttgacctggtggctgtgcaggagtgaaaggggcaggcccagagaacgggacccaggatctggtgagccaggccaactctcacagatgcttctgatgctgctgaatgagctcacagcccctgcgcattttcactaatattttgaaaaaagttctttgtttatttatttaacagtggcaccccacctttcctatgccccaaagaaagcttgcaattactgaataagaacaaagcaggagccaggtctgggtctggagaggcagaggggcagagtggaggaggctgcttcgtagccacgagcaggtcagatcctgctggggagggcccaggagctcgcagagaataccactgctgggaggcattgccggtccaggggcacagcggttggttctctttcctgatttacatcatcccctgaatatcagtggctaggcagagttggaggcttgttaggggaatactgcttctaattagggcagggctagatatggtgagaacccaggaggcactcaccttctggagacatgggcacttctaaacaggctggggttgaccttcctatagagctttacttgggcttgtggattaaggacgagaggctggtgttttatgctggctgaagtcatgcatgtatgtgtgtggatggatgtgataagcgagaaaaagagaggaaagacagagatgcagagacagctagagagaggagaggagaaataaagaggaaaagaagtgatagtgagagagagcaagagacaggaaagagagacagagacagctagagagaggagggacagagagacagagagagaggttgtgagagggttgggaattggccagggaggcagctgagatcgtcattttaaaataggaaaataaattgtggcttagtaaagtaaaaggtggctagattattcatggtctaacgttatttttactgatttttcaggtacatactggctcctttctaaagctcctgctttagggaaatttttaaaaggcggtaaccatgagttatgtctgggatttccttcagcagattgggatcacagcacagtttgttgcgttcaacaagtacttttaaggcaactgctgtgtcctaggaccctgctaggtgatgtggggaagaaatgtagaaatgtagaagaaatactggatacaacccctgccctagaggaactgacccacctgttgaggagacaagacatagaaatgaaacacatctgggggaagatggaagaccaatgccaggaaaagtaccagggtttcattgctccagaggtgcagttattgtgatgttggaagccatggttgcagctcttggtggaagctctgtgccaggtctgggtgactcaaggagagtgcatcctggggacaagccacaggggaacctgctggtttgtacagggagcatccacacaggtagttattatctgagctacttcactgtgagtgcatccctgtcacagcatttggatgttgagttatataacagtggctcctccgagatccccacccaggaactcatgttggggggactgtcagctggctgtctggcccagaagaagtcaagcactgcagtattcttgtccctatctgcaaagtaggccaatgccacccatccttcttaccttagatgcttgtgtaacgtgaggggtggaatgcaggagcccttggctcaagccctgaatatattatgcagtggttgcatatcattggctgcagaaagaaattggagtcagcatctttcatgttatcgacacttctccggtgtccacctgctgtttgtcctgcctgatctctctttcttgactcacctattctcttccttctccaaatcccgtaagaccattcttctgattctctgacctgcttctgtgatgccatgaaatgctgcgtattgctcccacatctagatctctaccctgtccttgctcctaaacccagatccctgacatctccctgaacatcctgcaggctcatcatgtcagccgtggcttctgccccatgtgttacagttgaaggcgtcaccttcgctggtacctctgtgcctcccaccatgggctgctgtcacccgctctctgatgctgctggaatcggtcctcatttccactctcactgctatttccctcgctctcaacctcgcttacttttatctcaatcataatttcagaatgttcaaaattatgtatttgtttagcagtagaaccccatttttcctgtacctcaaacaatcttccttctagctctaacaaagactatttgaatggagaagctgctctggttgtggttggttcatgggcttctttctatctcttccagagaagccctgcccatctctttctctacttctgccccactgtggtcccaaggccccctgacaccaggacctcaaagagcatggcttgaaaattacacctactcccgtgtgacagttgattgtgacaccctcctaagccatcttcttgttcttccttcacccagagttatttctctaaaatccagacctgacagggctcaaaatcctgttgataatgttgcagttcacagaatgaagcttggacaccagcactacttttagtctgaccccacgttaccttttcttcttcatgtctctccattttccttgctccgcacaccacgtgctgcagtcatgcaggaatacttcgattccccaaccccgtgggctcctgaagcctccatatactgctttggcttgagctgatccttctacaaggaataactctgcccttgtttctcttcctggtggaagcctgttcagtcctcaggtctggttagttcttgaacttccttctcatcatacataacgtatcacttcttcctgtttgttcctacaacaatctgtgtagactttttttaaaaaaatgtactgatctcattgcattatagttatgttaagggcagagacaatgtcctatttatcttcatgtccccatggcacccagcccggtactcagtatacagcaggcatttattccacatttgttgaataaacaaacaatggaatgaatgaaatgaatgaatttgacatgctcataaaagttcacatgggcagggcccaaaggcatcattttcctcctctttcactggttcatcattcttaggaagagtcaggctgtggggctgcctgtgttctagcttttgtggtattaatcagtaaaaacagcgtggttctgagcatagtgtgcctgagctgtgtctgatttcccatcatctgcacctttccccatagggccaggtactttgttcagtcccagaccctaaacttctgacctgcagccacaaggatttcaggagcactgttcaatattcagtctctaaaccccatgctgattcaggtagctggtctcctgctagccttggttccaagattctgtcccaccttttgccctagtttttgtaagtgggccctggttgttgtcccaattattattattattattattattatttttttttttttttgtgagatggagttttgctcttgtcgcccagactggagtacaatggcgcgatctcagctcactgcaacctctgcctccccggttcaagcgattttcctgcctcagcctcccgagtagctgggattacaggcatgtatcaccacacctggctaatttttgtatttttagtagagatggggttttgccatgttggccatgctggtcttgaactcctgacttcaggtgatccacctgcctcagcctcccaaagtgttgggatcacaggcgtgagccaccgtgcccggccctgtcttccaaaatttgaggcggtgattggcagtctgacctgtacctcatcactctagggctggagcccctccctagctgggtgggttcctgctgctgaaccccaatctggggactggcactctgcttcctgttgcaaaatttccttagtgccaacttctgagcatcccatattgacatcttaacatttcctgtttccttccaccccaggcctttgaagatgctgtttcctctgcctgcaactctgttcttgtttttccacttaaagctccagcaccttttcttcatgacacctacctgacgcctgccttcataaggattttctcttagcagcttgcatatgttctcatggcctcctgagctcccacttaatggcacttatcacaatttttattttatagtcatgtgatcattcattaatgtgtttcccatgctagactctagtgaggtccaaggacagggatgatgtctgttttgctcacaattttattgagccctgtgattagcatgtagtcagtgctttatacatattactagatgaagtgaatagcttctgtatgaccctaccagtccttcccacagaagtcaactgggggttacagaagttaactggggctgtgtgcaggcatgccccagatgtgatgctctgtcactaatcttctctgtaagtccacacccaggtaccaccttataaggcataaatcataaaacaaatgtacagaatgggactactgaaattctcactcaacattctgccttgtttattgaaagtctttgggtacgcatgtttattacttaattttcctggcataaggaatttgatagctattatatatcattgtactccaagtttactatgcttccttgaactcagagccagtcaaacattcatcccttcatgttaattgttttcttcttttaatcacacaagaattctattcctggctgggcgcggtggctcacacctataatcccagcacttcgggaggccaaggtggacagatcacttgaggccaagagttcaagaccagcctgaccaacatggcaaaaccctgtctttatgaaaaataaaagaattatccgggcgtggtggcaggcgcctgtaatcccaggtactcggtaggctgaggcaggagaatcacttgaacctgagaggtggaggctgtagtgagctgaggtcgtgccactgcactccagcctgggtgatgctgggtgatgaagcgagactctgtctcaaaaaaaaaaagaattgaatttcctttgttgtcttagcttctggggtactcagtgctgaatttcatatttaactgtagtaattacctctgctcaggtacgtctgttctctgttctttttaaagtgatttatttatatttttggtttgtttttactgctctgttgtgttatgcttaattattaaagacaattcagacctttttgacaatatatttatatattacatagtataagttttaattgatattgtatgttgcatgcatatgacatataacattttatgtatattataaaaccccaatctttcctttttttatacaacagtgataacaatccatattcctcatttggagcaactctggtgagggatgatgagaagaatttatggagtatgccccatgatgtgtcccacacagaggcagacgacgacagaaccctgtacaatttgatagtcattcgtaatcagcaggccaaagactcagaggtgagcaccttttgatgtcttgctgtgcgcggatgatgctatatagtaaaaaatagtaattcctgagaagatccccttgaaataacaaaaagaatgaaggatgaaatgtttgaaatgaagggcaggtattttagcagcatatattatcactggttgctaattatagctagtcttgattgacctgcttgatatagagataaggctcatttctaattcctaccttaatggcacaaattacacgcaaggcaatgctgttgaagagtgtgaagatagtttgtcatcttaaatggcttaaaccgtccatctctaatctttccagttgtttagtaagccacacttacttgattcagactgaagtttgaagggtactttgcattatcactaattttgaattagtgaagcctgaattagtttttttttttcctgtttaaaggtccttaaattatgcatactgatcagacagcagtggatccactatttatttgagatacttcttgtgataagccttgaaccctcacaataactctaaatccaaagtgattgatttaagaacactagaatattaaaaaggagagaactctgtaagttaagaaaacaacagcaaagacaatcatactttttttctcctttctttggaaagtcatgtttgagttaggttttctgacttctgtgttcatcagctacctctgaggagaaacctgtattaaatatacactgcatgcttctttgtgtagaggaattgagcagggtagggaaacttatagttgggtttagtgtgtatattggtggcggggggtggggtgggtggaggtgctgtggagcttgtcttttccttaacgaggtttctttatttttggtaattggtaacttttcttttcccaaaaaaacatattttagcaggaggtgataacttttagaagtgtcatgtgtcccggtccttttattctgatgtgagttggatgctttggaggggttagagatgtggatcacaggatgggggaagggccggcagttgcctctgctcttgaggcctggggaagggtggactgggactccttcagtggctgctgtgtagcatcccactagtgaccgagcacccactacctctggctgcccatgtccccagcaaaatcccctctgtgatgggcaatgctgaaggcaagtcataaatcctgctgctgccaagaactgcactccctggctgccctttgtgagcatataattgggaatgcgtggccttgttttctctttagtggaaagaacaaattcttacactcctgtattacattaaccagttaaggtttctgctggtgagaacagagtcatttcttctcttttcttcctcttctcccctgactctgcccaaaacagtaacagcaatacggaaataatgtatagtgtctctctctctctctttctctctctctcaccagggccccatgcaaatgtgaaaggggctggaaaagtatctggagctgaatttggcagctctccctggaggagctcccacctttcttcccacttatctttacttttcagaagacagcagaggaacatggacgacaaagccctcttggaaagcacagcttctaaagtggcccattgtgtcttttttgtgctggtccttgggcttggtgtgatgggtcctccagaagcttcctcctcctcctccccctccttcttctcttcttcttcctcttcttctccttcttcttccccttctccctcttctccctctttttttttaaaattatactttaagttctgggatacatctgcagaatgtgcaggttacataggtatacacgtgccatggtggtttgctcacccatcaacctgtcatctacaataggtatttctccgaatgccatccctcccctaggcccccaccccctgacaggcccaagtgtgtgacgttcccctccccgtgtccctgtgttctcatttttcagctcccacttatgagtgagaacatgtggtgtttggttttctgttcctgtgttagtttgctgagaatgatggttttcagcttcatccatgtccctgcaaaggacatgaactcatccatttttatggctgcatagtattccatggagtatatgtgccacattttctttatgcagtctatcattgatgggcatttgggttggttccaaatctttgcttttgtgaacagtgttgcgataaacatacatgtgcatgtgcctttatagtagaatgatttataatcctttgggtatatacccagtaatgggattgctgggtcaaatggtatttctggttctagatccttgaggaatcgccacactgtcttccacaatggttgaactaatttacactcccaccaacagtgtaaaagtgttcctatttctccacatctctccagcatctgttgtttcctgactttttagtgatcgccattctaactggcatgagatggtatctcattgtagttttgatttgcatttctctaatgaccagtgatgatgagcttttttcatatgtttgttggccgcacaaatgtcttcttttgagaagtgtctgttcatatcctttgctcactttttgatggagttgttttctttctcataaatttatttaagttccttgtagattctggatattagccctttgtcagatagatagattgcaaaaattttctctcattctgtaggttgcctgttcactctggtgatagtttcttttgctgtgcagaagctctttagtttaatcccatttgtcaattttggcttttgttgccattgtttttggtgttttattcatgaagtctttgcccatgcctatgtcctgaatggtattgcctaagttttctcctagggtttttatggttttaggtcttatgtttaagtctttaatccatcttgagttaatttttgtgtaaggtataaggaaggggtccagtttcagttttctgcatatggctagccagttttcccaacaccatttattaaatagcagatcctttccccattgcttgtttttgtcaagtttgtcaaagatcagatggttttagatgtgtggcgttacttctgaggcctctgttctgttctattggtctgcattatctgctttggtactagtactgtgttgttttggttactgtagccttgtaatatagtttgaagtcaggtagcatagcatgatgtctccagctttgttctttttgcctaggattgtcttggctatacgggctcttatttggttccatatgaaatttaaagtagttttttctaattctgtgaagaaagtcagtggtagcttgatggggatagcattgaatctataaattactttgggcagtatggccattttcatgatattgatttttcctatccatgagcatggaatgtttttctgtttgtttgtgtcctctcttatttccttgagcagtggtttgtagttctccctgaagaggtctttcacatcccttgtaagttgtattcctaggtatttaattctctttgtggcaattgtgaatgggagttcatttatgatttggctctctgtttacctattattggtgtacaggaatgcttgtgatttttgcacattgattttgtatcctgagactttgctgaagttgcttatcagcttaaggagattttgggctgagacaatggggttttctaaatataccattatgtcatctgcaaacagagacaatttgacttcctctcttcctatttgaatacctttattcctttctcttgcctgattgccctggccagaacttccaatactatgttgaataggagtcgtgagagagggcatccttgtcttgtgccggttttcaaagggaatgcttccagcttttgcccattcagtgtgatactggccgtgggtttgtcataaacagctcttttgagatacgttccatcaattattttgagatacattccatcaatacctagtttattgagagtttttagcatgaagggctgttgaattttattgaagaccttttctgcttctattaagataatcatgtggtttttgttattggttctgtttatgtgagggattacgtttattgatttgcatatgttgaaccagccttgcatcccagggatgaagctgacttgattgtggtggataagctttttgatgtgctgctggattcagtttgccagtattttattgaggattttcacattgatgttcatcagggagattggcctgaaattttctttttttgttgtgtctctgccaggttttggtatcaggatgaggctggcctcataaaatgagttagggcagagtccctctttttctgtggtttctaatagtttcagaaggaatggtaccagctcctctttgtacctctggtagaatttggctgtgaatccgtctggtcctgggctttttttggttggtaggctattaattactgcctcaatttcagaacttgttattggtctattcagggattcaaattcctcctggtttagtcttaggagtgtgtatgtgtccgggaatttatccatttcttccagattttctagtttatttgcatagaggtgtttatagtattttctgacgggtagtttgtatttctgtgggatcggtggtgatctcacctttatcatttttcattgcatctgtttggttattctctcttttcttcattagtcttgctagttgtctatctgttttgttaatcttttcaaaaagccagctcctggattcattgattttttttttttgaacggtttttcgtgtctctacctccttcaattctgctctgatcttagttatttcttgtcctctgctagcttttgaatttgtttgctcttgcttctctagttcttttaattgtgatgttagggtgtcaattttaggtctttcctgctttctcctatgcacatttagtgctataaatttccctctaaacactgctttagctgagtgccagagattctggtacattgtgtctttgttttcattggtttcagagaacttatttatctctgccttaattttgttatttacccagtagtcattaaacaacaggttgttcagtttccatgtagttttgtggttttcagtgagtttcttaatcctgagttctaatttgattgcactgtggtctgagagaccgttacgatttctgttcttttgcatttgctgaggagtgttttacttccaattatgtggtcaattttagaataagtgtgatgtggtgctgagaagaatgtatattctgttgatttgggttggagagttctgtacatgtctattaggtctgcttgttccagagctgagtttaactcctgtatatccttgttaattttctgtctcgttgatctatctaatattgacagtggggtgttaaagtctcccgctattattgtgtgggaatctaagtctctttgtatgtttctaggaatttgctttatgaatctgggtgctcctgtattgggtacatacatatttaggatagttagctctttttgttgcgttgatccctttaccattatgtaatgcccttcttcgtcttttttgatcttttttggcttaaagtccattttatcagagacaaggatcacaatccctgctttttttgctttccatttgcttggtaaatattcctccaaccctttgttttgagcctatatgtgtctttgcatgtaagatgggtctcttgaatatagcacactgatgggtcttgactctttatccaatttgccagtctgtgtcttttaattggggcatttagcctatttacgtttaaggttaatattgctttgtgtgaatttgatcccatcattatgatgctagctggttatttttcccgttagttgaggcagtttcttcatagtgtcgatggtctttacaatttggtatgtttttgcagtggctggtaccggtttttcctttcatatttagtgcttccttcaggagctcttgtaaggcaggcctggtgatgacaaaatctctcagtatttgcttgtctgtacagggttgtatttctctttcacttatgaagcttattttggctggatatgaaattctgggttgaaaattcttttcttcaagaatgttgaatattggcccccactctcttctggcttgtggggtttctgcagagagatccgctgttagtctgatggtcttccctttgtgggtaacccgacctttctctctggctgcccttaacatcttttccttcatttcaaccttggtgaatcttataattatgtgtcttggagttgctcttctcgaggagtagctttgtggtgttctctgtatttcctgaatttgaatgttggcctgtcttgctaagttggagaagttcttgtggataatatcctgaagagtgttttccaacttggttccactctccccatcactttcaggtataccaatcaaacatagatttggtattttcacatagtcccatatttcttggaggttttctttactccttttcattcttttttctctaatcttgtcttcatgctttatttcattaagttgatcttcaatctctgatatcctttcttctgcttgatcgatttggctattgatacttgcgaatgcttcatgaagttctcctgctgtatttttcacctccattaggtcatttacgttcttctctaaactggttactgtagttagcaattcctctaaccttttttcaaggttcttagcttccttgcattgggttagaacatgctcctttaggtcggagcagtttgttattacccactttctgaggtctacgtctgtcaatttgtcaaactcattctctgtccagtttcgttccctgctggtaaagagttgtgatcctttggaggagaagaggcattctggtttttggactttccagcctttttgcactggtcttcctcatcttcggggatttatctaccttcggtctttgatattggtgacctgtggatggggtttctgtgtggatgctctttttgttcatgttgatgctattcctttctgtttgttagttttccttctaacagtcaggcctctctgctgcaggtctgctggattttgctggaggtacactccagaccctgtttgcctgggtatcaccagcggaggctgtagaacagcaaggattgctgcctgttccttcctctggaagttttgtcccagaggggcacccaccagataccagcaggagctctcctgtatgaggtatctgttgacccctgctgggaggtgtctcctggtcaggaggcataggggtcagggacccacttgaggaggcagtctgtcccttagcagagcttgagggccatcctgggagatccactgctctcttcagagccggcaggcaggaacatttaagtctgctgaagctgtgcccacagccaccccttcccccaggtgctctgtcccagggagatgggagttttatctataagcccctgactggggctgctgcctttctttctgatatgccctgcccagagaggaggaatctagagaggcagtcttgccatagtggctttgctgaactgcagtggctccacccagttcaaacttcccagcggctttgtgtacactgtgaggggaaaaactgcctgcccaagcctcaggaatggcggatgcccctcccccaaccaagctcgagcatcccaggtcaacttcagactgctgtgctggcagcgagaatttcaagccagtggatcttagcttgctgggctccatgggagtgggatccgctgagccagcccctttggtttcttggcttcagcccctttccaggggagtaaatgattctgtgtcgctggtgttccactgccactggggtatgaaaaaaaactcttgtagctagctcggtgtctggtgaaccggccacttcgttttatgcttgaaacccagggccctggtggcataggcacccaagagaatctcctggtctgcagcttgcgtagtccatgttaaaagcatagtatctaggctggagtgcaccattactcacagcacgatccctcacagcttcccttggctaagagagggaattctctgaccccttgcttttctctgtgaggcaacgccccaccctgcttcagcttgccctctgtgggctgcaccaactgtctaaccagtcccaatgagataagccaggtacctcaggtggaaatgcagaaatcacccgtcttctgcgttgatctcaccgtgagctgcagactggagctgttcctattcagccatcttggaataacctcttcctcttgcctaagaaataaaatcaggctcgactgtagaggaacaggaactctgttaccaagacaggcagtcaaataaataacatgaagacgtgatgataattatgcatgaaatgatttgaaataaaccttttcatagtgcttccttcttcttttttattttttaaatttttttattttttttattttgagacggagtttcactcttgttgcccaggctggagtgcaatggtgtgatctcagctcactgcaacctccgtctcctggtttcaagtgattctcctgcctcagcctccagagtaactaggattacaggcatgcgccaccacacccggctaatttttaattaactacctggtaaattttgtatttttagtggagacggggtttcaccatgttggtctgtctggtctcgagctcctgacctcaggtgatccacctgcctaggcctcctaaagtgctggaattacagatgtgagccactgcgcccttccactttcttcttttaaaagtataaaagtaatgtagtttttaaaagttgcttatgttgccgggtatggtggctaacgcctgtaatcccagcactttgggaggctgaggtgggtggctcacgagatccagagtttgagactagcctgaccaacatggtgaaacccggtctttactaaaaatgcaaaaattagccgggcgtgatggcacttacctgtaattccagctactcaggaggctgaggcaggagaatcgctttgaacctgggaggcagagtttgcagtgagccaagatcacgccactgcactctggcctgggtgacagagcaagacttcatctaaaaaaaaaaaaagttgcttatgttttcttctaaaatgttgaaattcattttccctacagattggatcgcatattatgtactgttctgtactttgcttttttcccacttaatatattttggacatatttccattttaatatgcttagatttacttttttgcttcagggaactctctagtattctcttgcacggattcaccatcacttattcaaccagttcctattgatatttacgttgatttattttttttcctgttggaagcaatattgtagtggacatccatatatatttgtatgacctttcgtagttttttcagtagaattgttggatcaaagtatgtgcatttgaaatgttggaattgtgacagtgcttcatgtattagtctgttctcatgctgctaataaagacatacccaagactgggtaatttataaagcaaagaggtttaattgattcacagttcctcatggctggggaggcctcacaatcatggcagaaggcaaaggaggagcaaagtcatgtcttacatggtggcaggcaagagaacttgtgcaggggaactcgtatgtatgaaaccatcagatcttgtgagacttcgagaacagaatgggggaaactgctcccatgattcagttatctccacctgaccctgcccttaacatgtagggataattaaaattcaaagtgagatttgtggggacacagccaaactatatcacttcattcttgggaaactaggaaaaacacttcaaggtggagaacagaggttgcaatctcagatctctccaggaactaggcaataacatcagtgagggaagtgggtaccccctgcccttcaccccacatattgaatggcattggaaactcatactgcttttaatgggagcagctgttaagctctagatagctgcttgccatgttgagaatgtgaacccactcgccatgttgagaatgtggacccacaaatactggaatttttaatttttcaaaagaagctgaaaatccagattttcatataaaatgtccagattttcaaataactcaattaaaaaatatgccagctaaataaatatgttttctttccagtaggagatagcttaaaataaaataaaatatgcctatgagctattgatatgtaaagacgtttatagcaaggactactactagttatgattattgttgttttgtccaagataattgaaaaatgaactcaccattgatttagaaggtgaaagagggaagctagacggggattgttttaactttgaatgagttccatatttactactattgcttattttcttttccacacaggataaaattggtacagattttaattaaaaaaaaagtattctggttttggaagaaaaccaaatttcacttactaaggaacaaggaaccctagatattttttgtatgatacaatttagaagctcaagaaaggtattaagaaaaatggaacataatgtttttccttgagtagaaatagcacaaaagacctaggaatgtccatatttggaattctctgaatgataacaaataaattcaagacagtgtatgtacaatctgcattctccttggaatctgaagctggtagaggaaggaccacaaataattaaggctaaatttacagtgttccaaactgaaaaaaagtcaggaaaaaaatatatatagaagagcaaataatgaaacaaaggcattagcttaaagtcatttggtgtcaaaaaaatacaaaacaacattatttaaatctcatagacagaatccaccttcatttacataaggcttctggagctgatggaaaacagaccttcagcagaagaaatgatgcatttgcaaacctctaagtagtggaaaaattattgctcttgtctttgaatgatgccataaagtacattatgtttgcctaagaagtagtaaacagcctcaatgttcctaaatcattatccttatgttcattttcattaaagtagttgtgctttacataacgtgctctgctctagggagcttaataattgttaatgaaatatggatacaacttattatttaataattgtaatactgagtgaacttattctctaagatattaataataatgaaaatagtgccaggcactgttctaaccactttgcatatgttaactgtgtcctctttaacaacaactcactgaagcaggcaccattattatttccattttaagcaacttatccaagggcacacagctgttgagtttggatgcaggatttgaatctggctttatggctccagagatatataatgagtatcaggattgaaatggagagaaaggaacagatattgtttgtgattcaatatagatttcaaaatgtataagcaaagtctgctcataagcctgtctctgtgtcttgttggtgccaatgagtacgaaagggattttcatatcagtgggatgacagctacatttggtctgaggatggtgaccacgtttcagaaagtgtttccaggcacaacacacatttttcccaagttatgcttttccatggtgattgcagcttgttaagacttatttcctgggcttctgttttattacctccaaaatatttcattctactctgttccatcccttcttcactttgtttagtgttctctgacctgttttagtgcctctttctatggtttggcagttcctttaggagtttgtacatagctttcacattttgactctcctaaaaaagccttaattttttttttttttttttttttttttggtgacaaggtcttattctgttgcccaggcttcagtacagaggtgcaatcatagctcatgatagcctcgacctcctgggctccagcaattcttctgccttggcctcccaaagcattggattgcaggcatgagccattgtgactggctgctcttacatttttggttaaggagatgtatgctaactgatatggtttggctgtgtccccactcaaatctcaccttgaattcccacatgttgtgggatggacatggggggaggtaattcaatcatgggggcaagtctttcccatgctgttctcttgatagtgaataagtgtcatgagatctgatggtttttaaaaagaggagttttcctgcacaagttctctctctttgcctgctgccatccatgtaagatgtgacttgctcctccttgccttctgccatgattgtgaggcttccccagccacgtggaactgtaagtccaattaaacctctttcttttgtaaatttctcagtctggggtatgtctttatcagcagcatgaaaatagactaatacactaactatcagatcattctcataaactctttcaagtactgttttggttcaaaaactggtgatgtttatttggcataatgagtgacagaaattctacgcttatcctttaaggctattaagtaattgtatgctgacaaatgcatatacctctcatgacatgtgtctgcctgcctgtcactcatcagcaggaaccacatggtcaccagatgcttgtgtggctggagtgatctctgaaaaccacacttggccaaaccccctgggagcagctaaattttatttttttaaaactacagaggcaatacttcataaatacatacaattactacatgtcaactaaaaataaaagcaaaaaattaaaactacagaggcagacacataaatgatcctcatttataatttatttgcccccagtacatgaagactacctgctagggtattgccagacattgtaaacacttccttaaaaatgtttaagataggaacagaccttcccccaggggctgtctccaatgtctgggtcatacacttagcctatcatatccctaatacaaaaagggacaacaaaacagagttgattggaatattgggtgggagaaacagggaaaggggggttgaactgatcgtggaccagccacataatgcttaagcactcagaaactgagatactccagtctggctctgcattactgtgtctcaatatgtccccaagaattggacaaagcccactctttcggggccatctgatttttccagaagtgggtgaacattggctacatttggagataggactgcaagttttaccccaaccacggaggagcaaaataactggaaaagggaagcgattttctagataattttgggatcctccgaaggcttctttctttgaggtccagattatctggattcttgaatgcatttattctttcttttactttgctagtgactatttgggtttagaggatttggggcagggtggagggagagaataaacaagcttactaggatctgagaatcaagggttcttgcactctattttctaggtaataatatttatagaatattaccctgtatgctaagcaacatgcttcatgttctccagacaaatactgaatcctcacggtaaccctatgaaagaggcattttgactcagatgattagagactttgtcactggtacaaagtgttggaggaagtgactgggagcattgggatcccagctcaggtcggtgtgacccagaaacctgcatgactagaaacattactccaggctctccagtgagtttagaaagagcgtcagtggaacctctttggtcaaagacaaagttcccaagcggttattggcttcctgcctcgagtagacactccggtctatgtttgctgatcattactcaccctgtgtcaactgagtcatggagtgactggttttggtgttggttttgtatccacctgcttttggccctgatgctattgcaccattcgattactaaaacccatggattataccagaagatgttctgttcatcggtctgtgatgtttctattctttgctcatccccgttctcctttttaaaaaatatataagcatttcttttgattagcattaagagaatcaatgtttcttttttcttttctttttttttttttgacggagttttgctgtgacagaattttgctcctgtcacccaggctggagtgcaatggcgtgatcttggctcactgcaacctctgcttcccaggttcaagtgattctcctgtctcagcctcccaactagctggaattacaggcatgcaccaccacatccggctaatttttgtattttcagtagagacagggtttcgcagtgttggtcaggctggtcttgaactcctgacctcaggtgatccacccacctcagcctcccaaagtgttgggattacaggtgtgagccaccgtgcccggccagtgtttcttactaagtaggtagcacctcagtgctccatgtaagtcagcagagttgacacaataaatagtggcaaacctgatgtaggccagcgagcagcatcattagcaattctgcaggatgtgtggtggtgaagaacatgggctctggaatcagacagatttgaggataagaagcatacctctgccatattctaatgagatgatactgaatagttatttaatcttagagtgattatactatctgttgtccagtttgggacatagtcacttaagttcttaagtaagaggagaggggctgctaatattaagtattccaggccaaaaatataaactgggactgccctagacaaggatcacctttctttttaaatttaaaatatatataacaaaaatttcctcttgtaatcatttttcagttaagtggtacagtttggtggcattgagtacgttcatattttttggcaacaatcaccatcatgcatctccagaacttttttatcttctcaaactaaaactctgtgcccactagacaataactccccagctcctggcaactttctactttctttctctatgaatttggctactttaggtacgtactgtaagtggaatcatgcagtatttgtcctttcatagctagcttgcttcacttagcgtaatgtttccaaagttcattcacactgcagcagccgtcagcatttccttcctttttcaagcggaataatattccatagtgtgtatatgccacattcggtttactcactcatccattgatggacactcgggttgcttctatgttttggctcttgtgagtaatgctgttgcaaacacgggtgtacaaatatctgcttgagtccctgttttcagttcttttgggcatatacctagaagtggaattgttggatcatagagtaatttatttaatgagttattaattatttaatttatttaagttatttaatttgttaaattttttaaggaactgcggtactgtttcccacagtatctgtaccattttacattttcaccagcaaggtacaagagttccagttcctctacatctttgccaacacttgttattaatatttcccttctcttccgttcccttcccttcccttcccttccctgcccttccctgccctgccctgtcctgccctgccctgccctgccctcccctcccctcccctcccctcctctctgcttctcttcccttttcttctttctttaagccagagccttgctttgttgcccaggctggagggcagtggcgtgatctctgctcactgcaacttccacctcctgggttcaagtgattctcctgcctcagcctcccgagtaccttggcctccccaagtgctgggattacaggcatgagccactgcgcccagcctctatcacttttcttaacctccaaattgctcaataaaaaaatagctgacagcttcgtactgatcagttttcacacctgcataaagtagatgcactgaaactgtgggccagtcacaaccactcaatatcatcctgagggatgtaaacctggaagaggctgatgcctggtggagcctccctcgaagctgcttggccgtggaaggtaaaggaaagaacaggagactggggagctttttgtaactgaattctactctgttttctgggcatttatattctaggttgtgatgaccaggcctccttgttttactcttctttagagtttgtcctcattgacctcactgccctggagccccagaaagatatatgaaggccaagggtaacgtaccttgtgagtcctgacagttcagtgaaataggaaggatggacaacaagttggggccctccaggagaaagcagtgcctggaggaaaagggcagatgctggccaactttctccatatccagaaccttgctgtcacagcaacgcattgctgcacctctgcatttcctgcgtattgtgcttgtgatggtcaaaatttctggaaggccacatattaattggcaggcatgtgcaggataatttactgacagaaatgggctctttccattagttttttttgtttttttttttttgtttgtttgtttttttcacatcttgcataaaacagggcctgaaaggaaactgaaaccataaagctgcctcaaagcttttatctttaaaaaatcacagtcgatgacatatacattttgaaacaccaggggttaataccaagtcaagcctccagtgacctactcagtattgactttggtttttcttagagtgtctgagatcatcagagatacctccctgtcgtacagtcaaggcacctcctataagcacttgctggcttctcaaggcagtcttttgagataaataaactatttattttaaaaaagagtgagtgagagacccaagaggttaagtgacttttctcagtagtgcccaaacagaaatgcacttcttacttggtgtcaatgctgtttactataaagtggagaaggaaagctacaaggttcagtgaatttagggcagataattgaataactttgtttaccttttattattattattattattattattattattattattattattttttttgagatggagtttcactcttgttgcccaggctggactgcagtggcgcgatctcggctcgctgcaatctccgcctcccgggttcaagtgattcttctgcctcagcctcccgagtagctgggattacaggcatgcgccaccatgcccggctaattttgtatttttagtagagatggggtttctccatgttggtcaggctggtcttgaacttccgacctcagatgatccacccacctcggccttccaaagtgctgggattacaggcgtgagccaccgtgcccgacctatcttttattttaaatgttaacaggaataagcttgtagacatagaactttgtagaaaaaaatgtaagatagcatccagcttatttccctcttatgaaaactccaatgtgtgattgttatttcaaagacatctaggctattgtcatacacagggcatgctttaacagaagctcaaattctacccgatgtgtccattcatcagttaattttattcaaaatgatgtgtctcacattaaatcaggaagctttgattagtaattaagctgtgggtttgtcataaatagctcttattattttgagatatgttccatcaatacctagtttattgagagtttttagcatgaagtgctgttgaattttgtcaaaggccttttctgcatctgttgagataatcatgtggtttttgctgatggttctgtttatgtgatagattatgtttattgatttgagtatgctgaaccaggcttgcatcccagggatgaagctgacttgatcgtggtggataacctttttgatgtgctgctggattcggtttgccagtattttattgagaatttttgcatcgatattcatcagagatattggtctaaaattctctttttttgttgtgtctgtgccaggttttggtttcaggatgatgctggcctcataaaacgagttagggaggattccttctttttctgttgattggtatagtttcagaaggaatggtaccagctcctctttgtacctctggtagaattcggctgtgaatctatctggttctggacttttttcagttggtaagctattaatgattgcctcaatttcagagcctgttagtggtctattcagagattcagtttcttcctggtttagtcttgggagggtgtatgtgtccaggaatttattcatttcttctagattttctagtttatttgcatagaggtgtttatagtattctctgatggtagtttgtatttctgtgggatcggtggtgatatcccctttatcattttttattgcatctatttgattcttctctcttttcttctttattagtcttactagtggtctatcaattttgttgatcttttcaaaaaaccagttcctggattcattgattttttgaagggtttttttgtttctctatctccttcaattctgctctgattttaagtgatttcttgccttctgctagcttttgaatttgtttgctcttgtttctctagttcttttaattgtgatgttagggtatcgattttagatctttcctgctttcttttgtgggcatttagtgctataaatttccctctactcactgctttaaatgtgtcccagagattctggaaccttgtgtctttgtcctcattggtttcaaataatatatttatttctgccttcatttcattatttacccaggagtcattcaggagcaggttgttcagtttccatgtagttgtgcagttttgagtgagtttcttaatcctgagttctagtttgattacactgtggtctgagagacagtttgttataatttctgttctttcacatttgctaaggagtgctttacgtccaactatgtggtcaattttggaataagtgcaatgtggtgctgagaagaatgtatattctgttgatttggggtggagagttctgtagatgtctattaggtcagcttgctgcaaagctgagttcaagtcctagatatccttgttaattttctgtctcgttgatctgtctaatatcgacagtggggtgttaaaatctcccattattgttgtgtgggagtctaagtctctttgtaggtctctaaggacttgctttatgaatctgggtgctcctgtattgggtgcatatatatttaggatagttagttcttcttgttgaatagatccctttaccattatgtaatagccttctttgtctcttttgatctttgttggtttaaagtctgttttatcagagactagggttgcaacccctgctttttgttggtttccatttgctttgtagatcttcctccatccctttattttgagcctatgtgtgtctctgcaagtgagatgagtctcctgaatacagcaccctgatgggtcatgactctttatccagtttgccagtctgtgtcttttagttggggcatctagcccatttacatttaaggttaatattgttatatgtgaatttggtcctgtcattatgatgttagctggttattttgcccgttagttgatgcagttccttcctagcatccttggtctttacaatttggcgtgtttttgcagaggctggtaccagtcgttcctttccatgcttagtgcttccttcaggagctcttgtaaggcaggcctggtggtgacaaaagctctcagcctttgcttgtctgtaaaggattttatttcaccttcacttatgaagcttagtttggctggatatgaaattctgggttgaaaattcttttctttaagaatgttgaatattggcccccactctcttctggcttgtagagtttctgctgagagatccgctgttagtctgatgggcttcccgacaactgacacttatggagcactccctgtactccagatgttgctctaaatacgttacctataccacaccaactaccgttgtcctcaaggtatgataactcggtgctttcctctccagtataaagttattcatgtcatttggccagaacctcctgtcctttgatggtggtagatggtgatttctgaatgtcatccccagatgagtagtagccttaagcactgggtacaggcagaaatttgggaaggcaggtagcagaatgtggaatcaaagcaaatctagaataatgtaatattgtgtgaatatggggctaagagcaagggatgtatttcaaataaaggctctagttgaagaggctgggcagatacccagacagaaccaacagatttggaatagaaggcaagatgcatgggatagaatggaaggtagagtttcaagaaattgtagtccgagtgaaacacgcagattgttgcaagtggaacttaatgcactgccaaggctcagtgaggaaatgacatcctactgtcccatttttttttttttttgagacggagtcctgctttatcacttgggctggagggcagtggtgcgatcttggctcactgcaacccctgcctcctgggttcaagcgactctcctgcctcagcccagctcccccataccacgccccccgcgagtagctgggattacaggtgcacaccaccatgcccggctactttttgtatttttagtagagacagtgtttcaccgtgttggccaggctggtcttgaactcctgacctcaggcaatctgcccgcctcaacctcccaaagtgctgggattacaggtgtgagccacggcgcccggccctatgagacttcttgactgtcttcctgtcaaataatgatatcatctctgttgcccattgatagttacactttcccaactgaaggcttattcattttcttgatgcattatttaatatataaagctgactgaaggtacagaaacctatgaggttattaagctttggaaaatctctgcccgaatggactgtggcagtgtctagtaaagatttacatttttctcttggctgagcccatgggatgtggctgcccccaaatggtattccttgtgatcaaaacagctccttggcttctgtggcagtcatttaggttgcactgactagctctttttaaggtagaatagcctacatattgcaactaaattaagtcaactcatccagcagttttgctgtcaatctagcctatggtcagtgggcaccattctcacactgctaaacaaagttatggttatgaaaggcaaaagtatagaaataaaactacccaatgaaagtactggttaagtacatcttaagtagcttcactaatgaatgctatataccttgaaaaataatgagataggatttatagatagtgacttagaaagacggttatgatctattgctaaatgggtatgtataatgttatcccatttgtgtaaaagcatgtatatgctaatgtacaatgataagatttgtggactgttacctgcagtagaagtaggtggagggaaggaggcttttactttcctttaactttatagttttctgtacagtttgaatacaattcagaggtattatttcatatatatatatatatatataattcatataaaataaaattctctccctgttatttcctaacacattttgtggtggctgtttccctggatctttctaaactgttttgctttgatttactgtgggtgtgctggagaaagtgggaggtggagagagggagagagagagagagagagagagtgtgtgtgtgtgtgtgtgtgtgtgtgtctgtgtgtgtgtctgtgtctgtgtttaggaactggagcaggctttgaggaatttcaccagagtagataaagcagaaaggcgatgaagccattggtcagcatttatctttccaagggtctaagattcttcctttacatcagtacctttctttgcagctgtcttcccctcccctgcctgtaaagtcacatgctaattaatagatctttgtgtgttgcctttttcaccactgtgccctcaccaccactcctagccctgcctcttcccttggttggtctggctcctcttacagtaaaaatggctcttaattgcatggagcccaggagagtcccagatacagacgcagtggaacctcctgacatgcttgggctcaggtggggcatcgaggagggttctgaggagccctccataagaacactgggcttgctttctggctttaattgaatatgtggggaaatgggagcacctgcccagttctgatgtgggctgagacctgctgcttctcagacttaaatccagtgttctggaaagagaccgtatttttcttgacctgaaacagtcctttcctttgggtgccaggtccccggatacttgttgttacataatccttacacatggtcgtgctatttacagcccaggagtgagatgtgtcattttatggttttgcaatctaggaggcaggccacacagcaaatgaatacaagctgggcacaccctcttgaaataattgctatgtcgaattacaatctaggtgaggaaaagtcacacccaagctcttttaccaatatgctgttgtctttgttgttaataaagcacttaacatggggtgattttcaatggacccgagtgcaaattaacctagtttcttcttccataaaaaacatgttttgcagcaggaggccacaagcatgcaagaagtgtgttggagccacagattgccagacctggctgtggagttgcatttttcaactaagaagtagaaggttcaggtgcctttgatggttaaccaggcccaggtattaggctgtcctcagagagggctgtgatgggagtcagcctgttgcagcacaaccaaaatattttttgttccagtgtacaactgaatgtactttaatctgttctagtttcttttcttttcttttttgccagcgttggtgagtgtaccagaaagtttggaaaacaggtcgaagtggtagagataaaaatctactgcagttgaatttgttgaaaagcccaggacatgcctcagggacctgcgtttatccatttgctccaatctctttcccagcaatcacttaacatttgggggagttggaggatagctgggagtgggcatgcaacagcttgtaaggagggagaggcctgtggactgtggactggacagggtgtccactctttgaatccggcctcggcagtctgcaaaaataaattcaaaaatgctctttgtcatcttatgctgcatgtggtgttatctgtttaatgttaatgaggtttcagcgttgctttcaatggggagtgactgcagtacatgctcttgagccgttatctctttgcttgtccaggcagaagtttggagggaatgggctttggagtaggacgaagctacccaaagaggtatttgtaaccagcaaggtgggctgcctttgcatgcaaggtcattccctctgttgtcctgggctctccttttaactctcgaagggccccttctccagggtcatccagcctccagggttcttgccctatcatcctctggctgtgccccttttggttgctccttaccaagtctggctcacccccaaaggaccccaacactcatatttttttctcccttcttttcacccagttacatgtccattcactctacctaggcttagctcacctgggaattgttaaaaagcaggtattaggagacaaccagaggaattcagtgaggggtgtgaatggcggatgaatttaacctgctctccaattttggaagaggaacctgtaaaccccaattcatcgtaattggtgaaattgagggaattgttgttgttgttgttttttaaaaaacaattttattgaggtataatggacatacaataaactgcatatatttaaaatgtacaattagataatttttgcacccattaaatcatcaccacaatcaaggtcatgaacatatccatatcccaaaatgcttcctctatccttttttttttttttttttttctgggagagagtctcactctattggctagactgaagtgcagtggcacaatctcggctcaccgcaacctcgcctcagactcccaggtagctgggattacaggcaagcaccaccaggcctggctagtttttgtacatctagtagaaatgggttttcaccatgttggctaggctggtctctaactcctggcctcaagtgatccacttgcctcggcctcccaaagtgctgggattacaggtgtgagccactgcacctggcctcacagctctttttaatcctatcttcttattcctccttttctttttaaattttttatggagaggagaggttttctaaataggccagttcagtgctttcttgctggagttccagataacctttggataatgctgctgaagtttttggtctttcccacgttggagttggagcagcctcatcatctgagaaatactgccagaggcttgggatccaggattcctaggaaggagacagggtcctgaaggtagaggacacggcactggaccatccaggtggtttcctgtccaaaacgatcttgtggagcccaaggactgaatggtctagagggggtgatccctggcatgagctggcaatcagcacctggcatatcttggagttgcaccatcgggcaactaactgcgggtgccgggaatgtctttcccatctgatgggttaggtaaggcagtgcgtttgagaaatgatctcccttctcgctggcagatccttggttgatgttgaaacacagactgtccttcatatactcactctacctgttcctctgccctagttttgaaaggtcttttcttgctcttttgtctctgctgctttggactcttctcccagctacagtaagttgagagcagggccctgtaacacacacaggaaaggaagcaggcaggacctctgctcctttgatccatgtttttctacattcagcttgtccaggatattctaccttattctgcctgtacctttctttatgcgaacttctcatctgacacagggcaagatccagtcatctggaggaactggctcaggaccagatagatctaggcttttgattgctaggtgtccaaaaacatagaatttcattgacttcttaatattttgatccatgacatagtatttaccgcttacctgttttgaagtgatggttggggaataaaaagcaccttagggtacatggaaactagagagagggcaaatgctgacatgtgtcagaatgatgattttctattgaactcctacctccaagcgtggatagcagttgtcactattttattcttattttttaaattttgctttaagttctgggatgcatgtgcagaatgtgcaggtttgttacatagacatacatgtgccatggtggtttgctgcccgtatcaacccgtcatctaggttttaagccctgcatgcattaggtatttgtcctaatgctctccctctccttgcgccccatcccctgacaggccccagtgtgtgatgtcctccccacccccgtgttcgtgtattctcattgttcaactcccacttatgagtcagaacatgtggtgtttggttttctgttcctgtgttagtttgctgagaattatggcttccagcttcatccatgtccctactaaggacatggatgaactcattcttttttatggctgcatagtattccatagtgtatatgtgccacattttctttatccagtatatcattgatgggcatttgggctggttccaagtctttgctattgtaaatatcagtattatttttaacccactgtagcagctgaagctgtgatcatcttatcctaataattaacattcgtacagcacttttctttgcagcgtgctttctcgtgtaacgtttgagctttacaagcctgtggcattggcaggcaagtgtcttccactctacagttcgtaaaactgaggtcacagaggctgaatgacttgctagtcaggggtgaagctcagactcagacccagagctcatgctgtttccctgctgcccttgtgcatgtatggctgtgcagatgagtaagagactcttgttagagaggcttgagtcacagtcctttgatgcagaagtctcaaagtagaaaaactcatatttcatggatggctctgtttatttgattcatcttgtgaattcaaaatggaaaatacattcatttggtgggtgtattggtttgctggggctgctgttccaaagtaccataaactgggtggcttaaacaacagaaatttgttctctcacagttctgggggcaagaagtctgagatgaagggttggttcctgctgagggctctgagggaaggatgttctccaggcccccatccttggcttggaggtggctgtcttctccctgtatctttgttgtcttcctgtgcatgtgtctctatctaaatttccccttcttattgggaaagcagttgtactggattagggcccaccagaataacctcattttaactcgattacttctgtaaagagattgtgtctaaataaggtcacattctgaggtactggggcttaggattcaacataccaattttgcggggagtcaatttaacccataatgataggcatgcaattgataaaataaaaaatgtaggccatggtgagaatttttaactctatcctaagagggatggtgaatgctttctaactaaatgagtagaaaacacttctttgtccctttgcaaggttttttctttccctctgaacccgctaactcccagcctgggaagcttacaaagggagtcctaagtaggcctagctttaactgccccccacccctccatgacctccatattgggagacagttctccctgggtctgctggtctctgcacatgttgtaagtagagtcatcgtctgccctttgttctggactgtcttttcaaggatgcttatataatgcgtggccttgggaggtggacatactgtctccctctggcacaaagggcaggcaggattattgcccgttataaaagattcaggttccctaagttcagggtttctcctctgtaatgcaacctactgtatacacatcatttgtttttctctgccttacaatatggaaacgggcactcaagagaaatggcataaaaatgctgatccaggaatctcgtttcttttgccagcacccatgaaattggcaggagaacttgttagcttgtaaagggggtgaaatctcagatgctttacagttcttgacacacttaaaataacttctgtactggcattgtggttcagatgttgatcatgggtcagtgctttggcataagtctgtggtttttaagcttttttatgttatctctggaactcttccctcaaatgaaatccaccaggaaactaatacaattaaagcttctctgggtgaatgacataggggtagaagcctagatttctccatcttaggcagctcccgagacatctttggagaagctgcccaatttcaaaaacattgtgttgggctactaaaggcccctttaaaactcaaatctgatgtctgggaagaataacacattaaattcttatcagacaatgccaggtgcagtggctcacgcctgtaatcccagcactttgggaggctaaggcaggaggattgcttgagctcaggagtttgagaccagtctgagcaacatagcaagacctcatctctactaaaaataaaaacaaaattagccaggcgtggtggtgtgcacccttagctccagctactctggaggctgaggcgggaagattgcttgagcttcagaggttgaggctgcagtgagccatgattgcaccactgtactctagcctgggtgacagagtgaggccctgtctcaaagaaaaagttctaatgagacagattaattatgtttagcaaaaaattaagttaccaattactcataggtcagcacaaattagtttttcaaaggactgggctccaggactagtaagttttgattgtaggctacagaggggaagcttgtaagagggaacactgcatcagtaggccctgggcgtagggcagggctgagaggtagaggaggggagtgctagaactgagaggtgctaagagatagtagatggtaatgaaaatcactttcgaactacttgatttctgtgatcatcaggatcccttcaagctgtcccatgagctttgggtggggccaggcagagggagagaggcacctttctttcatgtgtattttatgttggggttctgttgtgaggcaacatttgaaaaaatcactatcctgccgaagcaagattaaaagctcatcttttttactctgttacctgatgctgtggtaatgagtggtgaaaagtaaaacagatgcttgttccctagagcacaagaggaaggtgactcagcagaaggggttcctggggtttgggcctaactctactactgtcttctgactctactgtgaatttgctgtgtgacctttggctgaccactcaacctctctgggcctgttttctcatctaacagaagggatacctccttctggagacatgatttcaaaaagtcctcatatttaaaggctgatgtgctgtgaagaggtgatgtagcttttaacccccaaaacattaaatattggattcttatgtgtttgcatcttaagctgctagacctcattcatgccagacctcattcatgccctttgaggaagatgcatgcactgggcctgaagtggaagttgtgggcatttttgagagtaaaatgggtggatttgattcctcctgctacatttcccttcacacttaggactcactatgacacatgggccaaatccagtttgctgcctatttataaataaagttttattggaacacagtcgtgcccatgaggttacatactgactatggctgcttttttgctactaatgatgtctcacacagaaccccaacataaaatacacataaaaagtttgctggcctctacttaaggccacttggtgctcagtaggcttggcgcaaatgactgtgtggatttaatttttcatacaaaaaggacacatgagcagcctctttaaggaagacttcttataccccctgatttatgatactttggaagaagagattctctttagagattgagagaatcttctagctttttcatttatgggtataaaacatttttcatttactggtgatttctttcttttgaaaaatggctaaacagtgctctattatgtgagattagtctaagtgaaaaaatgcactataattttcaaatatattaaaatgcaccctgtcttggactagtgccactctgctattttcctttcatattctggggttttaaattcacaggaaatgttttaatggctttatctgaagcctatcatgttgacaaagaggcaggcagatgactgacaaggtaaaggtctcagaaactgggaatggctgcagaattcaggatccaaaaggcagcttcgtgactggcttggtgaggagtcattcatatgtctataataacgaggaaagactggggtaattataaacaaatatgttaaccagtttttccagacaatcccaggactgcttcagtttaagtgattattttgcctgaggcttttggcatcagcgtttgtaagagtaaaccccaacacttgagtcagggaggcagaatctgtaggctcagttaaagattatgggggtgtaaaaatggacagtgaatgggatactagaattgtaatggaaaatgtttgcctggtgcagtggctcatgcctgtaatcccagcattttgggaggccaaggtggtaggatcacgaggtcaggagttcgagaccagcctgaccaacatggcgaaacctcgtctctactaaaaatacaaaaattagccaggcgtggtggcacacgcctataatcccagctacttgggaggctgaggcaggagaattgcttgaacctgggaggcagaggttgcagtgagccgagatcgtgccactgcactccagccaggatgacagagtgagactccatctcaaaaaaaaaaaaaaaaaagggaaaatgttttacaaggcttgaacttaagtaataattctcagctgttaaaggaaccctattgccattgacaagcacaacatactgccccttttattaaagtgtcagtgtgaccaggtttgtttgtggggacacagtgtgctctagatgtgcttggggtgattagggaagtggtttagtttgtggctgtaagtcttaaaaaaagaatataggtaatttgagaagatctggggtaggtcatgaaaaatatggaaaaattagaaagtagaaatcaagctatggaagtggggtgggatgagcaaaacccattgtcaaatcagatccacgcggatcatgaattttacccatcattaagctttactaataattccgaagaggcaggctattgagaggctcagataaagcagagagaggtctggggcattgaggatgtctccctgggaccccctctccctccctagacctgtccctctgattcacaatactaaatgggtctaagtaaggtgtacagtgcaaagcttttaagttttaaaagaactccatttgatacccctcattattttgttggctacatgacattttccagggagccacgcctcaaagattttgggtattgcaattctaagaaatcctctggccagagacatccttctaagggcattcagtagacaaggtttttcctcctagcaaagatcattcctctcattacctggaggtgcaattgatgagaaattagattggttcacctgccttcattccttttttcctgggatcattcatctcttctcaccaccaagtcccctactccctttaggtcaatgaatggatcacagccctgctgcttaaacttcttcctcctagggagtaaaggtaaaaaaggactgtaattgttcagtgtcaagcagagataaacaacttgacagcttgcaaacaaaggaagagcaaatgtaaggtagggttcatggtgataggtatcctggaggaataattaggaaagggttgaccactacaacaagaagcttttgggctaaagaatgagaaactgtcagatttctaggattgttggtttttctaaaaaagcacattttaactttctaatttcttctcttccttcctccctctgtatcccctgcctatctctgctgaatgttctcccctatcccacaagatgacctcaactctgctggggctcctgtccttgtcgtcaccttgttcttgctgtcgccatgctccctgtctgccttctcccctttgaggctggcgagatcctggaatacagagtcaatgccccacagaagcaacagtgttttcagctgaatactgggacatgcacaggaacctgcaaatgtatcaataggattttcaatttaacaaaattctttgaaatcagatgagttatggcctgtgagttgccatctgaaacatagcaaataccttttaaaataaatttaagttatagtcatactcagacctagacttttccatttttgagctaattagatgctagattaggtttacaaaggaagctttaaaaataatcattcttagggattttaaagtttctgttctgattataaaagaagtatgtgagcattgtggaaaatttgaaaagtacaggagaaaaaaagtcactcacatgtaatcctagccaagataaatactatcgtactattttattgcattttgtttctggtattttaaaaagatatctgtctgtctatctatctatctatctatctatctatctatctatctatctgtctgtctgtctagattcttagaactggaattcttgggttaaagattttgcccatttttatatgctttgatacatcctgacaaatagttttcacagaaagtgacagaaattttataactcaatcataatacaaaatagcccctttcactagaccctctccagcactggacaatttcattttatttttgatagataatttggctagacaacaatagcaacacagtgttcattgtttgagaatttctttggttattatagggtggatattatgccttaattgatttttttgtgaattatctcaatgtcttttgctcattagtgtgattttctgttcttttctttctttctttctttcttttttttgagacagagtcttactgtcatccaggctagcgtgcggtggtgtaatcttggctcactgcaacctccacttcctgggttcaagcgattctggtgcctcggcctcctgagtagctgggactacagatgtgtgcctccatgccaagctaatttttgtatttttagtagagacagggtttcaccatgttggccaggctggtcttgaactcttgacctctagtgatccacctgcctctgcctcccaaagtgctgagattacaggtgtgggccaccacacctggcctgactttctttctatattaaccccttggtatatttgtatcaaatgctttttctggtatattgcttgccattttattgtggttttttcccctaactgtataaaggcttcaaaattttactagtgaagtttattttttctgttgtcttggaagtcttttaaaagtaatgagacgtgtctaagtgtagctatcagttaagtgagattatgggtgtgaaaacatttttgtaaactgaaaggcactattatttccttcccgtcacatataaaagtttcaaatttgtatttagtcaaatgtatttatcttttttcttgtcttagaggtcttttcaaagcaatgatgtttgtctaggtgtagttatcagttaatgaattatgggtatgaaagcatttttgtaaactgaaagacacgcttcaaataaaggactaaaagggggatgaatcttcacctccactaccacctggaggatctacacaagagtgttttctggtggtattaggctaaaaagacattcctttgcaagttttgccatactttaaaattaaacaattgagtataatgttgtgtggatcagcactgcccaataaaaatacaatgcaagtcatataagtcattttaaattttctagtagccacattaaaaaagtaaaaataaataggtgaaattaaatttaatagtcttatttaatcagttatataacaaaattatcatttcaacacgtaatcaatataaaaactctgtttttttttttttttgagatgggttctcactctatcactcaggctggagtacagtggcatgatcacgatctcggcctactgcaatctccgcctcccaggctcaagccatcctcacacctcagcctcctgagtagctgggactacagtatttttggtagaggcggggttttcaccatgttgcccaggctggtctgaactcctgagatcaagtgatccatccgcctcggcctcccacagtgctgggattacaggtgcaagccacgtcacctggccaatataaaaactcttaatgacaaattgtacattctttttctttttcttttgagacagggtctcgctctgtcacccagactggagtgcagtggcgtgatcacagctcactgcagccttgacctcccaggctcaagcaatcctcctacctcagccacctgagaagctggggctacaggtgtgcacaactatgccttttgtatattttgtagggacaaagttttgccacatttcccaggctggtctcaaactcctgggctcaagcaatccatctgctttggcctcccaaattgctgggattacaagcgtgagccaccatgcttggcccttttttcttaagtcttcaaaaatctgatgtgtattttacccttaccgcccatctcagtttggatcagctacgttgaggtgctcagtagccacgtgtggctattggctgctgtattggacaacacaggtctggatgtggagggatagcaagatctttgagatgttttctctactctggattcagagttcagtctaaatttgggtcacgactttgaagaagtggcctttctcaatggtacatgcttaaactaattgaacgaattggctatttctgccttgttagaaatgtaagtcttctttttctatccacgggcaggaatttagtcatattatcctttgtctttgctgtgactaattatctttcttccttgcagagccccagaactcggaggtggttccaactagttgattaggaataacaatatcacatggaaaatggcaagccccagccctcccctgacagcattagcaaaatctcatcctgagttttgctcttttaaccctaaactgtacgtgaggtgggagcccccaaattaaacaaaactagctcgaatcttattgcttagtggcaccttcctgtggctttgcagacatacttgggcagcaggagctgtgagctctcccttggcttaatctggttaaaaccaggataaagaattaggtcaggggcctctggctgcaaagcagtctgtttccagaactcaagtggagccgtggaataaaaataaatagaattggaaaagcattactcagccttcgcatttgacctgttctaggtcaaaactctagctcggattcagagtcaaaacagttgagcattgcaaagagtggtgggactgcattagtaaccaggctatggatgtgcctgtctaaggtgctctaagcagtaactccaaggtgtgatttggggtttgaggctccgcatggtatatagagatgaactgaccccaaatttcactttattaatcttttaagtatcagagcatctggggtgggaccttagggcctggtgatgggagcagcaggtggtcctaggcctagggggatcgtgaacttgactaagacccagtttttcctgggattcagtgaaagggcaagtagataggtctgggtcaaaaaggaggagaggctgggtgtggtggcttatgcctgtaatccccgcactttgggaggctgaggcaggcagatcatttgaggtcaggagttcaagaccagcctggccaacgtgatgaaaccccatctctattataaaatacaaaaattagacgggcatggtggtgggcacctgtaatctcagctactagggaggctgaggcaggcgaatcgcttgaacccgggagacggaggttgcggtgagccaacattgcgccactgcactccagcctgggcgacagagcaagacactgtctcaaaaaaaacaaaaaaggcggggggcctgcacgtgaatctgatacctagaagctagttctcatctcactgaatgggggtaggtctaatgaggcatggagagagatacctacatccgagtttgacctgcccagccaaaaaggctcattttcatcagctctgtttaccaacagacaaacctttcttaaagggagtgctccagagtggtgagacatccaagctaaagcataaagccaaccattgttgggagttattgacggcccctctaagtcttgaaggtgccagaccgctgggcacaggcccctcctggcctccatcccctgccaaccgctactccaaggttagtccagtcttttgcctatcctctcagtcactatgtttctttgctgtgtcatttgatccttttccatttgggctgaggttagggcagacagttaatgagtgcaccagctgtctaggaacagtgaaatacagtcttctctttttcgcttgcataccatgcctggtagatgcagagagtcagcttttgtagtgccggaagagggtgccctccttgacaccgtccaggcccaggtgcttttttaattttattttattattattttttatttttttgtgttggagtctcgccctgtcgcccaggctggagtgcagtggcccgatctcaactcactgcaagctctgccttccaggttcacgccattctcctgcctcagcctcccaagtaggtgggactacaggtgcccgccaccatgcctggctaatttttgtatttttagtagagacggggtttcaccatgttagccagaatggtctcgatctcctgaccttgtgatccgcccgcctcagcctcccaaagtgctgggattacaggcatgagccaccgtgcccagcccaaatatcttaattatataaacctgccttgttcagaattcacatggattatagcccaagtggctttttccagtaaaatttagtgcagctttctatattcacaataggcactcgagcacagccagaacttggcttttacatgcatcatcatgtgcagtgcagttcagcagccccactggaggacctgctgtgtacaaagcactggttaggacctgggcgaatcccggttcttgtggtcaggtagcctatactctggtgataaaggagacattatagatacctattgtataagagtatcttggctgggcacggtggcttacgcctgtaatcccagcactttgggaggccaaggcgggcggatcgtgaggtcaggagttcgagatcatcctggctaacatggtgaaaccacatctctactaaaaatacaaaaaattagctgggcatggtggcatgcacctgtagtcccaactactcgggaggctgaggcaggagaacagcatgaacccaggaagcagagcttgcagtgagccgagatcacgccactgcactccagcctgtgcgacagagcgagactccgtctcaaaaaaaaaaaaggagtatctatacagtcagtaactctacaacaattttcgtaaaggaactgaggaagttcaaaggaagcagcagtttactttcaattggtaagaacagcagacttctcagaggtggtggcatttgagctgagccttgaagggtgagtaggatttagatcacagaggaaggaggccatgaatgaacatggtcgaggcatgcaggttcattcaaggtgtgccggaggatagagtggtgttcccaagtgtcagaggcagactctgtgtggagggctgtcattgggaacaagaccagaaaggtcagatcatgggtaaccttcttgggattgaaactgtattcagtaagcggtatggaacaactgaagttttcagggagggaagtgacccaatctcatctttggaagacagcaggttgggagaagattggagaatttagcttgtggaagcagaggaacaagtttctgcaggcattcaggccaattaaggcagaaaagagtaagaatcttgtgcagagggaaaatcaacaagctgaggtggctggcttagatttggaagatgggattaagggagtgagcagcagttgacaaagttgggaacataaggtggaagggtgacttgaggatgatggagtctgattgggctcatccacatgtcagcagcccgtccacttggacacatccagcagaaaggtggaaactgagacctggagccaaggcttgaggtgacgactaaagtaagagacttaggagtcactagagagaagtaatgacaagagaaattgaggcattaggggaaattatctagggagatagaggtgagaaaaagacctaagacagagacttaggaaaggactgcaaaggaagagatgaaggaagaggaaccagcagagggaagagagctgagagtgagggggatcagctggaggatgtgctttagaggcagcagatcctgaatcccagagctcctcttgacttagactctaggcaggatattgttgctttcctccccagaatagggatactaatacccacctcacagggtggtgggggacttactacccatggcactcagtgggcacttaataaatgctcatctccttttccctttcccatagaaacctagaaagcatgttaagaagggtatggccatcaggattaaatgctttagaggcggtgaggatctttggaaaggactataagactcccctaaatcaggtcactagtgggatggggaggaagtattaataccttagccctttccctagagagcaggcctgaagaaggcagattgctgggggctggtgatcaggggataggaggaagtgagaagagcaatggaggctcccagtctaagccatttggcagtgaagggagggatgcagaatgaactggagcttgaggaggtcaaggagttcattaagggcagagcgctgtggctgcttgcatcagtgcagccagctgccctatgaagagacgtgagctcgtttcttgcagaatcctttttctcttgggtttggcaaatacagtcatacatttggatgtttgttaaaatgtgcagctaattaactctgggaggaagaggcccatcatgtgagtgagtgaaactggtttgctgcacgaactctgaagaggacttggctgggttctgaatcaggagttcttttattttatttatttatttatttatttatttatttttattttattattattatactttaagttttagggtacatgtgcacaacgtgcaggtttgttacatatgtatacatgtgccatgttggtgtgctgcacccattaacttgtcatttagcattaggtatatctcctaatgctatccctcccccctccctccaccccacaacagtccccggtgtgtgatgtcccccttcctgtgtccatgtgttctcattgttcatttcccacctacgagtgagaacgtgcggtgtttggttttttgtccttgcgatagtttgctgagaatgatggtttccagcttcagccatgtccctacaaaggacatgagctcatcattttttatggctgcgtagtattccatggtgtatatatgccacattttcttaatccagtctatcattgttggacatttgggttggttccaagtctttgctattgtgaatagttttaaagctgtaatctcacaagcatgggggaagaagggggcacgctgtccagggaagtttccaaggagaggcttccttttgagatgagagctgggggaaggaagtgggaagagccaaggaggtaccttaggtaagtcttcctggggatttctcagtccggaagcctgaaacctcctttcagaaaagtatcagggagtctcacagccctccctgctgcagacaagcacagctcagccccaaatatttaccttctctcctcagtccttagaatctcagacctctgtggctcctgcccgcctcctctctttcttcctcttgaggggaatggtttaccttcgtcaaactcctcgagagatgaagtggggacaaagtggagaggagagtgtgggggagggagggatgggaaaagtaggaggggctggagggtcctgccactggctctgaggaggaagaggagcactgaagtacccagaggaagcaccaaggtggtgtgtcctgtgaatccacccttcggaaaaagaacatctttgggtttggcagcatcctgtgctggatgtggggaatcctctgcttctagaaaagttctgttttctccccagatttcaattgtgttttcctagttcctcctcaggcatagctgctgtggcttcaggttggtcttttcttgaatgggttgctttttctctattttttctactttttttccttccttcctcccttgcccaccctctcccgtcctgttctaacaggcagtgtggatggtggctcaatgtgtcagccgcacaaccagactgtctgggtttcaaatcccagcttttcacttacctgctgtgtgtgcttggggaagttacttcagtctcagtttcctcatcttaagatggattataagggtatccgtctcatagggtaacacagccctccccaactggaacactgaagtataatttctatactttatacagaaacacactgtatgatttttagaccatgtatggtggctcatccctgtaatcccaacactttgggaggccaaggcgggaggatcacttgatcccaggagtttgagactagcctgggtaacatagtgagacctcatctctacaaaaaataaacaaaattagctggatgtggtgatgcacacctgtagtcctaacaactcgggaggctgaagcaggaggattgcttgagtttgggaggtcgaggctgcagtgagccatgatcatgccactgcactccagcctgggcaacagagtgagatactatctcaaaaacaacaacaaacaacaccaaaagaaatgtactataaaatttttaatttctagaaatttaatttctacaggctcttttgatatatatattattttctgtatcacctacctgacaaaacccaaaaaggatttaaaggcatctgcaaaaaagggcagatagatcattgatagattagataggtaggtaggaaggtaggtaggtagatagatagatagatgtaatatttacagagtatttactattttctaggtaccactcttatctctttacatatattaactcagttaatcctcaggaatgccacattttgggtagatttggaacatttggttttccaaggcctcagcctttctttcacatgaactgctgtgtaggctgatccctggatctgctgctttggctgtgttgatttttttcgacctaaaagtaggatgtatttttatttattcctaataaattttggcctttatattgtacctcacaggctttatttgttatacgtttgacattatgattccatgtactagtaatcctttctacttttgtgatctttgacttcatcgagtcactgataaaaatcagctccaaaattgagccccacggtgcattactggagacctttctccagactgacatcaacagttctgtgtactcttcagtagcggcagaactatcctagtctgtattatctatttcacatttctctgtgaaagacaaacgtgagaggatttcttagatgctggtgataatccagattcccaccgtgtattatatgtctttctccaccttatctgatatttcctactacctacaaaatgacagaaaactaaactggagaagcagtcaatacatttttttctatcttttagataatccctcttcattttaagtagaagcagcataagatgatgtcaattggtgcaaactgaaaggaaagagacaacagtcatcgtattcaaagaattcattttgccaagaagctgccacttccaaggaaaagtatttaactactctaatttttagtctgtgatttagatgtatttaatttttgtaatgcagtgttgtcattgtcctagcagcatggcatattcttttagtttgctgtttgagttgaaatgaaaattcccaaagggtggtatatagtgcatgaatccacgtgggagcttaatgcttttcaacagtgatattggaaagaatgactaggaagcgaaaaatcttaaggaatgttcaagttttaaggcacatgcaggaatatattgtaatatgggggggcattttctacaaaacaaatatgtttattattccatttctgtctatactaaatggtaaaaaagtcaaagagcccaaatcttacatttttgacacaggctgattgctaaaacatattattaagtgaaaagtgcaaggtataatatgctactgtttatagggaaaatgctgataaaattggtaacattaattacctgtggagagaacactagtgactgggggacagagcctttagtactttttgaatcatataaatgtattaccttaacaaataatgaatgtggccaggtgaggtggctcacgcctgtaatcctagaacttggggaggccaaggtgggcggatcacctgaggtcaggcgttcgagaccagcctgaccaacatgatgagactgcatctctactaaaaatacaaaattagctgggcattgtggtgcgtgcctgtaatcccagctactcaggaggctgaggcaggagaattgcttgaacccgggaggcggaggttgcagtgagcagagatcgtgccattgcaccccagcctgggcaacaagagtgaaactccttctctaaaaaaaaaaaaataaaatagtgaatgcataagaaaaaagaagcataatttgaggaaacaacaatagtcattcttttctgtttcttcttttttatagagtctgtgggctttggaattcgatgcacttagatttgagttctggcttagctgctgtttgcggttgggcatggggcaagttacataacttcaccagagtgtcatctataacatttgagcaatactcttctggttgttttgtgtgtgtgtgtgtgtgtgtgtgtgtgtgtgtgtgtgtgtgtgtgtgtgtgttgtacacagatcaaatacaataaggatcattttagcctgagtatgaacatcttcctctgaagatggtttttcaccatccaagaaagacaaaagacaaggtcatcttaatggttggtcttcagattgtgaaaagattttagctcaaagtttttaatcaaaagtgaactttgaactggtcattagatccagccaaaaggattcaacctgtcttcataagagagttgaatggttaagccaatcatagttagacacttcttgcttggatctttggaagaaattagccaattagatgtaagccacctctttcctttgttatagcaacatctcatgagagtcagaggctttgctctgctggacagaattcaggggaggcaccataaagtaagccctggctacagacaagggctgctgttatatctgtgtcattgcctaagacacttctgggacagaaagattgggatctgggcagagccattaacactgcatccactgtaagccctatctattccctgctagataaatctatgcactgaaaatttttcctggaggcaagggtgggaaaatatgaaactaatattttgtgtggtatctatattgtcctttatatactcaatgagtgggctttacaacatgagtgtttccaatgcaagggccagaaaaagaactccagttgtttaaacccaaatggaattggctaagacaacagagttcctgaagtaggtctgacttcagatgagaattgacccagagtctcaggatatccataggctctatatctctgtgattctttcaactttgttctctgttacttattgcttaatctggctcttctcaggctagtcaaagtgatgagagcatttccagattttgcaccttcatatcacattgtgcaggagaagagaaaacaccattcctgattgctccagaagcttcatggatttcactgcctctcttttggcttgagttgggtaatgtgcccatcgctgaaccaataggttatgctagttggcttaggtcattggatcacaaacctggaaccccttcaagggattctgatgtcattggtctgggaagtggatcccatgcatggctattttaaaacactccctgggtgattctaatatacagccaaaaatgagtttattggcataagccaatcagtgtccactctgagagctaagactataactgttctgcaagggaaagtctgagtgtacttaatagattgatgggagaaggggataacagatgttggcaaagaaaacatcatattacttgtggcaaacatattagctgccccggtgttcatgccctttgtttcttccttgccatcagaatccagcttttgtttgggcagcaaggtgccaaccttaagggatgaatcatggttggtccaaagtgctattgataatctgcttcctcacttttccagcctcccttgcaatgagataggagagagagagggggagagagagaaagagagagcacacgtgtgcacagaggaaaagctaagttactctttattcatagagggagtacaaggaagtttaaagttaacatatgagaaattggaagtataagcgtattcttggagttatggaagtagctatcagaaaaagaagaggaaatgttcaacaatagctatctctgaggaattagactggaagaagaggattaaatgaaaaatgaaaacctctggttttcattttgtatctttctgttctctttgatattttatttctatgtgattatattatttttataattaaaaataaattgatctcttttgaagttgttgctaagagtttaagatggtttaaaatatatgtaaattattgttagaacatatttctttaagtgtataagtccccttttttataagaaataaaaagtacttttaaacaatcccatttatctacaaactcagtaatacagatgagaatcagatgttgtgttttaattttaaaatatttaattgacaagtgaaaattatatatattcaagatatacaacatgaagctttgatatacatatacattgtgtggtgattgccgcagtcaaattaattaacacatccattaccgtctgtgtgtgtgtgtgcgcgttcacgtgtgcagtaacgacacttaaaatcatattgaattccaagtaagcaatacagtattattaactatagtcaccatatatacactatggggatgtatatctgtacccccatgttcattgcagcatgattcacaatagccaagatatggaaacaacttaagtgtttatggatgaatgaatggataaagataatttggtaaatatattgcaatggaatgctattcagtcttaacaaagaaggaaatcctgccacttgtgacgacatggatgaacctagaggtcattgtgttgagtgcaataagccaagcgcagagagacaattactgcatgatctcacttatatgtggaatctaaaaaagtcaaacccgtagaagcagagtagaacagtcgttgccaggggatagagggtgggggaaatggggaaatgctggttaaagaatcaaatgttgttttagttttatgcatgagaaagtgatctgaggagcttaaatcaggactcaaggtcaaggtcagctcccggggattgaaagctggaggagaattagccattgatggtggcaggacattgagttctttctgcctttcatcttgttgcctcaaccttcttatctagcagccctaatctgatttggccaacaactgacgaggaaaaaaaccccaagaattcagctataaacatcttcagttattgatttcagttttgacttgttctcaggtatcttatgaaattagctcagtatgttttcttttgctacacctttgctaattgacccattgttaaagttcagggccacggcatcacattgaccacaatatattatttcagaaattaaggaaaaacaaataaaatattactttagaaaataagactttaacttttgatgtctggtagaattgcattgaagtcacttgggaagaatatgtaattgacttttaactgttgttttcaaattatttgtttcaagcttaaaagataaatcattacaatttaaaaattggagagggacatcggaagacttgctctaacgccagggagtagcggagttagtttctttagttatggagagatgtaattggataacattttttacatcactatttttcatttgctgcatttcgatctgtattagcttgttctcacactgctataaagaaccacctgaggctgggtaatttatgaagaaaagaggtttaattgactcacagttccacaggctgtacaggaagcatggctgggaggcctcaggaaacttacactcatggcaaaagggcgaaggggaagaaagcaccttcttcacacggtggcaggagagagagagagagaaagagacagagagagagagagagaagggggaagcgctacatgctttcaaacaaccagatcttgtgaaaactctatcacgagacagcaccaggtggatggtgctaaaccattagaaaccacctctatgatccagtcacctcccaccaggcccctccttcaacacatggggattacaattcgacatgagatttgggtggggacacagagccaaaccatatcaagatccaattctttggagtcacatgtttaagaggaatccagattctcctcttaccaattatgtaatcaagtgtctattcttagttaaaaccctgtcaatgcttctactggttttagagctttaaattttgcataaaatttccagatactttcatgtataattattcatgactattctgtcaaaagaagacagtaataatatggaagtatgacatccatagtttcattgaactaattttaacaaccacctgtcatgtgcaagctgtccccaaaccatggtaggggaaggtgggatccaaagatgcatcaactatggatccatccttagcagatctttaatctcatattgattattagttatgtgttgcttccccattaaatgttttatcagagtaacagacactgaaactgaatgaattcgtataacattcattgtagatatttaggaatagcaaaatgactaatcgatggacagcaggaagggaaggatgttttaaaagtccaaagcctggatgatccaatgatgaatgagtctctgaaaaacagagatttggctgcatttagaacaaggcctaagacatcagcctaaggagctaaaaaaaattgtcagagacctttaattgcaagttggagaagccacctagtggtttgtttcataagttaaagttgtgtgaacatacgaggcaactcatccttggattgattgagtgggtctctaatcaagtgtgactaacaatctggtcacttttcatgaagtccagaaagcagggtcattttcactgagaataagcacagtgtagctctgcctaatattttgtttattttattgtcatctttttatctaaaaggagttaaggcaacttacataaaagtatagtgagataagataaactagaataagacaggaaagaaagaggaaaatatgaataaagtcataacaagtagccagaaattgaagtaattcaaaaatgcttgtgaaatcctgtatgtatatattttttcatgaaaggacttgaaattttcaggcacaagtggaaatggatcagttataaaatttacaacatccagaaagatgaaataatttttaggaaagataaaaccatctagtacttagagcagagcaatttttcttctggaggtcctcacaaattgcatactgcataatgtaatgtatcatggcctccatgctcatagtagaaataattctgagtcctggaggattttttttttttttttgagacagagtcttgctctgttgcccaggctggagtgcacaggcgtgatctcggctcactgcaacctctgcctcccgggttcaagcaattctcctgcctcagcctcctgagtagctgggaccacaggcacacaccaccacacccggcaaattttttgtatttttagtagagacggggtttcaccgtagtgactaggctggtctcaaactcctgacctcaagtgatccacccgcctcagcctcccaaagtgctgggattataggcatgagccagcatgcctggccctcttttttttttttttaagacaaagtctcactctcacccaggccgaagtgcagtggtgcgatctctgcgcactgcaacctctgcctcctgagttgaagtgattctcctgcctcagcctcctgagtagctgggattacaggtgtgtgccaccacctccagctaatttttgtattattattattattattattagtagtagtagtagtagtagtagtagtagtagtagtagtagagacagggttttgccatgctggccaggctggtatcgaactcctgacctcaagtgatctgctcacctctgtgttccaaaatgctgggattagaggtgtgagccagcgtccttgacctaggattgtttcttaattgtgctacactgatttggaggagcatgtggaccaacctccattttaaggacttgtattaactcatttgatcctcacaataagccaatgaggtaggtaggtagttttattatccccatattgcagatgaggcaattgaggaacagtgaggttaagaacttccctgaagtcaggctgttagtaaataacagagctgggattcaaacccagacactcaggctcagcacccacagtattttccaatatgctatactgagtggccaagtaagtataataaggcccttccaatgaagacagcagtacttgagttttttcccttacaacttatatagtctgtgagggattagataggtatgccttaacatgatgctaaagatgtggctagggttgcatatttcttatatgacttagttaactttgccctcttccaaggtcacagattttgtccctgaccccaatcaccatgcacatgtgcacatgcacgttcaacatgcctttggtaaaataaaagaggaccaggagaaagtgttcaaacttgccacttcctgacttctagaaaatagctgaaagcccatgccctgctgatggcatatcctcagattcaagatctaaaatgccgtcgtaacaaaacacagtttgttttgctagcttttctttttccaagtggtatctataaacatttgcgaatggcagctaaattggtttttcttaaacagtcatgagttgattgccaatcaacaaggcaagccttgtacagaacttagtagagaaataatggcatcattgaaacattttcagttagaggagtcaaaatatcatataacttgagtcctaaattgagcatttagaatgatgttcttttgggctgtgcattaggatagctgtgtggttaatgtctttgctaagaaacagtaaaaggtatactctataaaatgactgctctatagtgacaagcctccttaaagacaaatttctatgacattttaaaggcacacttatctcaataaagaccccaatgctcctaaaagattcaagttctgtattggaacaacatgatggcctcctttacataggactgataaagaactttaatcagttgataaagttgaatttgtgacagattcatcctatcaaaggaaaatgaataaaaaagaatgttgctgagatatggtggtgaaggagacattgcccaggaatcaagaaacttgggattttcaggtctactttattctgactacaaagggagacatagatttttttgtgtgtgtccgtttcttatgaacttttgagccagacttggcttccaatatctattctgatacctattagctgatgacattggattagccaaggaagctctttgggcctcagttactgtatctataaaatggctttaataatatatagattttattagatgctcactgtgtgcagatattgtactttctgtatgccatcaatctttataacattcttaaatggaatatttatcattgttaactccactttacaggtgagatcactaaattgagagaatatgtaatatgaagagtttcagtaagataatttatgcaaggtgccatatcacctggtgcagagcagattctccagcagtggtagctgatagtattcctatcaactttatctcatccatctccttctcttcttttaggcttgctttgaagattaataaaagagaagagccaggtgtttaggcaacatgaagtttgggaatgagatagaggtttaagccaaggggtataaataaaactaaacttttattttcctgcaggagtggcagaagctcaactatgatatccataccctgcggcaggttcgaagggaagtaagaaacagatggaagtgcatcttagaagatttaggtaagtctaaaagagattgtgaaatggtaaaaataactagttgtgatcattattcttcaatttctccaccatggtttttataaaaggaatgtcaataattgcctaattaagactactgtgtactaattattctcccaatcttgctcttatatcctcaagcataaatgcctgatgtttctgttgtcaccagtccatgtcttcaggacacactctgccatgtgttactccatctgtccctagtatagggtacgcatgccagtgcagtcatgtgggcactaacatttacttttttggcattgtacattaatttaattagatggggtgttggccaattagtcatagctttgtaagatgaagcaggttgggagaaatattgtttgcaagacagacagcaaaactcagtgtagaatttcggaagaaatatggaagaaaagcttcgaggttgggaaaaacacttgtggcattagggtagatacctgccctcatcactaatggttaatgataatgatttttctcaattctcccgggattgtgatacaataaatgtggcccccacattataaaataatcctgcttcaatgtttaaaaagtgaatttatcagttctgaagtccttgatccttttgctttgaaagagagcatgacatcttggcatcatcacttttcaagcgtggggggccatgtgaccgatctctatggctttggttggcatgcaatgggatgggatgggatctctgccctctttgcatatctagtattgttgtgagctaatagcctttttttttttttaaacaatgaaagttactccaagtaggtttaagtctttgaatcctttatacttttgggtgagtgatttttaccagctaatcatattaccctgaggaagaaaatccaggtttggagaaggacagcctggagggaaccactttgcaggctgggaggcaggtaggaattctggggacaggggagaagctaaagagtagggaggacaggaaagagggcttcaaaccagaaacaaggtggcaagcaaccagtggatgagtatctgaggctctgagggaaaagttaacaaagagaaaaaaaataccgaaagaattgtaattaaatatcctgccaatcacatggatctgggaggcagcacatggaatagtacctttggcttcagttttctgatgctttatgcttgtacagaatccacatgggtctgttcgtaatctcctgcagggaccgtattgcggaacacttgttaacttgggactactttacatgagtggtccatttttctaccttaggttttcaaaaggaagctgactctttgttgtcagtgactaaactcagcaccatcagtgattctaaaaacacaaggaaagctcgagagatgttgttaaaactggctgaagaaaccaatattttcccaacaagttgggagctctcagagagatatctctttgttgtggtaagtggatgctttttttcatttgccctaattttgctttaattgcttggctttttaaaactattcactatcctccgtattccaacaccaccatcactatcacatatgaggtggcagatgctggcattatatgctgtggtccccagtggcccgcagcatcagaatcacctaaagagttttaaaagttcagatttctgtatcacacgtagacctactgaggcttgggttccagctcaagagtttgtatttttcagtgaattctactgtgtagtctattttctgaaccatttgtaggtcaaagagatgtgagaagtattgtttatttaacctataagactaagaaataatctgaaaggagaaaggacgctaaggagtggggaaatgtttcttggataatgtaactaaaggattaaggcgtgtctctacatttgttaggaaaaaattaataaacgtcttacttgctcattgtcatttccagggtgggttttgttgttgttagattgctttttcccatcgacatgtcttggttcctatcttgccagcagttttttggtttgttgtttgtttttgcaggaccgtctcattgcacttgatgctgcagaagagttctttaagcttgctcgtcgaacttaccccaagaagcctggggttccatgcctggcagatggccagaaagaactgcactaccttccgtttccaagtccctaaaggagaggctcaggggcagaatgggaattcttccatgaggactcagcagtcaaccaaagttggacaattacatgtagaagagagtgagcaaatagagtttgcttagtgaaaaatgatactgaattctacataaatgtaaagtctttaatctgaggaccctgccccatgaattgtgcaggctgcattgaaacgccttggtgatctcatatttaggaagaaagttaaagagttggtcagatggatagttcataatgggtggttccattctgagagcccattgccccagctttggttttagttgtgtcataatctctgatcattaatcctactgactgagtggactatttcagttaataaaacaatatgattaatagagagagctgtcattgagtcccaaaatggattgccagttttaaaataattattataaaatgtatgctaaccccaaaataatactaggcatgaggtgacctctctgatttggtcaccttgtagaaccttggagggtgtcagggcatctctttgagtatcagttatgattattcagaagtatagatgtatcaaatgatagaaatgacaaggaatggctgggcgtggtggctcatgcctgtaatcccagcactttgggaggccaaggtgggtggatcatgaggtcaggagttcaagaccagcctgaccaacatggtgaaaccctgtctctactaaaaatacaaaaattagccaggtgtgatggcacgcgcttgtaatcccagctacccaggaggctgaggtaggagaatcgcttgagcccgggcagtggaggttacagtgagccgagattgcaccattgcactccagcctgggcgacagagcgagactccgtctcaaaaaaaaaaaaaaaaaaaaaaaaaaagagttatgtattcatgtgttgtacttgcattttaaattcccaacattattgatatctggttctctcatctttgtatattgtccatttctattccaaaagcctttcgctctttttttttttttttttttttttgatggactctcgctctgtcgcccaggctggagtacagtggtgcgatctcggctcactgcaacctccgccttccggtttcaagtgattcccctgcctcagcctctggagtagctggaactacaggcgcgtgccaccacacctggctaattttttgtatttttagtagagacggggtttcaccatgttagccacgatggtctcgatctcctgacctcgtcatccgcctgccccagcctcccaaagtgctgggattacaggcgtgagtcaccgcgcccggccaagcccttggcattttatctggaatagcatctgtaaactgaagtgtttgacctctgttttcttctctcctctttcatctgtttctgattcgttggctggcagctgcacctgtggggggacctctcatgcagacttgcacatatgcagggagtattgcactgaagatctttgctggaccttcttctcttcagaagataattttcaaaagggagcaatgctgtgaatgcagcttgcttctctctacagattgagaagtccagcttcaaaagttacttgccacttaagcaaggaacttgtcaagagatcatggttcatgttactgaaaagactttaaggatttgtaaggttaatccatagattgctgagaaaaatggaaatatttttatttttacagattttgcacttctgaattcaggttaaaaactaacttgtatttagtctgcttagaggactgtgacttgaaaatttttatataccaatgagctttttggtagcgtccacaatgtttaaaatatttcataggcgagatccgtgttctccatttattaatgcattgtagaccaatttaactgctgtgtttcaggaaaattcttcctagtttaataagcaagctaaaagttttattttttatatttagtgcttaatctttgcctcatgttatgtaaaattagcctgcagatattttctctcaattctgtagactctcgcaagataaacattcaaacagtgaaacaaacaataaaataaataaacctaaggatgtcgt

SEQ ID NO: 154 - DNA, 1522 bp, Homo Sapiens
attgcgctcggggaattaaaagaggggaaaaaaagcccgaagaaaactcacgccccaaacaaaacgcaaggagaggagggcgcgcggcctgcagccctcgcccgcgtccccggccgcggcgtgatgcgcgcggaccagcccgcgacgcccgggctgccgctgtccccgcacctggacgctggcgcggtggccgcgccccagcctcgatcgctcgccgcggcgactcggccccaggcttccggcgccggtgggggccctcgctctccatggggctgagggactggctgagaaccgtgtgctgctgctgcgggtgcgagtgcttggaggagcgcgccctgcctgagaaggagcccctcgtcagtgataacaatccatattcctcatttggagcaactctggtgagggatgatgagaagaatttatggagtatgccccatgatgtgtcccacacagaggcagacgacgacagaaccctgtacaatttgatagtcattcgtaatcagcaggccaaagactcagaggagtggcagaagctcaactatgatatccataccctgcggcaggttcgaagggaagtaagaaacagatggaagtgcatcttagaagatttaggttttcaaaaggaagctgactctttgttgtcagtgactaaactcagcaccatcagtgattctaaaaacacaaggaaagctcgagagatgttgttaaaactggctgaagaaaccaatattttcccaacaagttgggagctctcagagagatatctctttgttgtggaccgtctcattgcacttgatgctgcagaagagttctttaagcttgctcgtcgaacttaccccaagaagcctggggttccatgcctggcagatggccagaaagaactgctgcacctgtggggggacctctcatgcagacttgcacatatgcagggagtattgcactgaagatctttgctggaccttcttctcttcagaagataattttcaaaagggagcaatgctgtgaatgcagcttgcttctctctacagattgagaagtccagcttcaaaagttacttgccacttaagcaaggaacttgtcaagagatcatggttcatgttactgaaaagactttaaggatttgtaaggttaatccatagattgctgagaaaaatggaaatatttttatttttacagattttgcacttctgaattcaggttaaaaactaacttgtatttagtctgcttagaggactgtgacttgaaaatttttatataccaatgagctttttggtagcgtccacaatgtttaaaatatttcataggcgagatccgtgttctccatttattaatgcattgtagaccaatttaactgctgtgtttcaggaaaattcttcctagtttaataagcaagctaaaagttttattttttatatttagtgcttaatctttgcctcatgttatgtaaaattagcctgcagatattttctctcaattctgtagactctcgcaagataaacattcaaacagtgaaacaaacaat

SEQ ID NO: 155 - protein, 225 aa, Homo Sapiens
MGLRDWLRTVCCCCGCECLEERALPEKEPLVSDNNPYSSFGATLVRDDEKNLWSMPHDVSHTEADDDRTLYNLIVIRNQQAKDSEEWQKLNYDIHTLRQVRREVRNRWKCILEDLGFQKEADSLLSVTKLSTISDSKNTRKAREMLLKLAEETNIFPTSWELSERYLFVVDRLIALDAAEEFFKLARRTYPKKPGVPCLADGQKELLHLWGDLSCRLAHMQGVLH

SEQ ID NO: 156 - DNA, 2299 bp, Homo Sapiens
attgcgctcggggaattaaaagaggggaaaaaaagcccgaagaaaactcacgccccaaacaaaacgcaaggagaggagggcgcgcggcctgcagccctcgcccgcgtccccggccgcggcgtgatgcgcgcggaccagcccgcgacgcccgggctgccgctgtccccgcacctggacgctggcgcggtggccgcgccccagcctcgatcgctcgccgcggcgactcggccccaggcttccggcgccggtgggggccctcgctctccatggggctgagggactggctgagaaccgtgtgctgctgctgcgggtgcgagtgcttggaggagcgcgccctgcctgagaaggagcccctcgtcagtgataacaatccatattcctcatttggagcaactctggtgagggatgatgagaagaatttatggagtatgccccatgatgtgtcccacacagaggcagacgacgacagaaccctgtacaatttgatagtcattcgtaatcagcaggccaaagactcagaggagtggcagaagctcaactatgatatccataccctgcggcaggttcgaagggaagtaagaaacagatggaagtgcatcttagaagatttaggttttcaaaaggaagctgactctttgttgtcagtgactaaactcagcaccatcagtgattctaaaaacacaaggaaagctcgagagatgttgttaaaactggctgaagaaaccaatattttcccaacaagttgggagctctcagagagatatctctttgttgtggaccgtctcattgcacttgatgctgcagaagagttctttaagcttgctcgtcgaacttaccccaagaagcctggggttccatgcctggcagatggccagaaagaactgcactaccttccgtttccaagtccctaaaggagaggctcaggggcagaatgggaattcttccatgaggactcagcagtcaaccaaagttggacaattacatgtagaagagagtgagcaaatagagtttgcttagtgaaaaatgatactgaattctacataaatgtaaagtctttaatctgaggaccctgccccatgaattgtgcaggctgcattgaaacgccttggtgatctcatatttaggaagaaagttaaagagttggtcagatggatagttcataatgggtggttccattctgagagcccattgccccagctttggttttagttgtgtcataatctctgatcattaatcctactgactgagtggactatttcagttaataaaacaatatgattaatagagagagctgtcattgagtcccaaaatggattgccagttttaaaataattattataaaatgtatgctaaccccaaaataatactaggcatgaggtgacctctctgatttggtcaccttgtagaaccttggagggtgtcagggcatctctttgagtatcagttatgattattcagaagtatagatgtatcaaatgatagaaatgacaaggaatgtgctgggattacaggcgtgagtcaccgcgcccggccaagcccttggcattttatctggaatagcatctgtaaactgaagtgtttgacctctgttttcttctctcctctttcatctgtttctgattcgttggctggcagctgcacctgtggggggacctctcatgcagacttgcacatatgcagggagtattgcactgaagatctttgctggaccttcttctcttcagaagataattttcaaaagggagcaatgctgtgaatgcagcttgcttctctctacagattgagaagtccagcttcaaaagttacttgccacttaagcaaggaacttgtcaagagatcatggttcatgttactgaaaagactttaaggatttgtaaggttaatccatagattgctgagaaaaatggaaatatttttatttttacagattttgcacttctgaattcaggttaaaaactaacttgtatttagtctgcttagaggactgtgacttgaaaatttttatataccaatgagctttttggtagcgtccacaatgtttaaaatatttcataggcgagatccgtgttctccatttattaatgcattgtagaccaatttaactgctgtgtttcaggaaaattcttcctagtttaataagcaagctaaaagttttattttttatatttagtgcttaatctttgcctcatgttatgtaaaattagcctgcagatattttctctcaattctgtagactctcgcaagataaacattcaaacagtgaaacaaacaataaaataaataaacctaaggatgtcgt

SEQ ID NO: 157 - protein, 214 aa, Homo Sapiens
MGLRDWLRTVCCCCGCECLEERALPEKEPLVSDNNPYSSFGATLVRDDEKNLWSMPHDVSHTEADDDRTLYNLIVIRNQQAKDSEEWQKLNYDIHTLRQVRREVRNRWKCILEDLGFQKEADSLLSVTKLSTISDSKNTRKAREMLLKLAEETNIFPTSWELSERYLFVVDRLIALDAAEEFFKLARRTYPKKPGVPCLADGQKELHYLPFPSP

SEQ ID NO: 158 - DNA, 1534 bp, Homo Sapiens
attgcgctcggggaattaaaagaggggaaaaaaagcccgaagaaaactcacgccccaaacaaaacgcaaggagaggagggcgcgcggcctgcagccctcgcccgcgtccccggccgcggcgtgatgcgcgcggaccagcccgcgacgcccgggctgccgctgtccccgcacctggacgctggcgcggtggccgcgccccagcctcgatcgctcgccgcggcgactcggccccaggcttccggcgccggtgggggccctcgctctccatggggctgagggactggctgagaaccgtgtgctgctgctgcgggtgcgagtgcttggaggagcgcgccctgcctgagaaggagcccctcgtcagtgataacaatccatattcctcatttggagcaactctggtgagggatgatgagaagaatttatggagtatgccccatgatgtgtcccacacagaggcagacgacgacagaaccctgtacaatttgatagtcattcgtaatcagcaggccaaagactcagaggagtggcagaagctcaactatgatatccataccctgcggcaggttcgaagggaagtaagaaacagatggaagtgcatcttagaagatttaggttttcaaaaggaagctgactctttgttgtcagtgactaaactcagcaccatcagtgattctaaaaacacaaggaaagctcgagagatgttgttaaaactggctgaagaaaccaatattttcccaacaagttgggagctctcagagagatatctctttgttgtggaccgtctcattgcacttgatgctgcagaagagttctttaagcttgctcgtcgaacttaccccaagaagcctggggttccatgcctggcagatggccagaaagaactgcacctgtggggggacctctcatgcagacttgcacatatgcagggagtattgcactgaagatctttgctggaccttcttctcttcagaagataattttcaaaagggagcaatgctgtgaatgcagcttgcttctctctacagattgagaagtccagcttcaaaagttacttgccacttaagcaaggaacttgtcaagagatcatggttcatgttactgaaaagactttaaggatttgtaaggttaatccatagattgctgagaaaaatggaaatatttttatttttacagattttgcacttctgaattcaggttaaaaactaacttgtatttagtctgcttagaggactgtgacttgaaaatttttatataccaatgagctttttggtagcgtccacaatgtttaaaatatttcataggcgagatccgtgttctccatttattaatgcattgtagaccaatttaactgctgtgtttcaggaaaattcttcctagtttaataagcaagctaaaagttttattttttatatttagtgcttaatctttgcctcatgttatgtaaaattagcctgcagatattttctctcaattctgtagactctcgcaagataaacattcaaacagtgaaacaaacaataaaataaataaacct

SEQ ID NO: 159 - protein, 224 aa, Homo Sapiens
MGLRDWLRTVCCCCGCECLEERALPEKEPLVSDNNPYSSFGATLVRDDEKNLWSMPHDVSHTEADDDRTLYNLIVIRNQQAKDSEEWQKLNYDIHTLRQVRREVRNRWKCILEDLGFQKEADSLLSVTKLSTISDSKNTRKAREMLLKLAEETNIFPTSWELSERYLFVVDRLIALDAAEEFFKLARRTYPKKPGVPCLADGQKELHLWGDLSCRLAHMQGVLH

SEQ ID NO: 160 - DNA, 10184 bp, Mus Musculus
tctaagaaggatgtcatcagacccccaccccccggcacagtggccatggacttcctggtctggagaactgtgggaaataggtttctatttttagtaaactaccctcgtctgtcctcttctgttacagcaacagagactaactgaaactgagagtttcaccaaacgaccccgtcttcaaactggacacatgagcagcatatgcctcttcagagatgttgctatcatcaaaagtggagaaaggagaaagagaagggcctactctaggctggacggggccaaggaggtatgacaattaagtatgtactgctcctagatcaggtcagggctgaacaccactacaactggtatgtggacgatcaatggatttcatgtgcttgcacggtatgcagtattagcgtgaagacattcaattgcttgagttttgtcgcaattttcggatttaaaaaacaaacaaacaaaaaaaccaaagttgtattttaggtgccctacttaaatattttgagactaaatattttggcagttacaatttaagctcaaaaatgattggccagtgaaaaggggaaaaagaggagggaggggaggatcgggaaggagagagtaggccagtactcagctgacatcacagacggttaacaatggatgaatcttaggtggagaaagaaatgtgtgttcctcggatggtaattcttgcaacttttctatagattaaagtatttttaaaattgaaaattattattttaaaataaatagaagtccaaagaaagacagataaatggatcaacattgttaaataaatgactgataaatatttaaaaatgagaatcccagcttttagttactagggtcaggactaagaatataaaaacaaatagtggctcattataaagggctacacggcaagaaaaatgagcaaccgcgaaagctgagtgtggtcatgtgtgcctgaagttccagctcttcagaagggtgaggtcaaaggatccagaatcaagcttacagaagcagcttagtgagacctcagcttaaaaactaaagaaacaaaatcaaaagcccagtggatacagtgagtgagaagaagaatatgtcagacaaaagagtgtaaactctgactccacttacccaaggccacagaggggcctgaactcagcagaagccaaggcctcagatgggcttccgggcagaagccagggccagagaccgggcttcgatgcactgacaatcttgctcttgtcctgagtctgcccacactgggaattcccttcattatagatccttattattgatatttgtgtttacatgttgcacttcagtaaaaatgataagtagacatgactaggaagctgggaagatggcttagtcagtaaagtgcttgctgttcagttcagagtgcttgttaatcctggcactggagaggtggccatgagtgcgttcctagcaatcactagcccaaaggacagagaccttgtctcaaaaactgagatgcacagatcatggggaataacacctagggttgacctctagctacatgtgtgtacacactcacagacgcatacacataaacatgcatgcacatgcacacatatgcatgtatatacacatacacaaacatacatacactaaaaacaagagaagagaaacagggtgaggccagcaagatgactcagtagacaaaggtctgttgataacaaacctggagacctgactcccatccagggaactcccatggtgggagaagagaactgattccaaccagctatcctctggcctccatacctgtgctgtgggacacactgtaggacctgagcttgtggccatacacatacactaaataaatgtaataggtaaataataaagaaaaagtctgcacgcaggagcggtctgtcaccttaatccactctcatgcatttcgtgaagcaccttcaggataattccgctgttagcggtggggctggaagaggtgagtcaccttgagagtgcagagaggttttaagagtagctttgagtaattcctgcacaaatacaaacctgcaattagtcaccaacaactaaggcagccgaatgtttgaattaggagccagcaaaattaaacaaaccctattaaagcattctttggaacagcgaacatacacttcaaatgtgcatctcaggcaaaacaattgtgtcaacttgctggtggattgggagtttttcagagcctgctagggatcattgcacggacagctcagtttgcagactgttagcattttcgcacttccattaatattaatttttttgtttttgtttttgtttgtttgttttgctcttagccttgtagcttctgacagctaccaagtgaggactgataggttacaaaggtataggctagtcccctgagagactgagagaaagatggagggaatttaagggcactctctaacacaaagttttctgcccagtctctctacacagccaaagtatctgaaggctcagaactgtccaatgggtgcacacaaattaaataaataagtgtaaatattggtttttgtttttgttttgttttgttttgttttgtttttacaaagaagaaaccctgtccaggaagggcacctgcagagctggctgaagagcagtgtgtgggtgggcatgctctgttctggaatcttggcaggccagtgcacacagtgccgccagcctccttcctcctgactatattcaacagtacgtggagtagctaaggccacgacttgctgattttcagagaacatgaaatgaaatccagaaaggtggaatttaaaatcacctccccattaggtctacatgaggaagcaagtacaatcagagttcttggtgtacaaaagtaaaatcgatccactggatggtcactctggtttgaactggtccctcaaaaggccatgcattggaaattcagccctccctcaaagtcacaagctgaaggtggggcctttgagagttaatgattcggatggggttcctgtagtgacatcaatggctttttaaaagacagtgagatctaaaccagcatattttgacatcccatgtcatgtgatgacctctgcatgttctgatgcagcctaaagaccctccctaaaaatagtctcttgatcttggccttctcagactctagagccatgagattaataaacttctactgcttgaaattcactcagtttgtggcattctgtgacagcaacagaagacaaactaggaagatgttgttcttaatggtcaaagttaaaaccccatcagagccagcttagctgcacagaggacatcgcacagggcacggatcttgcccatcctcaaaggtgacagcattcagaagtcagaggttcagatccttgtttctagcacttccttgatgatcctcttgagcaaacccctagctcaggaacctcaggttgctgatctacaaatgtaagtgtgcacacctgccctgggggtgactgggaggatgtgggtaagctgcgggatgctgctgctcatgagtaaataatggttactctctgtcaagtctgctgcttctcagcctcgagctccccacctagaggctgggcccaataaacgctcatgcttagcaatgggaggcaggggtatctcattccacatggtaacctgatctggatctatttccttcctgccaacacaattccctcaggttctcagggtctctttgggaacacacaggttgggaatggtggcattcctcccctgccttcttcaccattctgagtgctgtagttggctaccagtggggctcatacttgacgctcagcttctgtgctgattctccttccattccttccccatgttggaacctaaagtcccaacccagagatttctactctcctggctcccaaaagatttttcttcctctactctcaaggcagtgtctgaatctgccaacattggaactttctagaaacctctttctgaaacagggctttggtgcgctagaggcagatattagccctactcaagcactgcttgcgatgtcttagaaacttgtggtcttaattctgaaattggcccaccacagcatgcaggaacaggttcttacatgggtatgagcctggctagggcggggttggcttgacaggatggctctgctccccatggctctccttctcttcccagggccagcaggccggcttggtcatgtcttgccctgggcaatggcaggcacacatggaggtgacaacagaaacacatgggcatgtatgtgcttgctgctcaagtctgcttacctccaggagccaaggcaagccagaggggtccagtctgctcctagaggtatggggagctgtcctgcccacagtcgtggctgagctctgagaagctgcaaggccatcgtattgacaccgggaccagactcatttttatggttcacagagctcattcaaatattcctgtggcttccttatcactctgcactggccatgtctactcaggatctcatctccccttctcagaagagacctctatggctcctgctctcaaataggggtctcctccacatctctgttccacagtgcttattctgcctaaagcttatttctagcgccaaagaaagtaaatcttcaaatcacaaacaatgagagtcttcagggcatgaacagtatctggctcaagtttcttgctttcctgatccagaagctgaggccctggcagaactcacactgacctggctgagcagcgagtgctcagggcgggggcagggggagtcagctctagggacaaagggacaaaagccaactctaggcaaaagtgggtggagagcataggaaccaatcttccttactcttgtattggtaatcgaagaaaggaaagaggcacacatttccagggtgtgtgtgtgtgtgtgtgtacacatgcagttctgcttcattttattgcctgtaattgttccagaccttaactaacatgcatattttggagtttcgtacagaacattaattaatactgaccagtacttggaatcacttggtgcagctaggctagcccgaagcgttcctttggttagttttctttggggaagagatgcatgttggtttcaggccatcagcagaacttcttcctagtgatgagtttaaaaacaatgtcccaccccctctctactcccccctcccctcaggagcagcgagcagacatcaattgacaagacagggcaaacaatccattgttgctaaggaactccagcttatctggtcctccaagagcttaactcacaccgttccagggagatctgcttcaggagggagaagccctttggaggtgacacaaagcagaggggaacctgaataaaccccagcttcacttgctctgcgttccttgcttttacccctaattttcggggtcatgtagctgagcctcgtactgtcattagctttgcttgagaactcctctctgatgtgtggtcactatggcaacgattgtttaagtctttttttttttttttccaagaacgtggagggaagctttgttctagctcaaatggactaaaatctccaactcttcccttgaacctgggcaggtctgtgatgagtgacatttagacatgaaagggctgaaaagcccacctctggggacacagatggcgctgtttctgaatcttagtcctaccatcttataatcactgagtttgaacactccgccactcactgctcatttcaagttcctctctcctagttacctttcctgatgccttagtccacccggcttttctaggcccctggaataacactaagcccaatatgcagagtctcccacttcatcaatgctgggcgcctcaaaaagaacccatctctctttggcaaaactcattatccaacaattgctgtactttgcagtgagcaaaatgaactcagttttagtaataaatgtgggttcaactgtgggccgtaagccaacatattgtagcaaaagcatctagaagaataatatgctcaactctgaccaggatcacctgttgagtaaaatcagtatatgcccgggctgtagaaagatgccattgcctacccgtcatctctaagccatgccagccagagacgcaagttcattgtgtgactgtaaccagacagtaattctctgtcagccctggagagcagggctgtctggacacataggtaatgctgctatgagtgagtactgcaggccactgtcgctgtcatgagccacctgctaggagcgttgtacaagccttctgagaagactctcctgttacacaggagagctggaactgggagaggtcacagccacagggccaccagccccaggcagacagatgatgtagggtataggccagttgggtagggcagctggtgatacgcaactcctttatgaagcctgaaggagaacaggttccggtgtcagagcttgagctttaaacaagtgccaaggcttagcagaaagatatcagacatctgatcaaaaggcagagggagaaatcactcattttgtaaagtgtttctgcaaatatggggatcttagactaatacccagagactgtattaaacagcagcaccagcagcaccagcagcaccagcaggaccagcaccagcagcaccagcagcaccagcagcagcagcagcagcagcagcagcaccagcagcaccaacagcaccagcagcaccagcagcaccagcagcaccagcagcagcagcagcaccaacagcaccagcagcaccagcagcaccagcagcaccagcagcaccaacagcaccagcagcagcagcagcaccaacagcaccagcagcaccagcagcagcagcagcagcagcagcaccagcagcaccagcagcaccagcagcaccagcaccagcagcaccagcaccagcagcaccaacagcaccagcagcagcagcaaaatcaaatggacaaaatcccaggcatgatgatatttgaaatcccagaaacaagtaggtaaaaccagaaagatccatggagttcattggccaataaatctagccaatcagtgagctccgggctcctgagaaaccctacctcaagcaaacaaggtaaatggtacctgaggaacaaaagctgattgttctctgacctacacacacacaccccatagacatgggttccacacttaaaatccacttcttatttcataaagagctcaaagcagtccttaggcatccttctctttggggagctgggatgggtgccccctacttcctcccacactgagccccaatgtgcaagtctaggaaacaatcttcaggcactgatggaattgtctcgcctctctctgccagtcccagcatggaggtgggaagactgtgttcaggcttcaagacctggcaaacataaagggacctggtcacaatgcaacaggaaagcaaagactacgaagggagggaggggtgaagggagagtagtcaggtctgctgattcactttccaaaaccatgtgtgtatgtgtgtatgtgtgtgtatatgtgtgtgtgtatgtgtgtgtgtgtatgtgtgtgtgtgtatgtgtgtgtgtgtatgtgtgtgtgtgtatgtgtgtgtgtgtatgtgtgtgtgtgtgtgtgtgtgtgtgcacgcgcgcgcctccataattgtgtcctatctccataaatgtcagcatggtgtttgggggaagggggtatcccatcttaaccattgatcatatttaacctgggaaatatattctggcagagcaggttcagtacgtcggagctctgacaccctctcatcttttctgcaaatgcatgtatgtagttcattttcttcagcaaaaaatatcttccaagtaatttggacatgctggtaactgctcctggcatgtgagtggatgtagccttcacagccatcagtaaaacactaacttcagagacttggaaagctaaattctcttgtgtgaaggcgccattttgtgtgtgtgtgtgtgttgttgttgtttcaggtccctcgttttctggctccttcccctctcatgttcaaggtttgagcgacagcttcagatcctctatcatgtccctgcatcctctccctctccccagattcatgccactggccccttctccagcatcccagcacacaattagttctccaagcttctaccttctagacacatctgtgactatgcacacatctccactttcaacttcttatgcatcttccatcttccaactcccatagccacccacccacccatgcatccatctctccctcacatgggaggaagtgtccatctggctctaaatgggaagtccctatcagtgatgccttctccccctccatccccttctcaatcaagggaacctacccatccagtgttcactagaaaccaagagccctatctggttctttctcaccctgatcccctgcaccccattagtcctatgttccaaatctcttagattcttctcttcacctttaagcccagttacccgagacttatcagcacacttccctgtctactctgactttctcaggtccctttggctcatctcccagcgtcccaccaggatggctattgaaactcacgccttctgctttagtctcctgctcatggtattctcagcatcattgttagctcttctgtgctgccgtcacacacagctgggtccattttctagggttagccccacatccctcccctggttatcactagaaccaatgggccaggaagccagtttctgtttctgcagcacagtgtcaggttgcagtgatgccaaagactgtccctgtcaagagctgtccccgagtctcaggtgtctagccacattccagacacaagttcaaggcagctacggacctccctcggaccttttatgctgatgaattatttctttgcttgtttctcacatttaccagttcaaccacattgatttattctatcaaagtaatgctcagggttttttttttaatcttacatatttatattttttccttcccccagaaaatctggaaagaatttaaaaagtagaagaaaaaaattcaaatattttgatcatccagagtgagcatcatccaagctaccaactggatgaggacttccagccctggctctattcacttttttttttttaaatcttgaagttgttatgatcatgtgatacattcaaattgtgcataatgacatttaagcctattttctctgcttataaaagaattgcgtgctcatcacagaaaagctgcttcttggtggcatattgactgttatcatccagtgactatccaaagatccaggctcatcattatgagtttcgaagacacagaaaattaacaccctagtttttggcagccaaaatggtcattatgttgttctctgtatctgtgcattttctggaaggggaacaaaaagacccttttgtttagctgatcgcacaccatagccacatatagaaagactggtcattggcagcaagtgtcagaatttaatctttggcattttatatggatgtcaggtctggcaagatgagagggtcagtgtatgcctccttgatatgaaggcgagaggccaccttccactttctccatcttgggtctgtgtaacattctagggagaggagagggaaggttgaagttcatgtctgcagcaaccaagaagaagctgtgttccattaaaacctggacataaccaatgtaaatccagagatggggtgacccgggagtgcctgtaccttgtcagtcgtgtgtgcagatgacctttaaggggcttatgagacccacttatgggcatatcttcctagctgcatattccatgaacaggtagaaaaacactggcaccttttggcattgtcatttcagaaattaccaaatgctacggttcgtgttttctttctccaactccaaaacgcaaccaatcgctaatgcacaccacactgccttggatgccctgaagcaaaaaattatggaagaacaagtcctacaggcttcagaagctgaggcctttcctttagtcctgtgaactacaactctcatggtgccctgtgacatggagagtcatgcctacttaggatcttctgtctgtggtaggacggggaagtaagagagaccaagatggggtgtgatataccaactatgttgtataatactcacagcagctcacatgtggtagtggtttccaaattgttgtgtttgggggggaaaaaagcatcatttccattgttctttgctctgtgccttgaatcttttaatcaatttatatattaaaaaagaatcacacct

SEQ ID NO: 161 - DNA, 1954 bp, Mus Musculus
tctaagaaggatgtcatcagacccccaccccccggcacagtggccatggacttcctggtctggagaactgtgggaaataggtttctatttttagtaaactaccctcgtctgtcctcttctgttacagcaacagagactaactgaaactgagagtttcaccaaacgaccccgtcttcaaactggacacatgagcagcatatgcctcttcagagatgttgctatcatcaaaagtggagaaaggagaaagagaagggcctactctaggctggacggggccaaggagcagcaccagcagcaccagcagcaccagcaggaccagcaccagcagcaccagcagcaccagcagcagcagcagcagcagcagcagcaccagcagcaccaacagcaccagcagcaccagcagcaccagcagcaccagcagcagcagcagcaccaacagcaccagcagcaccagcagcaccagcagcaccagcagcaccaacagcaccagcagcagcagcagcaccaacagcaccagcagcaccagcagcagcagcagcagcagcagcaccagcagcaccagcagcaccagcagcaccagcaccagcagcaccagcaccagcagcaccaacagcaccagcagcagcagcaaaatcaaatggacaaaatcccaggcatgatgatatttgaaatcccagaaacaaaaaatctggaaagaatttaaaaagtagaagaaaaaaattcaaatattttgatcatccagagtgagcatcatccaagctaccaactggatgaggacttccagccctggctctattcacttttttttttttaaatcttgaagttgttatgatcatgtgatacattcaaattgtgcataatgacatttaagcctattttctctgcttataaaagaattgcgtgctcatcacagaaaagctgcttcttggtggcatattgactgttatcatccagtgactatccaaagatccaggctcatcattatgagtttcgaagacacagaaaattaacaccctagtttttggcagccaaaatggtcattatgttgttctctgtatctgtgcattttctggaaggggaacaaaaagacccttttgtttagctgatcgcacaccatagccacatatagaaagactggtcattggcagcaagtgtcagaatttaatctttggcattttatatggatgtcaggtctggcaagatgagagggtcagtgtatgcctccttgatatgaaggcgagaggccaccttccactttctccatcttgggtctgtgtaacattctagggagaggagagggaaggttgaagttcatgtctgcagcaaccaagaagaagctgtgttccattaaaacctggacataaccaatgtaaatccagagatggggtgacccgggagtgcctgtaccttgtcagtcgtgtgtgcagatgacctttaaggggcttatgagacccacttatgggcatatcttcctagctgcatattccatgaacaggtagaaaaacactggcaccttttggcattgtcatttcagaaattaccaaatgctacggttcgtgttttctttctccaactccaaaacgcaaccaatcgctaatgcacaccacactgccttggatgccctgaagcaaaaaattatggaagaacaagtcctacaggcttcagaagctgaggcctttcctttagtcctgtgaactacaactctcatggtgccctgtgacatggagagtcatgcctacttaggatcttctgtctgtggtaggacggggaagtaagagagaccaagatggggtgtgatataccaactatgttgtataatactcacagcagctcacatgtggtagtggtttccaaattgttgtgtttgggggggaaaaaagcatcatttccattgttctttgctctgtgccttgaatcttttaatcaatttatatattaaaaaagaatcacacct

SEQ ID NO: 162 - protein, 171 aa, Mus Musculus
MSSICLFRDVAIIKSGERRKRRAYSRLDGAKEQHQQHQQHQQDQHQQHQQHQQQQQQQQQHQQHQQHQQHQQHQQHQQQQQHQQHQQHQQHQQHQQHQQHQQQQQHQQHQQHQQQQQQQQHQQHQQHQQHQHQQHQHQQHQQHQQQQQNQMDKIPGMMIFEIPETKNLERI

SEQ ID NO: 163 - DNA, 9868 bp, Mus Musculus
catcgcgggcgcgacgccccgagggccagcttgtgctttggtctggcagaggtggtggcggcgagagcggccgggaagatgccagtggcggtgatggcggacaacgccttcagtttcagaaagctgttggatcagtgcgagaaccaggaactcgaggtagcgccgcagggtggggcggtcgggtgggcgccgtttccagggtaacgggccgggccgcggcctgcggggcgcacactccgggttcatcaagagatgctgcttccatttgtaacgttaagttaagttcgctaaataggctgggcgcagtggcacaggactccggtgggcacacgtcaggcggaggcgagaggattgccggtgaattcgaagccagcttgaactatgaaaaccccaaaaataaaaaataaaaataaaaaagaaagaaaaaggaaaaaaaaaagggagggcgggggctcacggactaaaggagacagcagcagcttgcggatgagcctttagcagaccttgctgaatgaataaagattgaagagagacaggcctctataactaccttttggtagtcttctgtcttaagcttacttaagcttttaagataacggccagaaaaatagtgcattaagaacctgttggaagtagtccccccccccttttttttaatttgagacctgaccttccgaggtaatgtcacttacatatttgtgactatggaaagaaactgatatccaactgcagataaatgacagctcacaacagatctaaactcaggttttaacctttgatacttccctaagcatttttctgcatctatagtagtgctggaaaacttactttttaagttttcattttctcttttctgaaagtgtattaggaagtgaggctttcccctcttttttcgctctctaggctcctggaggaattgccacaccgccagtgtacggtcagcttctagctttgtacttgctccagaacgacatgtaagtagcaccttttacctaaaacgaaaagcttccttgagatgatgcaggagtacatgcagcagataggtgtcttttactgtaatcctgttatatctgtttccctttttgtcataattaagaataaataagctcgatatttttcttgtcgtgtatgtcttacatacacctaaaaacatggtaagttcttgtgagaaattagcatcaagaaccaatggagtttaaaaaaaaaatcatgttttttttttctttttacttatatttactcagaaactgggtggtggcgcacacctttaatcctcccacttgggagccagaggcaggcagatctctgagtttgaggtcagtctggtctataggtccagctccagtacagccagggctacacagagaaaccctatctaaacaaacaaacaaataaaaccaaagcaactgtatatgtactcagtaggagcaaaaaagctggggctgggaaggaacactgggagaaccaggggaggtagacatgtttgaattagtcttcctgggtgggaggcaggagcttgagagggctagagaatagaggcctggtgcagttccaaacctactgtgatatttttacagaaactacactgagtttcttcattatacatataatcgtgtgtcttacgactcactaggagaagggctccagattataacagcacagtgtatgcctgtattgcgagggatacccaaagcctcgaaatggacacattgtttgtacctgagtggttgtgtgtaagtctgtggtttgaatgtgttgttatggtttaggatctgaattgttagtttaaaaagaactcctaaaaaaaatttttttaattaacctgggaaaaggttatttcatgtcctccttttttttttttttttttaattgcttttcctcaacaaattcatataaaactgagttgtgccatggcctgttttggtgtttcggcctgtaattttatgtattgactgaggtgactattttgtaactcatctttgtgtaaatcaggaataatgcaagatatctgtggaagaggataccacctgctataaagtctgtaagtaatcctgcggtgtcccctgttgcttttagaatactggcatttacttaaatgacagcctacaagtcctctttctttcccatatatatcacaggaaccgttgttaagtgaaggttaaagttccaaaccatctgtttctctaatggaatggttcatgtgctgatggtttcacaaggcctgccatgctgatgtgaactggccagttcggtacagagggggctgaggggctgaggcatttcagcagactacttgatttgctgtaatgatagctatttgtaaactggcattgtttacacagatattcactgcattaagatcactgttttaattagatgtcttacttgggatgaagatgaaataaatgaagtaacctgtgaaaagtgtcttgccaggtagaaggaagtaagatttatttcacttgcttccttttccattctgtttgtaagacgggagctgcactcaataagaatgaaacagctcagctgataagagtgggagccctgcaagtaggctctaattgacagggccttgataatcagctttctgctagttttcttccatggagaagtgctagcgtcttaaatttaaacagcagtgcctacaataattgatcccaagtcttcattctgaagtatattttactttctcatgctttcatttgtagttgcaataaaaacattaattatagaaattgttaatataactgctcacagcattttagaatcaggcagagccaacctctggacattgcaaagcagtgttatcatctgcagagttcatagtctagaactgggtatgcaagttacctagaagaaaagggttcccagtttatacctgttcttagccctgtggcctgcacgctggatacacctgtcagaaaagtaatttcatctcctaaaatgaatgaatagagtatattttaatgatacagctaacaaattttgtcatttctgatatttttaaagatatgatcattattaattacagtgaatgctttcaaagacaacaatttttatttcaggcaaattctgaacttgggggaatttggtcagttggacagcgaatctggcaaagagatttccctgggatctatacaaccatcaacgcccaccagtggtcagagactgtgcagccaatcatggaagcccttagaggtagtgtttccttgtggttaagtcatgttgcgttcaggctgtccttggagcgtgtactgataaactggacagctctgatttgggactccctttgagacttgagctagatctaagctgattgtgattcttcgtctcagtactgggcattctggggaatagaccaggagcagagggtgttgctgtggattccaggtcgcagttagctcattggcagtatcttttatcctcttcattattacttttgtggtaacagaaagtttgtgacagagtctcgctgtgtagtccatactgccctttcctttttgggttactggtgtgtttcacgtgtggccttgtgaaagtgttctttgctgctaacatgaaaccaggcaataatcgaaaggtcgtggtatctgcaggtcaagactttttgtctgtgtatttgaaagtagcaactagactttggactttgtcaaccttggtctttgataactgttatgtcccctctatacatcttgtaaaaggaaccgtcaaggagcctcgaggctcagttgtgtaaggttagaggctggcatggtgtggccctgacacatgatagctctgcccctgccgccttcctttctcatgttgccatgctttgggtctttctgggtcactcgagttctttttattgctcaggggatccaatccaggcaagcagcattgtatcctctaggagtggactcactgacatttctgagccacccagcatgggagctaggaaacagattctggtcctgtaagagcagaatgcatacacactctttgtgggcccaccacacacatcatacaatgagctcttacgttgttcttcctgtcacctcgtttctgtagtgaacacttgcctttagtgggtattccttaagttagtgggctggtccttctcagcatggtaaggacatgggtgtgccaggcagcagagggtaaggattgctgggagctgcaccaatcagctcttagcagcagtacctggaccagcattcaacagtgtacacaacaaaacagagacagctgctgtgagtaaacatgagcaggatttcagggtaggtggggttggaagggggagtatggaatgaggccatgtgaatgtcctggagcagcctgagagctagtctaggaaacatcactagggaagtcaccagaagtaggattgtctaggaaacatcactgggggagtcaccagaaggtaggattgacagattggcttcagcctggtaactatgtggtgaacacgcaagctgccttctccaggttggactacaagctcattggcaggatttgggtaggagctcctaactcatttagcaagtgttcttatgtgtattttattctttctagtaccaccttgcacctatgaaattaagagctgcttccagcttgctggagcttggtctctggagccaggctcttgaattttcattctggtgcatccacctgctggccttcatttgcttgttaaaagacaaaattgaagggtcatgtgtaaacgctggccttgcctgcctcacacactgttctgttctatgcataaagattttcttgagactgaaatggttccaattcctaaatggtacatgcatctttttctctgtaaaatgccaccctgggaatggcagtcttagaacaggttgaaattgttcagagtttgaagttttgcttctcagtgtatgataaacttgctagttaagaacaaccacagccttgactcttgaaggtcccacagcgtccccaaacagcaccacgagctggggaccaagagttaagacacacacctgttggggcagagtgtattcaaacgatagcaacttgagttctatgtggccagtcagttctactaggaaatcagacatctgggctgaagagcctggtgtgggagagctgttacagaaagccagaaagggctggcaaagcactgaggagtacttgctccagcagccactcctcacacagagcctgagggatgggattggcgcctggagaacaggactgattacagggctgtggagggatggcagctagagcaagttggggagccagggtgtggctgctgattgtcactagaatgcagactgtctgtcagcatccactgtcagcctgcttctgcctgttagacctctcctgcctctctgcaacctgctgctcttctcctccattcacatttgggtcctgtctgttctctactccaaaaatttgaccaaaatatttgagtaagacagtgattttagatggtgtgaggtttggtgcatgatctgtgctgcctgcgtgttcctgccactgctgccttgcttttccactgaatgcctacctgtcatagggaagtccctgcacctctgagacattctaaaggtcagctggaggttggtaaactcaagcaagggacagtggtggcatcaggctcagtgggaaatgagggaatgaaacatagtgtcagcgtgttgttcatgtgtgtgactgcacataccatggtgtgcatgcaggggtcggagggttctctccttccgtctttacatgggcactggggacaaactcaggcctccaggcttggttggtagcaggcacctttacagagccattgtatctgcagtgtttgagacctgtgagaaagcctatggctgagggcatgccccatttggtttcagcagtgctgtcagtaagcccatgttcacagggatacttcaagggccgtgcttcagacaatgaatcagtggggcccagagctcaagagtggaatgtgttcagccctcaactgtggactataaaatctgaatatttcttaatccggttggcagccttctggaggagcccttgtattaccaaaagggcaccgaccaggaagactggctgtgttggatggggcagttgtctcattcaggaagtttcttaatgtgggtgtatgagcacggggaaatgcagaaggctgtttgcagggagcactcttgtgctgggggctggcagcaccttctcttgagagtcagaccttcaggcttggtgtttagtatgcacacttggaagttaggagcaggtgctagggtaaggtgtgtgcacctgccccgagggagtcctttattggagaccctccggagaggacagtggctgtgtccctttttatttcccttcttctagtgtttgcaagggaaataaagcaaaggaaatttaaaaggctcataccttaaattcatgaacgtttgctttcctgtgactggagtcttgtaggtgttggtttctatgtctgtagcttttgtccctacacaatctgatgtgagaaatatgtgctgtcatcggggtccctcataccttctgggcatgcagggtctgcttgcctggaaacaaaacctggatgactgagctgtgtttaagagtcctgttcacttccttcctgttgccaatcctcccctttcacaatagatgcaacaaggagacgcgcctttgccctggtctctcaagcttatacctccatcatcgcagatgattttgcagcgtttgttggacttcctgtggaagaggctgtgaaaggtacttggagctcgctggttgctataggggaacagaaatcctataagccataggttcactctggctctggaactctagaacaagaatggttttgcactttaggtggtgggtttgtttaggaagtgataaaaagcacatctcacatcgaacctctatgtagcacctgtaatcacgcccaggagcatgcctgtagcagctgtgtggaatctgcacagctacttaagaaagcatttctcaactgtccaagttgtccaggttacccctcaaaactttacaaagacccatgtgctgagactcttaacccagtggtagcacactgcatgtgcttggttgcattgttttatggtgattgacacttttggttctccaaccccacgagtgttccacggggacagcgggtgctggaggtttatgggtggcagtgttctattttgtgggcagctggtttggggatggggcattaaacccaggggctcatgcatgcacctgctgtcattattactaatagaatgctgtgagggccatcatagaactttctcgtgtctgtctggaattagactactcaggtactactacagaagaccaagtatgtcagggactatatcggccccagagaggcttttggtatatttcagaatacctaaactaagttctctgtagtaaccctctagtaactgcacagcacctgacctgagcgtgctgagagaggcagggctgggtcatgcagccggcgcttgtgcccttctcccatcactgtgaactctgcactttcaggcgtgttggaacaaggatggcaggccgactccaccacaagaatggttcttcccaggaagccaggtaggtgggacctcagacacatgacatggaagcagtggacagttgacaagagagcagagtgacattgaaggtcacctacgtgaaacccctgtgactgactagatcagtcacttagctctcctttcaggtcagtcccctgccctgccccttcagctcaccctcaggagaccagccatattcattcctgtgtgtgctccttcatcctatgtacaggagtgtcctttctgcagtcttcagagccaggtgttctgcccttctcaccatcctcctgcatcaaccctacttcccttcccctgctctgcgcatctgctgtttagacagatgtcagtgctcagccccacagttgtaggttataaggaagactgaacagctaaagtgtttaaagaggaacacattcatatctccattcgagaaccaagtgtttgttgtgcgggtgaggcgttacggccttgacatggcttctcttgcttgtatgaaactgtctttttcttcttttgtttagcctcaggaaccctggatgtctccttgaacaggtttatccccttatcaggtacatgttttcacgtggacattttaagtgttgcattgtttgctgatctgtcctgtaatgtgtagtgatacgcatggctacaagaagggaactgtaggctcccctgcagcttagctggagtggtggctcctgatgtccagccacagagcctgcctatcctcctttgagagtctctgggttctggactgtattctgagggcctcctcagcctggtgtgtccaatccagcattagtgcaatgttctggttggaccaggcacatgagatgcactttagaacggttcgttactcaagtcccccaagtaggggctgtccagacagagctggggtctgaagagatgatgcacaccagacatgtttgagtctttacatagcctgctgcagcatcagcagctatcccgaccatgtctatctgacacaaccaggctgctaaaatggagacttcatgcctgctgttgagaactgtccaggcctctggcaggtgtgatttttgtgtaaaatcgggtgcactaagaaagttaaagacctccacaggctggtggccaggggatgctcttctaaagcgtctatccctctttgtcatgcagagcctgccccagttccgccaatccccaatgagcagcagctcgcccggctcaccgattatgtggctttcctggaaaactgattgaccactctgagttcaagatccaccttcagtccctgtcactggcaaacagacatggagttttattctgagttcagaacagggtgagcacctctgtgtcctttgggtgtgataaaatgcacatagaagatgaagcgcattgtacagttttctcctcaggcacttttgaatgtccttggagcagttttcatttgtattgatcactttggttagagccatcagtattacacatcgagtttctgtcaaggactggactccgaacacaagctgtcctgcttcaagtagcagagggtgctgtagcatacaccacgctcctgtgtgccgctggcctctagctgaaatgatgtgcttgggatttgaggaggactgtcccaggtggtgccctccccacattgtcactcacgctctggagagtgtgctcttcctcctatcccagaacaaggaagcagtgatgtagcatcagaaagctgcgtggtggcggaccctggaggggagcttgtcaatgctccatttgttttcccagtgtgtgcaagcatccattgcgtgagacagacagtctgcagtgagaactcaacttaggtgttctcggggaaactccaagttctgatgcctccttagagaagaagggagggagcagagtgcagtgtgtgctgtgctgaaggagctcctgacctgagagatggactgcagccctcctgcctgctgcgcatccagatcctgaggagaaatgccgaatgcatctatttttgttcttgtatggcagcccttgaagatttgaggtggttaatgtatcttcaggttaaaacggccctagttcatttattctgcatttgttcaataaatatttaattgaattcgtaaactttcatctaaagctggctctagaaatttcatatcttggtcttaactgtgggcacattataagtttgtccttttctcaaaaaatacttaaagtttaaaaacttttctcctttttattttttgggaattttatacacgcttataacctgtttagatcaaattcactctccttttcctctgaccccctcccctagaatttaattaaaaagaaactgtcttacctct

SEQ ID NO: 164 - DNA, 1718 bp, Mus Musculus
acgccccgagggccagcttgtgctttggtctggcagaggtggtggcggcgagagcggccgggaagatgccagtggcggtgatggcggacaacgccttcagtttcagaaagctgttggatcagtgcgagaaccaggaactcgaggctcctggaggaattgccacaccgccagtgtacggtcagcttctagctttgtacttgctccagaacgacatacaacaatttttatttcaggcaaattctgaacttgggggaatttggtcagttggacagcgaatctggcaaagagatttccctgggatctatacaaccatcaacgcccaccagtggtcagagactgtgcagccaatcatggaagcccttagagatgcaacaaggagacgcgcctttgccctggtctctcaagcttatacctccatcatcgcagatgattttgcagcgtttgttggacttcctgtggaagaggctgtgaaaggcgtgttggaacaaggatggcaggccgactccaccacaagaatggttcttcccaggaagccagcctcaggaaccctggatgtctccttgaacaggtttatccccttatcagagcctgccccagttccgccaatccccaatgagcagcagctcgcccggctcaccgattatgtggctttcctggaaaactgattgaccactctgagttcaagatccaccttcagtccctgtcactggcaaacagacatggagttttattctgagttcagaacagggtgagcacctctgtgtcctttgggtgtgataaaatgcacatagaagatgaagcgcattgtacagttttctcctcaggcacttttgaatgtccttggagcagttttcatttgtattgatcactttggttagagccatcagtattacacatcgagtttctgtcaaggactggactccgaacacaagctgtcctgcttcaagtagcagagggtgctgtagcatacaccacgctcctgtgtgccgctggcctctagctgaaatgatgtgcttgggatttgaggaggactgtcccaggtggtgccctccccacattgtcactcacgctctggagagtgtgctcttcctcctatcccagaacaaggaagcagtgatgtagcatcagaaagctgcgtggtggcggaccctggaggggagcttgtcaatgctccatttgttttcccagtgtgtgcaagcatccattgcgtgagacagacagtctgcagtgagaactcaacttaggtgttctcggggaaactccaagttctgatgcctccttagagaagaagggagggagcagagtgcagtgtgtgctgtgctgaaggagctcctgacctgagagatggactgcagccctcctgcctgctgcgcatccagatcctgaggagaaatgccgaatgcatctatttttgttcttgtatggcagcccttgaagatttgaggtggttaatgtatcttcaggttaaaacggccctagttcatttattctgcatttgttcaataaatatttaattgaattcgtaaactttcatctaaagctggctctagaaatttcatatcttggtcttaactgtgggcacattataagtttgtccttttctcaaaaaatacttaaagtttaaaaacttttctcctttttattttttgggaattttatacacgcttataacctgtttagatcaaattcactctccttttcctctgaccccctcccct

SEQ ID NO: 165 - protein, 199 aa, Mus Musculus
MPVAVMADNAFSFRKLLDQCENQELEAPGGIATPPVYGQLLALYLLQNDIQQFLFQANSELGGIWSVGQRIWQRDFPGIYTTINAHQWSETVQPIMEALRDATRRRAFALVSQAYTSIIADDFAAFVGLPVEEAVKGVLEQGWQADSTTRMVLPRKPASGTLDVSLNRFIPLSEPAPVPPIPNEQQLARLTDYVAFLEN

SEQ ID NO: 166 - DNA, 970 bp, Mus Musculus
catcgcgggcgcgacgccccgagggccagcttgtgctttggtctggcagaggtggtggcggcgagagcggccgggaagatgccagtggcggtgatggcggacaacgccttcagtttcagaaagctgttggatcagtgcgagaaccaggaactcgaggctcctggaggaattgccacaccgccagtgtacggtcagcttctagctttgtacttgctccagaacgacatgaataatgcaagatatctgtggaagaggataccacctgctataaagtctgcaaattctgaacttgggggaatttggtcagttggacagcgaatctggcaaagagatttccctgggatctatacaaccatcaacgcccaccagtggtcagagactgtgcagccaatcatggaagcccttagagatgcaacaaggagacgcgcctttgccctggtctctcaagcttatacctccatcatcgcagatgattttgcagcgtttgttggacttcctgtggaagaggctgtgaaaggcgtgttggaacaaggatggcaggccgactccaccacaagaatggttcttcccaggaagccaggtaggtgggacctcagacacatgacatggaagcagtggacagttgacaagagagcagagtgacattgaaggtcacctacgtgaaacccctgtgactgactagatcagtcacttagctctcctttcaggtcagtcccctgccctgccccttcagctcaccctcaggagaccagccatattcattcctgtgtgtgctccttcatcctatgtacaggagtgtcctttctgcagtcttcagagccaggtgttctgcccttctcaccatcctcctgcatcaaccctacttcccttcccctgctctgcgcatctgctgtttagacagatgtcagtgctcagccccacagttgtaggttataaggaagactgaacagctaaagtgtttaaagaggaa

SEQ ID NO: 167 - protein, 187 aa, Mus Musculus
MPVAVMADNAFSFRKLLDQCENQELEAPGGIATPPVYGQLLALYLLQNDMNNARYLWKRIPPAIKSANSELGGIWSVGQRIWQRDFPGIYTTINAHQWSETVQPIMEALRDATRRRAFALVSQAYTSIIADDFAAFVGLPVEEAVKGVLEQGWQADSTTRMVLPRKPGRWDLRHMTWKQWTVDKRAE

SEQ ID NO: 168 - DNA, 1691 bp, Mus Musculus
cgcgggcgcgacgccccgagggccagcttgtgctttggtctggcagaggtggtggcggcgagagcggccgggaagatgccatgtacggtcagcttctagctttgtacttgctccagaacgacatgaataatgcaagatatctgtggaagaggataccacctgctataaagtctgcaaattctgaacttgggggaatttggtcagttggacagcgaatctggcaaagagatttccctgggatctatacaaccatcaacgcccaccagtggtcagagactgtgcagccaatcatggaagcccttagagatgcaacaaggagacgcgcctttgccctggtctctcaagcttatacctccatcatcgcagatgattttgcagcgtttgttggacttcctgtggaagaggctgtgaaaggcgtgttggaacaaggatggcaggccgactccaccacaagaatggttcttcccaggaagccagcctcaggaaccctggatgtctccttgaacaggtttatccccttatcagagcctgccccagttccgccaatccccaatgagcagcagctcgcccggctcaccgattatgtggctttcctggaaaactgattgaccactctgagttcaagatccaccttcagtccctgtcactggcaaacagacatggagttttattctgagttcagaacagggtgagcacctctgtgtcctttgggtgtgataaaatgcacatagaagatgaagcgcattgtacagttttctcctcaggcacttttgaatgtccttggagcagttttcatttgtattgatcactttggttagagccatcagtattacacatcgagtttctgtcaaggactggactccgaacacaagctgtcctgcttcaagtagcagagggtgctgtagcatacaccacgctcctgtgtgccgctggcctctagctgaaatgatgtgcttgggatttgaggaggactgtcccaggtggtgccctccccacattgtcactcacgctctggagagtgtgctcttcctcctatcccagaacaaggaagcagtgatgtagcatcagaaagctgcgtggtggcggaccctggaggggagcttgtcaatgctccatttgttttcccagtgtgtgcaagcatccattgcgtgagacagacagtctgcagtgagaactcaacttaggtgttctcggggaaactccaagttctgatgcctccttagagaagaagggagggagcagagtgcagtgtgtgctgtgctgaaggagctcctgacctgagagatggactgcagccctcctgcctgctgcgcatccagatcctgaggagaaatgccgaatgcatctatttttgttcttgtatggcagcccttgaagatttgaggtggttaatgtatcttcaggttaaaacggccctagttcatttattctgcatttgttcaataaatatttaattgaattcgtaaactttcatctaaagctggctctagaaatttcatatcttggtcttaactgtgggcacattataagtttgtccttttctcaaaaaatacttaaagtttaaaaacttttctcctttttattttttgggaattttatacacgcttataacctgtttagatcaaattcactctccttttcctctgaccccctcccctagaatttaattaaaaagaaactgtcttacctct

SEQ ID NO: 169 - protein, 174 aa, Mus Musculus
MYGQLLALYLLQNDMNNARYLWKRIPPAIKSANSELGGIWSVGQRIWQRDFPGIYTTINAHQWSETVQPIMEALRDATRRRAFALVSQAYTSIIADDFAAFVGLPVEEAVKGVLEQGWQADSTTRMVLPRKPASGTLDVSLNRFIPLSEPAPVPPIPNEQQLARLTDYVAFLEN

SEQ ID NO: 170 - DNA, 1742 bp, Mus Musculus
cgagggccagcttgtgctttggtctggcagaggtggtggcggcgagagcggccgggaagatgccagtggcggtgatggcggacaacgccttcagtttcagaaagctgttggatcagtgcgagaaccaggaactcgaggctcctggaggaattgccacaccgccagtgtacggtcagcttctagctttgtacttgctccagaacgacatgaataatgcaagatatctgtggaagaggataccacctgctataaagtctgcaaattctgaacttgggggaatttggtcagttggacagcgaatctggcaaagagatttccctgggatctatacaaccatcaacgcccaccagtggtcagagactgtgcagccaatcatggaagcccttagagatgcaacaaggagacgcgcctttgccctggtctctcaagcttatacctccatcatcgcagatgattttgcagcgtttgttggacttcctgtggaagaggctgtgaaaggcgtgttggaacaaggatggcaggccgactccaccacaagaatggttcttcccaggaagccagcctcaggaaccctggatgtctccttgaacaggtttatccccttatcagagcctgccccagttccgccaatccccaatgagcagcagctcgcccggctcaccgattatgtggctttcctggaaaactgattgaccactctgagttcaagatccaccttcagtccctgtcactggcaaacagacatggagttttattctgagttcagaacagggtgagcacctctgtgtcctttgggtgtgataaaatgcacatagaagatgaagcgcattgtacagttttctcctcaggcacttttgaatgtccttggagcagttttcatttgtattgatcactttggttagagccatcagtattacacatcgagtttctgtcaaggactggactccgaacacaagctgtcctgcttcaagtagcagagggtgctgtagcatacaccacgctcctgtgtgccgctggcctctagctgaaatgatgtgcttgggatttgaggaggactgtcccaggtggtgccctccccacattgtcactcacgctctggagagtgtgctcttcctcctatcccagaacaaggaagcagtgatgtagcatcagaaagctgcgtggtggcggaccctggaggggagcttgtcaatgctccatttgttttcccagtgtgtgcaagcatccattgcgtgagacagacagtctgcagtgagaactcaacttaggtgttctcggggaaactccaagttctgatgcctccttagagaagaagggagggagcagagtgcagtgtgtgctgtgctgaaggagctcctgacctgagagatggactgcagccctcctgcctgctgcgcatccagatcctgaggagaaatgccgaatgcatctatttttgttcttgtatggcagcccttgaagatttgaggtggttaatgtatcttcaggttaaaacggccctagttcatttattctgcatttgttcaataaatatttaattgaattcgtaaactttcatctaaagctggctctagaaatttcatatcttggtcttaactgtgggcacattataagtttgtccttttctcaaaaaatacttaaagtttaaaaacttttctcctttttattttttgggaattttatacacgcttataacctgtttagatcaaattcactctccttttcctctgaccccctcccct

SEQ ID NO: 171 - protein, 209 aa, Mus Musculus
MPVAVMADNAFSFRKLLDQCENQELEAPGGIATPPVYGQLLALYLLQNDMNNARYLWKRIPPAIKSANSELGGIWSVGQRIWQRDFPGIYTTINAHQWSETVQPIMEALRDATRRRAFALVSQAYTSIIADDFAAFVGLPVEEAVKGVLEQGWQADSTTRMVLPRKPASGTLDVSLNRFIPLSEPAPVPPIPNEQQLARLTDYVAFLEN

SEQ ID NO: 172 - DNA, 13616 bp, Homo Sapiens
aaaaaattccctctggctgcggttccgagaatagcctggaaggaggcaggggtcccggctggagaagcgtggctccggggtggggcgtgcagggctagcccgggcgggggacgctgcccaacaagcaggtttgcggagactcacaccttagattctgagtttttaagcttgtttcctcagagcagggaactcacgaacgtttcgtgagcacctacggtatgcagggtacggtgcggagccctagcgtcactgacgaccgggacagccgagcagctgcaggatccgtcgtgttccccagcaattttaatatttaaaaattcgttactgttgctgttacttgttttctatgtattggatgtcttcgtgaagaaccctcaaaagtgcaacgaactcctccctgccagagggcggccgcgcgctctgagtacagcttcccgcggagccggccaggtcctccagggcaccgagaaagccggccagaacggcggcgccctatcccggccgcagcgatgtctgacggcgccccggaactgacggtctggtacgcaggggcgctcggcggcaacggcggctttaaacgtcatcgcgggcgcgacgcctgagggacagtctggggtttggctgtccggacggtgcagcggcgaggccggccgcgaagatgccagtggcggtgatggcggaaagcgcctttagtttcaaaaagttgctggatcagtgcgagaaccaggagctcgaggtaaccctttgcgtcgcgctgggagaaactgcggagtagtcttaggccctggggcggcaccagtttccagggtaacggggtctgaggctagcgggctttgggagctcacggggcgggcgtgggaggtggacgtgtggatccctgaccgccgcaacctgctccgaccgggcccggtctccccgaactcgccgggacctttttgttatgtgtcttcagcttgtgagcccgaaaaccctgtgcgtctttgctccagcacctaccgatgagctcatattaattaggcatctttccttcccagtatcgggttgggagagggtagtaaagtgggttttattaaagatcttggtatacacacacacactaacacacacaccgcaactcacacgcacaccaagaaaaatgtgaccattgtaacctttttttaactcacaaagcctttctcgtaatgttgtcaagttagcttgccattttgtcttcagtaagacagatgaaagttatgcagctgttaaagttaatgtttttcttagacacttaaaaagggtttatatcattagttttaaaattaaataaaggagacaacatccagaagcagcagctcactaatagataatagatactttccagttgagttaaaatggaaagaattgtctttgcaacgcagctgtggtgattttctgtctcttattcaggacgcttgatgtaatgggcagaatcagaatgcttcaggaatctgtcgaatttgtttcttataatagtaagatcatttaaatgggaatttgagaactggggaaggggatccacttacatattcttgaatgtataaagaaactgaagcccaaagggagataaatcaaagctgatgacgaatataaacttaatactcagaattttcgtgtttgatacttctctaagctgtttctaaatctataataggactataagattacttatagtcttagactaaaaaggcttacttttaaaattagcatttataaaatattattttaaaaatgaaagttaaagggtaaatgaggtttttaaaattttgtgttgttttgttttgttttcatttttggccttctaggcccctggaggaattgctacacccccagtgtatggtcagcttctagctttatatttgctccataatgacatgtaagtatgtttaacctaaagctaagagcaacaggtttctcaaagttatatggaaatatttctgcactgaagtagcaccactaaacataggcacaacgagctaccttttttattacagtaattgttaacgtctatttcctattgaatcataggttaatgaattatgattaggtcgtcattgtcttacatatactttctagaaaacatttcaatttattatgacaaattacgtcagtaaattcatttaacctttttgtctttttaagaaacttttatgacctctatttacttaacttcatatataatcaataaaacaaaagaagtgaaaagagaagattgcagccaagaggaattcgttacaaacatgtatgagattttttaagttttttttgtttttaattattcctatttcacgttcacatggaaaagtcagaaagcataactactctaggccgggcgccgtggcacacgcctgtaatcccagcactctgggaggccaaggcaagtggatggcttgagtccaggagttttgataccagcctggggaatatagtgaaaccccgtctgtcctaaaaatacaaaaaattagctgggcatggttgcgtgtgcctctaatcccagctacctgggaggctgaggtggggagaatcacctgagcccagaaagtcaaggctgcagtgagctaagattgcgcgactgcactctagcctgagcaaccaaagtgagaccctgtctcaaaaggaaagcataactgcaaaaaaaaaaaaaaaaagtctcctatagttctgtgactcactgatgattcctgataacattttattttaaactcttccaaaacctttcttttatatctttttaaaaactaaattgaaatttttattacacatatgtaaggtttttgtttttgttttgtaaaactgtcattatatgtttgttgtagttcaagcctccaaacccataaaaactcctgcctcagaagctgtgtcccactggtaggaggggctgtaatcgggagagaagtgttgtgtaccaggcttattgtcagggaatgctacagccttgatagtacataaatttgtttacttttatatcctaataaataatttgggccgtctataaatcctcgtgtttttagtgtgctgttgcctaaatttaggatatggattattatttttaaaaaattcactagaaatggcaaaatattactttggtaaaaatatttcatgtcctttttatctggaaaaccactattgtttccccaaaacaaattcatataaaactaaattttactttgtgttatgtgaagtatacttctgtatgtttggcttgggacctggtagtttttaacatttcctgagatgattatgtttttaattgattattcttctttgtggtggcgtaaattaggaataatgcaagatatctttggaaaagaataccacctgctataaaatctgtaagtatcctttaaacctattttactgctttaatgtaatgacattcccttaaatggcaaccttttataagcttatgttttctatctgacgtcctagtaatagtcatcagattggtattaaggattcgaaataaatcttcagagtcctctaatcagaaatttgaattttgctgggatggtgtagaatttctgctcagttcctactgattagatttcttgagacgcttttatgtgcagcttccctagttaaacagctgagccagtttagatgaaggaagctcctggaggtggcggaggcagctgaggtgattttcagctggtttatgttgcttcctataatggtacttattttgaaactgccatcgtttacaagaatactctaagaatgattgacagcaataagattatttttgttaattaggattttaaatttcttattttggttgggagattagaagaaatagcctgtgaaaaggttcttccaaagtggaatgaagtaaaattttaatgtcaaatgattccatgtgtctaacatgagtgtcaagtgaaatttttaacattctcgggatattaccaagaattcatctaaacttttgtttattgatattcatcaagagatcggattagtatttttactctttttttttccctcatacattctgttctgttaagtaagattggaatattcctcagcttctttggctaaataaagaagtactataaatcatgcacataagtttcaatggcgttagtggaaactcaatccttagagaggctacaatgtatgacatcttagattgagagtctctattgttaaccattttgctattacttttgacctaaatatatattcataatatatctatgaaatacaaatacaacatctttaaaaacaatccttaagctaattagtccccaggcttaattctgaaatgttttttgactactttctcatgccttaatttgctattgtaataaatttatatcagccctacagataaattttaccttactgctcatagtgtttaaaaaccttttgatagtgattgggctgaaaaagtaattgcatcttttaaaataaatgttgaattaggttttaatgatgtagctaacaagtttttatatcatttctggtattttgttttaagatacaatcattggtgcatttacagagtgaataccctctaaggcaataatatttattgcaggcaaattctgaacttgggggaatttggtcagtaggacaaagaatctggcagagagatttccctgggatctatacaaccatcaacgctcaccagtggtctgagacggtccagccaattatggaagcacttagaggtagtgtttctttgtggttaaaaatgaaattagatgagacttagtccctaagtgctgcagtgttgaagtaataaatcagtggtgtgtgtttaagtagatatttttgataggtgaaaagagcagttttcagaattttttagatttgccctaatcatgcttcttcattttttgttgcttgagattacattggctgctgtgcttttgttgtttcttaattctagacagaaattgctcgtcagttttaagagttttttttgctattaaaacgagatcttgtaatattctaataagtttaaggtatgggtttgtagagatgtgaaaatagagactgctctttgaattttgtcagcctcagcctttgataggtgttgtcttaagcttctggattttataatttatcagtttaatacatagatgctcaaatgtgtttttaattgctttgaaagattacaagcctggtgtgacagagcactgatcccacaataaaatctcattccctgcctctctacagtctctcacccctagcatttgcttccagtcctcctggttcactctttataaaattatataatcttgttttatgttgtcatgtactgttatttcttattgttacccttacttccatagttaatatccaccttcactgtatgccttcctgctgtggaggaagtcagtgagcaggaatttttttaataactgttcatcactctgctaagggatatcagctttacagggcagcagacagcagagattgtttctgaaatgcacataattcccttggaatggtaaaattcttagcagcataaaacataacaatgtaagtgacagaacaggaggcagctactttaaatgtgaatgaaatgagcagagtcctaaggcaggcagatagatgggaagggaggagtgtggaagaagattgcacaggtacagcaggggcagtttcagaaagtagcaccagaaacctcttcatataagccctgaggaattagcgttatagtggacttccatagtatcctcgtgattcagccttgtgattgtggtggggcggtcacaggccatgtgccttttcccagtgttttacagcgggttgattggcaggactgggcttgggaactccttactcgttcagcaagcattctcttgtgcaccgtcgggtccgtagttttattccttcccggagccgcctctcactgaattccatgagattgagaattcctggcaagcagttcagtagacccaggaaaggctatatagcgtaccatgcgggagtttaagctctgggtccttgcttccggagttcaaattctgattctgtcacttactagggtgactcctcagtgtcttattttcctcatttgtgaaatgtgattagaaatagtactttttcaggttgtaaatgagttaatatataaacatgtaccttattctaaagcactacagtattcctgaacatatcctgagacttttacaaatctccagattcatgaatggtactgtggtttcctttgtaaaatgcagccaggtcaggatagtctcttaacagattggtcttactgatgaatttaacattttgcttcttaacttattagaaacttattttctagttgagaacaatcactttcttagatctctttccattctcttctaaattaggcacagtcctattagaaaactgaaaatgacttaagagaagctagtgaaaactatttttgcaggaaacaagggctgaggaagtacttagaaactaggtagacagtagccattctcatctgaggcttgaaagggcaaggcgaggggccagtgttactggggctgccccacaggatggatacagaaggtcagctggagcaaggcagggaaagggcataggaagtgaattccctgaccttccttcccagcctctgacctgatagagccccaattcgccaaagcaagagagctcaggtgcaacaggcattggcggccaacctccctggcacacagcatggctgggaaagacagaagaggattcgaaaggatgggagtgactagttcatcttcccttctgtctccagcactggcagtgatggatgagcagcacttgagtatttgttgaacaactgagtttgcattctgttagcatttgttttcaccaaaaatgtgttccatcaactactgccacagatattaggtgctggctcaatttattccaccttccagcgtgtcattctagggcctgaggttacagatttcacaacttgaggatcacagagtgactagtcggaatgtagatgtgattcgtgccaagtggatattgcagcttctgagacagagaacacttagcctttatttttgctttgtcaactcacttctcccatcacatgtttttctttccttttccagtgatatctttttacttttctctcccttttatctcctccattcttactgtattcctgttttattccccactctgaaaatatggccagaatatttgaactgaagtaaatgtttttgaaatacagttgacttaccaaatgaatatagttttatggtgtatacttttacttctctaaaaaaaaaaagtatactttccattgttggctcttttccattgttggctcagttcttttccattgaatgtatgcagccttaatagaaaacgtttcttggtattgcaaagtctgttaggttacaggctggttgaaggaaggaaggaacctacaataataagtgtaaagccacagaaggaagagcagacagtggctgagtgaaagctggagaggatgtcgggctcagatgaggggaagggatgggagtgtcggcagtttttaaggaatctgagaaaacaaagcctaagtgttggagtcgtgccccattttggtcctcgtgatgccatcaacaagcatgtatttggcatatatttcactggagatgctaggtgtttgggggactttgaggataagagataccccttcctgtcgagaagtttggaatataattgaaaagaaggggataggtggaacagtgtctgccgtagtggaaagttgcttgttaaagtagaagtgtaaacaatactgctgagtttagagaagggcagagatcgtaatgaattataaacagacttaggaatggtagagagcagacaggagggcatttcaggccacgggatagcataaaccaaaagccccagggggagaaggtgtaagacttgtctgagagccagtggactcgtttggcacaaagggtatctgggggaattggtgtagtttgacaatgtcccaggaatggagagaagattttaaatatgttagggtgtttgttttacatatgtacactggcctattaaatatggaaagtaaaatccagaatatttcctaagcatgttgaccaccaggtggaggagctcttgcattaccaatgagcaatgcccagggagaaaggccagctggtttcacagtgctcaactctaccgtactcctgagtttatttaattgggtatggaagcctggggacaatcctaaatgccactttcaggaaagttttcgttgctggtattgtttggcagtcccttcttagagtcattctttcaaggtgggaatttaggattttgaaccttaattcagtcaagagtttgatgcagacttggaagaatgctccagttacaagatttgttctgtaactcccaggtgtggtcctgtattagagacgtttttgaaaaggacagctgattacgcaaatcagttttctgctcctttgattccagcatttgtaaatgaaataagataagtaaaatttatatccccattgcataaacatactgcattttcttagggttagagccttgtgtttagtaacctttttccatctttgtaattttcattatctgagatttttcatccaagaggaagtgtaagaaatgtatttttttccagcaatatttgaaccccccgtacatactgggcatatgtatttgtatctataagcacagaaatctttgggttcatctggccttgcttatgaaaactagacaaggacagtggtgtgatttaacaatgtgctttgaaaatgctgctccctggttcactctctgccaacccaccactcccacaatagatgcaacaaggagacgcgcctttgccctggtctctcaagcgtatacttcaatcatcgccgatgattttgcagcctttgttggacttcctgtagaagaggctgtgaaaggtaattttggcttactttttacttataaggaaaatggaaaatagaagtgtgaattgtaggttcacagtctcctctgaaacacttggaacagaatatgcttttggagtccaggctgtgttttttgagaggtgatatgaaacaggtgttgtggaacacccagcaggcaccctgcagtcaagcatattaatagttctatagcaagcaaatgtgtgagtatccacacagttggttacaaaaatatgtcttaattggtctctttactcatatttggaaatccttatttcacccttatttgataaaggcagcatcatccccacgtcccttttcattttccctgccatttctgacccataccctaggcgcttgcttgctccccactcatacctgctggtctctccaaatgtaactttgcattttcatttctcagctgatgcccagactaatccttcctgttgctcgttgttatagaatactgtatacacctggccaggtgcagtggctcacacctgtaatcccagcactttgggaggccgaggcgggtggatcatgatgaggtcaggagttcgagaccagcctggccaacatggtgaaagcccgtctctactaaaaatacaaaaaattagccaggtgtggtggcaggcacctgtaatcccaactactcaggaggctgaggcaggagaatcgcatgaatccaggaggtggaggttgcagtgagctgagactgtgccactgcactctagcctgggcaacacagtgagattccatatcaaaaatatatatatatatcgtatacaccttgttgcattgttttgccatgattgacatttttgattctccagctaaaatatgagcaccatcacgcactacatcctaaatttccagggcctagcatagttgtagatacatgaagataggttaatgaaagttctaagttattacttttatttactcatacaaacatttatttcttttggctcttaaaattggtccatcatttattttctatatataacatacttcagagctcgtattctcagctgaccacctggatgtgaatgctggtaccacccgtccctgatgctagtggctatgtgacttaggacaaatcacttgaatttccctcaactttattttccatacctgtcaaacgatggccctatatcccacttcatagagttgtggtgattacataaaatcatccctataaaagcacgtagtctggtacctacaggtaaaccttccatatatggaagctgtttttattattgccatctttgttattactgatatgatggtcacaaaaggcgccatatcagttttccttctgtttgttttaaataatactgattaggttaatactataatatattcttgacagaaaactaaccatcttttaatgattatagcaacctaatagagtaaaatgaggctttgatacctgtttcagaaatatttcaataataagtttccatgctctttgtaatatacctttctagtaaaaatgcatatgacgggttatactaaacacatcaggtcttctgtacaactaatgtcatggacaagttgtggattttgtggggtgttttattctttccggatctttatgtgtaatatacttttttaggcatattagaacaaggatggcaagctgattccaccacaagaatggttctgcccagaaagccaggtaggtggagctttcacccatttacgcagcactggactcttctaagactgcttcaggttttcagtctttggtttttgataattggatgtaaaattcggctatactaacacaatggaaataactcattttaaataaagcgtagtagacggggtagaaaggatcacctagtttaaactcttaaaaatgtatttcctgtatataaatgattttacgtaggtttttcatggtccttacaccttagtttttactaaatattaatctccatccttttatggagccatttgtaactgagcttatccttcatatccaagctgttgtctgtattaaaaaaaaatgtttaaatattcaactgccccccttttctgtttgcactcaagtcatacaggcacttttcctgtggcttccactttcacagagttaacttctctagccctccttttaaggccttaatttctatgacctgccctcattgtctttatctgaattcccagcccctcagtcttcctgttggaagtgagccacactcattcccgcctgatagtttctcttcctcctgctgaccaggagtgtcttttctgccaggtctttagagccaagcttaatgcccacttccataaacccgccttcatccacgtcagcccaaatttccttccacctactcggaatgcctatgtttagacattgctgaacatacagtaaaggattctcaatgtgctcagccctttgagttacaaagagtgagaagacatgatcccagtcaagtgagatagtgggggaagagtaatataataaagaattataatggagcacagttgttatccctgtttgagaaataaatggccgttaaatgcatgttgtgctgaaaatagcatgttctatgaaagatctttacaatgacttctgtaaattgagctgtacattttttttttgaatttagttgcaggggccctggatgtttcctttaacaagtttattcccttatcaggtatgtattttcatatgcacattttttaatgtctcattgttcctaatttcttttttgtagtatatatgtatatgtgtgtgtgagtgtgtgtatctatttcttaccttgtaaacagaggttaaatttcataaatgcgtagtaatacatctggttacaagagtgaaactgggctcccccagagcttgccttgaggcggtgccctcctctgggccagctgcagagccttcttattctcatgtcagggaggcctgccagagctgttcaccagtactgttattcagaaggcgtccccaggctgacgtgtagtaatttaaatgttggaatgtaaattccttgaggttctttgtgggttttcttttttttttttttttttttggtttgttgacaatttaatattcttcagtgatgtctggggcatgggaagcactctatttcttgaatttaatgttgcatgggtaaggatgttttcaagaagagctgtgatcttttaaaagacatgttgcatgataaaagtgtctttaacctttacatagaatacttcagtaacaacaacatgagacatgcctttactagcagttaggtaaaaccatactcataaaagttgcaacttcttggcttgcttttcaaaaatgtccaagcctctatgatgtaagattttgtctaaaaccaggacaaatctaagaaagttaacttactgttaaaaattgaaggcattaggggaggtaggtgttggggccaaagctttgttactgtggtatgtaacatgaagtgtgtttgtttctttaacatacagagcctgctccagttcccccaatacccaatgaacagcagttagccagactgacggattatgtggctttccttgaaaactgatttatcactctgagttcaagattcatcttcagaatcctgtatactgacaaacgtagaaatgtaaagtttgtattttcaatttattggatggcttaagcacctcagcattccttactatgtgataaaatacatatagaatataagatatactatatacattttgtccataaacgttatgctgaatagttgttgaaacagttctcattttgtagtatttaataatctggatggagcctgtcagtattacagttagttttctagtgactcataaaataagatttcctgtttcatgtagaatagtgtttgtcaactgtcttttctctgtcccagcacatgccgtactcttatatgtaccattggttgataattataatgattcatttggacttgaagaaagattgtccccaggcacagtatctgaatcactggggattatgattcaccctctttggagaacatgctctcttttcaccccccacctcctgagagccactaatgtaagatacagaaacatagctgaggaacaaatagaccatttccatactaaaccagtttgttaactttagattttttccaatagtgtgagtatatccattgctggcagtggagggcttgccatgaaaatgcaacttatttaagacatttatgagacatattaacttgtgctgtcgccttttagaaggagaaacttaagtgtggaatgcattatatgggcaaagaagctatgaagatacatgatacactttgtacaactatcctgcagcccattggttgcttatatttatcgcttggctcaagttctgccctttggagaaatactgagcaagtctttcattctctgtgtgacagccctctgaatatttgaagttgtttgttgtaacttaaggttataacagcccttagttcatttactctgcatttgttcaataaatatttaactgaattcttcaattatttcatctaagatagtttctggaaatttcactctcgatctttctgtggacacaatctattttgtcattgtgtctatatgaatctcttaagtagaaatgagttgtatggtgaatctgtgtagtgataattatataatttatttattttgaatgcattttagtggctatttcagtttttcttaacatatatgggaatactttttgaattgcaattttatttaacccgg

SEQ ID NO: 173 - DNA, 2257 bp, Homo Sapiens
aaaaaattccctctggctgcggttccgagaatagcctggaaggaggcaggggtcccggctggagaagcgtggctccggggtggggcgtgcagggctagcccgggcgggggacgctgcccaacaagcaggtttgcggagactcacaccttagattctgagtttttaagcttgtttcctcagagcagggaactcacgaacgtttcgtgagcacctacggtatgcagggtacggtgcggagccctagcgtcactgacgaccgggacagccgagcagctgcaggatccgtcgtgttccccagcaattttaatatttaaaaattcgttactgttgctgttacttgttttctatgtattggatgtcttcgtgaagaaccctcaaaagtgcaacgaactcctccctgccagagggcggccgcgcgctctgagtacagcttcccgcggagccggccaggtcctccagggcaccgagaaagccggccagaacggcggcgccctatcccggccgcagcgatgtctgacggcgccccggaactgacggtctggtacgcaggggcgctcggcggcaacggcggctttaaacgtcatcgcgggcgcgacgcctgagggacagtctggggtttggctgtccggacggtgcagcggcgaggccggccgcgaagatgccagtggcggtgatggcggaaagcgcctttagtttcaaaaagttgctggatcagtgcgagaaccaggagctcgaggcccctggaggaattgctacacccccagtgtatggtcagcttctagctttatatttgctccataatgacatgaataatgcaagatatctttggaaaagaataccacctgctataaaatctgcaaattctgaacttgggggaatttggtcagtaggacaaagaatctggcagagagatttccctgggatctatacaaccatcaacgctcaccagtggtctgagacggtccagccaattatggaagcacttagagatgcaacaaggagacgcgcctttgccctggtctctcaagcgtatacttcaatcatcgccgatgattttgcagcctttgttggacttcctgtagaagaggctgtgaaaggcatattagaacaaggatggcaagctgattccaccacaagaatggttctgcccagaaagccagttgcaggggccctggatgtttcctttaacaagtttattcccttatcagagcctgctccagttcccccaatacccaatgaacagcagttagccagactgacggattatgtggctttccttgaaaactgatttatcactctgagttcaagattcatcttcagaatcctgtatactgacaaacgtagaaatgtaaagtttgtattttcaatttattggatggcttaagcacctcagcattccttactatgtgataaaatacatatagaatataagatatactatatacattttgtccataaacgttatgctgaatagttgttgaaacagttctcattttgtagtatttaataatctggatggagcctgtcagtattacagttagttttctagtgatctgtcccagcacatgccgtactcttatatgtaccattggttgataattataatgattcatttggacttgaagaaagattgtccccaggcacagtatctgaatcactggggattatgattcaccctctttggagaacatgctctcttttcaccccccacctcctgagagccactaatgtaagatacagaaacatagctgaggaacaaatagaccatttccatactaaaccagtttgttaactttagattttttccaatagtgtgagtatatccattgctggcagtggagggcttgccatgaaaatgcaacttatttaagacatttatgagacatattaacttgtgctgtcgccttttagaaggagaaacttaagtgtggaatgcattatatgggcaaagaagctatgaagatacatgatacactttgtacaactatcctgcagcccattggttgcttatatttatcgcttggctcaagttctgccctttggagaaatactgagcaagtctttcattctctgtgtgacagccctctgaatatttgaagttgtttgttgtaacttaaggttataacagcccttagttcatttactctgcatttgttcaataaatatttaactgaattcttcaattatttcatctaagatatgtgtctatatgaatctcttaagtagaaatgagttgtatggtgaatctgtgtagtga

SEQ ID NO: 174 - protein, 209 aa, Homo Sapiens
MPVAVMAESAFSFKKLLDQCENQELEAPGGIATPPVYGQLLALYLLHNDMNNARYLWKRIPPAIKSANSELGGIWSVGQRIWQRDFPGIYTTINAHQWSETVQPIMEALRDATRRRAFALVSQAYTSIIADDFAAFVGLPVEEAVKGILEQGWQADSTTRMVLPRKPVAGALDVSFNKFIPLSEPAPVPPIPNEQQLARLTDYVAFLEN

SEQ ID NO: 175 - DNA, 2468 bp, Homo Sapiens
aaaaaattccctctggctgcggttccgagaatagcctggaaggaggcaggggtcccggctggagaagcgtggctccggggtggggcgtgcagggctagcccgggcgggggacgctgcccaacaagcaggtttgcggagactcacaccttagattctgagtttttaagcttgtttcctcagagcagggaactcacgaacgtttcgtgagcacctacggtatgcagggtacggtgcggagccctagcgtcactgacgaccgggacagccgagcagctgcaggatccgtcgtgttccccagcaattttaatatttaaaaattcgttactgttgctgttacttgttttctatgtattggatgtcttcgtgaagaaccctcaaaagtgcaacgaactcctccctgccagagggcggccgcgcgctctgagtacagcttcccgcggagccggccaggtcctccagggcaccgagaaagccggccagaacggcggcgccctatcccggccgcagcgatgtctgacggcgccccggaactgacggtctggtacgcaggggcgctcggcggcaacggcggctttaaacgtcatcgcgggcgcgacgcctgagggacagtctggggtttggctgtccggacggtgcagcggcgaggccggccgcgaagatgccagtggcggtgatggcggaaagcgcctttagtttcaaaaagttgctggatcagtgcgagaaccaggagctcgaggcccctggaggaattgctacacccccagtgtatggtcagcttctagctttatatttgctccataatgacatgaataatgcaagatatctttggaaaagaataccacctgctataaaatctgcaaattctgaacttgggggaatttggtcagtaggacaaagaatctggcagagagatttccctgggatctatacaaccatcaacgctcaccagtggtctgagacggtccagccaattatggaagcacttagagatgcaacaaggagacgcgcctttgccctggtctctcaagcgtatacttcaatcatcgccgatgattttgcagcctttgttggacttcctgtagaagaggctgtgaaaggcatattagaacaaggatggcaagctgattccaccacaagaatggttctgcccagaaagccagttgcaggggccctggatgtttcctttaacaagtttattcccttatcagagcctgctccagttcccccaatacccaatgaacagcagttagccagactgacggattatgtggctttccttgaaaactgatttatcactctgagttcaagattcatcttcagaatcctgtatactgacaaacgtagaaatgtaaagtttgtattttcaatttattggatggcttaagcacctcagcattccttactatgtgataaaatacatatagaatataagatatactatatacattttgtccataaacgttatgctgaatagttgttgaaacagttctcattttgtagtatttaataatctggatggagcctgtcagtattacagttagttttctagtgactcataaaataagatttcctgtttcatgtagaatagtgtttgtcaactgtcttttctctgtcccagcacatgccgtactcttatatgtaccattggttgataattataatgattcatttggacttgaagaaagattgtccccaggcacagtatctgaatcactggggattatgattcaccctctttggagaacatgctctcttttcaccccccacctcctgagagccactaatgtaagatacagaaacatagctgaggaacaaatagaccatttccatactaaaccagtttgttaactttagattttttccaatagtgtgagtatatccattgctggcagtggagggcttgccatgaaaatgcaacttatttaagacatttatgagacatattaacttgtgctgtcgccttttagaaggagaaacttaagtgtggaatgcattatatgggcaaagaagctatgaagatacatgatacactttgtacaactatcctgcagcccattggttgcttatatttatcgcttggctcaagttctgccctttggagaaatactgagcaagtctttcattctctgtgtgacagccctctgaatatttgaagttgtttgttgtaacttaaggttataacagcccttagttcatttactctgcatttgttcaataaatatttaactgaattcttcaattatttcatctaagatagtttctggaaatttcactctcgatctttctgtggacacaatctattttgtcattgtgtctatatgaatctcttaagtagaaatgagttgtatggtgaatctgtgtagtgataattatataatttatttattttgaatgcattttagtggctatttcagtttttcttaacatatatgggaatactttttgaattgcaattttatttaacccgg

SEQ ID NO: 176 - protein, 209 aa, Homo Sapiens; identical to SEQ ID NO: 174

(The sequence listing continues in the following parts.)
